United States Patent Application Publication US 2020/0157537 A1 - sequence listing, part 12

SEQ ID NO: 23882 - DNA, 1192 bp, Mus musculus
aggctgcagtcagtgattgttagattaactgaattgcaggctgttaaccattcttttatatgtgtgtgtgtgtgtgttttatatatgtgtacatatgtatatatacacatatatgtacctatatgtgtgtgtgtatatgtgtatatatatatatatatatatatatatatatatatgtgtgtgtgtgtgtgtgtgtgtgtgtgtgtgcatatatatatatggaaagagagattcattttataagttccattactctagagaacactgactaatacacccaaagcagacattgccactacctgaaaggcttgagtcccaaaaccctgactaggggaagcaagagaattaaggatagacatatagacacatataaaaatgaagctgggccgggcgtggtggcgcacgcctttgatcccagcactcaaggcaggcagatttctgagttcgaggccagcctggtctacaaagtgagttccaggacagccagggctatacagagaaaccctgtctcgaaaaacaaacaacaaaaaaacaaaaacaaaaacaagaaaatgggtttctgctgaggaacaagtcggtcaggaagccgcgcctcagccatggcatttaaagataccggaaagacgcccgtggagcccgaagtggcgatacaccgaattcgaatcatgctcactagccgcaatgtgaagtcgctagaggaggtttgtgtggacttgatcagaggcgccaaggaaaagaatctgaaagtgaaaggaccggtgagcatgcctaccaagactttgagaatcactaccagaaaaacaccgtgcggtgaaggttccaagacctgggatcgtttccagatgaggatccacaagtgactcattgatttacatagcccttctgagattgttaaaaagattacttccatctgtattgagccgggagttgaggttgaagtcaccattgcagatgactaagacaactgaataaatcgacttgtcaaattttgctggaaaaaaaaatgaagctgggataaagtgcggttctctacctggcacaactgggaaccttaacatacttatgttcaaaagatgcaaagattggccagtctgggtaggaggtctccatagataagcagtctcaggttgcaaatgtgacaaccccacccccactcctcagggatcataggccaagagagcaaagggatcag

SEQ ID NO: 23883 - DNA, 2232 bp, Mus musculus
caccaactggcgtccgcttgtggcagttactaactttctacagttttcttaatcaaaagtggtctaggtaacctgtaaagaaggattaaaaaattcagatgttctagttctgcttgctttgttttaaaaatcactgctttagtctacttcaaaagaatggcatttcttttcttgcccaaatttactcaaagttgcagttagcccagaaggtttaaagaaaaaggttgttgtggtttcttcccccttcccctctccccacttttcgattcccacttccacagaccaaggccccagctccccacagaggtggccgcagcactgacaacgtttcctgtgccaacactgcctgtgggtaatgagtagctcacgcaccccattccagcttagtgatgtctttaaaaaattataaaacagtatcaatgccctgtcccaaaggaacatccatgcaaacaaagagaagccgtctttacgtaaaattttagcaaagggtttccacaataataatagacccgacagacagacccccatggtccctatctgtagtcagactgtgctggctgggtctctgcagggaacctgttatagcaggtttgtggtgaccttggagggagggtctgccagcagagaatacagtgcgcttgtgtgatggacttctcacagtcagcagcccttcctgaagctgtggtagacctggtcatcacagaccaaaaaaaaaaaaaaaggccagaatattcttttgaaatttcaagcttctctaccaccaagctctgataggatgtgccaaggagagctcccactcctgagcacagcaggccaccactgccaccctcctcacggcttaccctcagcggggtcagccacgatggctctgcctctctcagagcagctgctgggacagcccaggaacagggtggcttttccctccctctggactccaaacctttccagtccggctccacttgaagctcactcaatatcctttcagtgtgttttatattgttttgattgccttttttttgtagaaataaaatttgagcttagaatttatcatcaaatgaactctgtcaagatttgaatgttaaatgtcttttcaagggaagtgggacggactgtccttgacgcagtagtgacaccctgaggaagctgatggcctgactgcccatgttcaccaactcacttctgctactaggggtctaatcctgtggagaagattgcctcaagaaaccttgctttctgctttaaccttagttctataacttccgggctacctaggcttacagacttgggagacagctctgggttttgcctataaaagaagtaagacatgtcctctcaggcagtgtaacactatttagttttccaagtgtttggctcctgtgatgcataaatgaactatgctttagttcaagttatgcatggggcaggtttctggagacttccatatgcccaggatggtcagagccctgggcctgtgtttctacatctgtctcttcattggcagaaaagtgacaatggattttatttcactcatattcagatttgtaataaaatgccaaactctgtcagaattgtcgaagcaaaccaccattttgttcatgttgcttttctgaatctagagatagtccagctgtctcattgcttagctctacctgcctgttacccgtcactgctctctgctcactatgggagggtactcttatgccagcagcccctctcagggactctcagccccattgttgacaaccatggcctgccctgccttggagtcagtggtgtccctctgggcttgcatgccttgtcctgtccagccctgccctgagcaggctttgagcaaggtggcagggagacctgtggagcagccacccacgcctgacccaagctggctcaggaatccacatccccctggttccttgaagtgcccgggtctcgtcctgctcttcccacaatggcagagaataggctttctaagatgctgtgaccccattctgtccttaataaaaatgttctcagacattagattgggtgtatgggtttctttggggatggccattgctggggggtggggagcggctatttggagactagagagtagtgactgggcctctaatctttcctccacttctcagcctctaaaagaggtgtacaggtggttctgtctgccaggtagaagtagataggggagtcaacactgggaaaatctcaagagaccccatggctatcaaggagactggc

SEQ ID NO: 23884 - DNA, 1174 bp, Mus musculus
attaagtagcttcccacaggggcttttctcatggaattttgtggacttacaggcaggaaaggtaacattttgttagtttttatggtataatagtagatgcaaggaactgagatttgtagcatttttagagtactttttgttgttgttgttgtttttctgagacagggtttctctgtatttccctggctgtcctggaactcactttgtagaccaggctggcctctgaactcagaaatccacttgcctctgcctcccaagtgctgggattaaaggcatgcgccaccacactcagcttttagagtgcttttgaagtagtgttcattccaaactccacattggtgtacctcctcagtctataagcatgtatcaggacacaggagttattcaataacagctcattccttggaatttattgtactgagcagtaaactattttgctcttgaatataggattctatcctcccagcttggtaattaactatagaacagtgacaggtctggtaattgtcttaaggggtgtggggagagctaggtgtgatgatgtttttatgtagggattaaagagcttgaggcaggaagatcactgggagctgggatttccaggctaacttccaacttagtgtgtgtgagactccagttcaaaaaaagaaaggaggtgaggagtgagggaagggctgacttgcttgctggcttcctttcttcctcttttgtttttccttccctcctccaccctcccaagactgattactgtatgtatctctggctgtcctggcactcactttgtagaccaggctgacctcaaactccgtgacctgcctgcttctgcctcctaagcactggaattacaggtgcccaccaccgcccagcactgcccaacctgtaggaagttttttacatgatagacgtcataagccatcttaaatggcttgaatccattttgggaatggattttgggatgttttgttttgtttttttgagacagggtttctgtgtagccctagctgtcctggaactcactctgtagaccaggttggccttgaactcagaaatccaccagcctctgtctcccaagtgctgggattaaaggcgtgcgccactacacccggcagattttgggatttttaaaaaatatatttatttatttattatatgtaagtacactgtagctgtcttc

SEQ ID NO: 23885 - DNA, 1126 bp, Mus musculus
agagctttagcctctttagaggcagagctgaagctctgtactgtaaggcagagtcagtgcctctaggctacggggcctactccaggaactgctggtgttcccatgatgctttgtaagggatccccttgggaaagtatttcctgtatgctttacagaagagcctacggcaatttgaaggagactggtcatgtccaaggttgtgtgacaaccaagagccaccacctcccatggtctttcagggctctccaggctagtgaacagggaggttgggacttcccgcttctcccctcagatacaacagagaactctgccttctagagtgtagccaaagacaactggaagccccctggggccaaaatattgagctgtccaccagctgttccagcaaggaggttaacttggacttgaaggctactatctgaaagtgggaaggagaaaggaactgctgggagcccctcaaaaggtttaaaaatgacatggaaagccagagtggagtcacctgaaactccactcattcaatgctggagagctgaggttgtagagtggagaggaaatccacccagcatccggtaaactggaggtcattgtcctttcctaccagtctctatgacccttgaggaacaagctcagactggctctgcagctaatcagaggagggcacagagaccagctcaccttgctggacttcatgtccaactccggagggcaggtagaaccttttctctctctctttttttgtttgtttgtttgtttgttttgttttgttttgttttttcgagacagggtttctctatatagccctgactgtcctggaactcactttgtagaccaggctggtcttgaacccagaaatccgcctgactctgcctcccaagtgctgggattaaaggcgtgtgccaccatgcccagcgaaccttttctcttaatccatagcaattgagaacaacacctttcacaattgtttttacttaatagggcatttgtatttatacatatgttcctgtacacatatcattgtgtatgtgtggtgtcagaggacaacttgtggcagtcagttctccccttccactgtgtggatcccaaagatcaaactcaggacttcaggcttattggcaagtgcctttta

SEQ ID NO: 23886 - DNA, 1204 bp, Mus musculus
gaaccagcagagggccaagggcttcctgtgtgacgtcatcatcatggtggagaactctatcttccgggcccacaagaatgtcctggctgctagcagcatctacttcaagtccctggtcctgcatgataacctcatcaacttagacacagacatggtcagctccactgtgttccagcagatcctggacttcatctacacaggcaagctcctgcccagtgaccagccatctgagccaaacttcagcactctactcactgctgccagctacctccagctgcctgagttggcagccctctgtcgccgcaaactgaagcgagctggcaagccctttggccctggacgagtgggtactgctggcatagggcgaccaacccgcagtcagcggctgtccacagcctctgtcatccaggctcgatttccagggcttgtagatgtgcgtaaaggacaccctgctccccaggagctccctcaggccaaaggctcagatgatgagctttttctgggcacctccactcaggagagcacacacggcctgggcttggggggtccagctggtggggagatgggcttggggggctgcagcaccagcaccaatgggagtagtgggggctgtgagcaggagctgggcttggacctgtccaagaagagcccacccttacctcctacaacccctggcccccacctcacacccgaggacccagcccagctgagtgacagccagcgagagtcacccgcacccacatcgacctctgccctgcctgtcggcaatagtgcctcatttgttgagctgggggccactcctgaggagcccatggatgtggaaggggctgaggaaaaccacctgagtctgctggaaggacagggtgggcagcctcgcaagagcctccggcattcagcccgcaaaaaagattggaacaaaaaggaacctgtggctgggtccccctttgataggagagaaacaggatctaagggttcctgcccaggggaagaaggtgaagggactggggacagggttcccaatggcgttctggctagcagtgctggtggaggtggccccagtgcatcgtatggggagcagtcattcccctgcaaggaggaggaggagaatggcaaagatgggagtgaggacagtgggcagagtgggagtgaggggggcagcggccatactggcgcccactatgtataccggcaggaaggctatgag

SEQ ID NO: 23887 - DNA, 4422 bp, Mus musculus
cccagcctcctcacgcccagagctttaatcaacagtataccaagggaagccaagagagaagctgaccagtctagccctatgcatgtggtgctggtgactattctacctccctgggcccactgggctttccagctccctgaaggagctgctgaagagccggtgggagtccatcatgtgggtgccagtggggcctggttggttcctttcctgcaggttgggctgggccacagggtttcctgtggccaaaagtggtgcctggagcaggcctagctggcagggacctcggctgtgtgtgtgcatgtgtgcttgtgtctttgcagtgcagtgtgactctggtgttggggtgctggtgctgggtggcagttcctttctctgtgagctggggtggcaactgctagctggcactggaacagtcagggtgacccattgcctacctctctgcaactaaagagccctctgggcctatattgctgttattcctactgagctgttcctatttcttttttacagtttttaaaaattcttttttaaaaccaaaatgaacaatattttcctcctgcctctttggggttgagcctgggtctgcagactgaatgtaaccggggcagctgcccctccctatcattttccctagtcctggtgcttgggcatggttgaacctgcctctccaaggcccagaagcccttcttgcccaaaggcttccctgattctgagccctgcctgcctgggcttcctcaggagaatatgcttttccataatttccaaggaatgtcccttgttagaggtacttatttttattgagaaccacaccctcccccatatacctttttgagatgtggaactggaaggtctgaagtttcagagggtggaggggaggctagattcggtgccagagccatcggtactcttgctctcgtgtgcacacgcatctgtgtgtgcgtgcgcgcgcgcgcgcgcgcgcgcgtgtgtgtgtgtgtgtgtgtgtgtgtgtgtgtgcgcgcgcatgtgcgtgtgtgttgcttatgcacagatgcttcacttccttgctcactgaacatggtggggagccttctgacctttgctacctcttgaattcaatacccagtacagttgaggctgagccacttgcttttgtttttctgtagtgggagtaacctgggcttgggctggcccaagccccttgtgggacccagtgttctctgaagagatgtctgctgctcagggcatgctgtgtgtggggcaggtgctgggcatctgagtaacaggcagaagccattaggaaggagcagctcccttttatgagccagggtcaggtggaagtgagcccaccccatcctgtcccctccagagctcaggtatgtctggtaacctacagcagagccagaggtaatggttgacccctacctatactgactcagtacagggtcaagctaacccttccatgggtgtgtcagccagcctcagatgtttgcatgggcttctgcaaggggcaaggcaagaccaagagtgtctgtgttctgtcccagatgggcctatagaccttatcatgttgcttcatggcttttcattttccttttgatttttacttcagaccaaaaaattccagagtcatcccctgcttgcctccacccctcagagaccctggagcctacattcagtacccagagagtgttgggtgtgggagtgagggcacctggccaaacctccacatagtgcctgtgtactgagccagctctccatcagccctcactgggaatcttagttctctgactgagcatctgagtgcagcccaggcactattctacccagtgaaatagcagggcatgctggcctctgctccccacccacccacctaccagcacttaaggcctaggacacaaggtctgtgtggcctcccaggctgtaggtaccctcatctgcagaaaatcagggactaggagcagagcccctcactgagcatgtctgtgcgacagagtattgtacccaccttagtgttgtaccaagccttttctgtgttttaatgagaaagcaaaacactagtttcctatttgagatttaagggttgttgggatgggtgggatccacacttggattctctttcctttgttctcactgctgcatgcctatgagtgtgtctctgtgtgtgtctgtgtgtgtgtgcagatagaagagcctcatggaaaccaggccataggaggccaaggcagcgaacagttctctgttttagtcatttaattcctgaatgttttggggaaacaggaaacagaaaatagcagatgtcatgtagagaaaaaaaaaagttaaaaaaaaaatcaaaagaaaaaaaaaaaaagctcatacccaaattcacaaaacctattttttaaaccaaagcacattttgaatgagtgtggaacctcagtgggctcagaaaaaaatactaatatatttatctcattgtttacataaacttatacagtttcagacctcagcagctacaacagtcccagggaagctctcccctcccacctgggtccttctgaggcgacccttgagcagctcaagggcagaggcagccctgggtgctgggtaaggactcgaagtccccctagcttcacctgagccctcatccccattttttggggcctcttcaagctcagctgccaccaaagagcatgcaccaagctgaccagcccccaggcttcctagctgaacccaaggggtggatttggccctgcccatgagccttgtgttactttgagagtcactcaagccaaaaaagcaggtagctttatgaagctcagtggactccgtcatgcacgtaccctaccccgggcagcagaagggtctgactggagtctggtccttactaacaaatggtgcagacactctcaacagtgttgtttttgtatcaatgtttgtgcagtgatgaatgtatttatttctcagacttagggcaatccagtggagcaggcctggctctgccagtgcccatttccaccggaccgagctactgcaagggctcttccaaggttgcaaaaaggaaaagatgaacttatgaacacataagaatctcagacttgcagcatagccatacacctcaactgtgactcctgacctcatgtggcccaggaagtgtgttttccgtccatcaacactgaggggagccaggtccccacctgctgtccacactatcagtattcactggacctcaggtccttgtgcaggagtgcgatctgccgggcaatctgtcagcaggcagactgctgccttcctgagtaggggaaaccctgggcagccgggagggcaggcctcagggagcaagcgctatgagtaaaggtggaagccaagggcaaggcctgtaaagactggacaggctctcgaaaccctgctgtgctcgatgaaagggaccaaggtcttcctttccccagtcacgatggggccaatgttactgaacctatgaaatggatgccaggaatgagggatagagagggacccgacctcagtctgacattccagcccaggaaagggtgggagctgtggatccgtgctgcccaggaccccttcctaggaaacctgcagcttcagtcaccttactttaactttctaccagggacccctcccctacctcaccttgctatttattgctgtaatttattgacctcaaaaatgctgcataacagacctcacttgggtcagggagagttcccagggtcctcccctccacttggtggggccccatgggggccaggtgctgagaggaaccccctgtacccacccatcactcgttttcctccaggagccccaggttgggctctatccatcccatttgcaaatacctcaggagggatggggtatctgtttcatttaattggaactggaagagggatcatgacgtcctttatgcccttccccgagcaggggagggatgctgggatcgcactcctgtactggtcacccctattaccacgcatcacattgatttgagtttacttccctaaagagtttggatggatgcattcaggtcagagctgcagctctgcagccctccgatgttagagtgatttatccatgactaatctctccattcaaaagcgtgcagtcttaatgtacagtgatgagaaactgttattttatgatcttttcattaaaagcttgattgaaaactgatgtggagtctgtgactataccctctgacagattgacaaggtgcctccaagtcttaggagagcaggaccttggacaaactcatgccagggggaactctcctttagatgtgggcatggtcatagcaacattggctcaagttaattaagactgtccagaaagcagatacggggacagttagggtgggtgggatgaggaggtgtggccagtaccaggaccacagttgaaaccaaaaaagtgctgggccaaacatcccccctccccccatagtcttag

SEQ ID NO: 23888 - DNA, 1174 bp, Mus musculus
cccaaaatttggtcacatcccagcattccagctacatttgtggccctagcctcctttgtctttcccctgaccttagggcagccccactgagtcagttactttctcctgttatgataaaacaccatggttagacttgtgcaataagtctttattttagctgatgattccagagggcagaggcatggcagcaggtgccagagtgggtagctgagaacactagaatggagcaaggctgtacactctcaacacccatgatggttttataacatccctaaacaatgctaccaactggagacctgttcaaatacgagcctcaaaactctcctgccctagttacatgcctcctactccttctcagacagccactaacctgggacaaagtattcaaatgcccaaaacttacaggaatatgtcattccctgcttccatactgtcctgtatacatgcaataggagcatgcagtaaaaactatactggattgaatctctctgattcccaggcctcttgctgctcttcccacctcacttagactgactgacttgttctggccctgaagctcacctgcacctacctctgtctcttctgtcttctcatttgccctgctgtagctctactagatcctgttgctcctgctctcccaggctgtttctgcctagctgcatcccatttcctttacttagatgaatgtcactgctgaccatctctaggacttgtgtccaatgttctcttccatcccaccagcattctctggccaccctatctaaaacaccttccctctttgcaccatactgctgctttctcagatttagtatgctgcctgttgcttatatcttggaccatccacatttgtttgttcccagagtctgggagaccctatcatagaagtggatcttacacaaatgagtgggagcgtagcctttgcttggttactttatcccatcagttctggggtttcctatacttccaaccaatttggtaccccaacttctaccataaaaaatacatctaacagtaggcagaagccagactccgaaagaagccacagcagggtatatagctccttgatattcttcatttcccacctataacgatgctaccttagcatgaaaggcctttgtcttcaccctcatggcctcccaatggcatctgtgccttcaggaatcacgaggaatag

SEQ ID NO: 23889 - DNA, 2031 bp, Mus musculus
aggatccatgttcatacagaacggaaatgtgttgccttcattgtccctatccccatcttctgttcttgtcctgcactttagcagaaggactcagagcagaactgttaggcccctcttctcacctgttctcacctcatctttccatctctgatggggactttctccactggctcaaagccaactggtaggttggtttgtgtgcatggagtattactgagccctctgcctctgggaatagaaccaaaggccttgtttattcggtgcctggagtctcctcatccatcccagattcccatgcattctccatagctacgaagtgttccacctagtttagggacttcgactccacaaatgatgctaaccttctgtctgtcagatgattcgaccaaaaggcccagagactatcttagctagcttgtgtccactcccttcagtttccaaaagaaaatatttagaagtattaattaaaattgattcttgcaagaatttttccttgtactgccaataaagtcactgaagccacagaacacctgactatcttaaaatcaaactcacatattttgaagaaggtaaaagagacttactagtagatatgtcaaaatctataatgctggtgccttcttgccttaaaacttggctcatgtgccatttgaggatccttccttttgcatctggagtctgcagtaccttaaagcaaagcaagcagtgggttcatctcagtggtcagttatctactcttctctctcggggcctggggttggtctccaccattgaggagaggatcagaaaatggggtaacaggattattactgttcatgtagcaatatgtacacactcttgtcaaaaattatccaacctttctgaaaatacagcaaccacagggagaaagggcccaaatctgaaatctgactgaagtggacctctgtgagttccaggacagccaggacgatatactaagatctgtctcaaacaatatagagagactgatccatatgtatttccactaattggttttgttttgtttttttctataaaaccttccaagtgttataactgtttctcttcatcactatcaggcatagccttttagaaattgatcaatatacctcagtcctaagaaatttacacatgagaatgccttccatggtcatcctagtgtaaatcagctaacttgaggcaaagggacattttatgtacctttctttgttttgctaaattaatgaagccaatcacccctttcccaatctttttttgctccatgaacatgaaacagtcttcctgtaaccattagaggtcctcatccagtctgttcttcagactctgtggtccactgaagttatcccttggcctgctggagactggctgaggcagatgctgccttacaaagcagggttgtttggaagacacagatacaaaggacttggggaaactccagagccagatctgctggctgacacagtaatcacagcacttaggccaaggcagaagggtaaccatgagttccaggttcagggtgagatcttgtctcaccctgaatatcagtggttgtgtgtgtgtcggggggaggggggtgaaggtgggcagggagggagggaagaaagactcactcctgcgctctggcttaggaagagttagtgttggcgaggtggcaggcagaagtggaatggactttctgtctcacagaccagtgaacatatccttgtcatgtgaggtctgcaagacagactgaagcaccctaccttcagaaaggtggcatttgtaactttaggttagctatgtgtatgtgtgctaccaaaacaagtgcattgtcctctggagaagactaaccgttactgacgtgtaacttagcagcattagagtgacgtcttcagttggttttcctcattctgtaggagaggcctgatgttcattcatgtaacaagtaaaacaagagagcagagagtcttaatttccctttctcttcttataaatgtgcaattttaagtgtataatgtatcacttcagtaaaaaaaaaaaaatctactttgcttg

SEQ ID NO: 23890 - DNA, 1120 bp, Mus musculus
ttcttagcaacagattgtgggtgatggtgcatatgtccttgtacacacatgacacaaagtatatttaggatattgttatagactacagaaggtacaatgacagaacattctcacttactgagaatacagtgaaggaacagttccttataggggaaggaactctatatgtttttgacacataccagcatagaataagatttctcttcagaataattgtgtttctctcttaaggtacccaagcccaccagtgggttctgtctcagcacccaacttacctacagcagaagaaaatctggaatatgtacggaccctttatgattttcctgggaatgatgctgaagacctaccctttaaaaagggcgagcttctagtgataatagaaaagcctgaagagcagtggtggagtgcccgcaacaaggacggccgggttgggatgattcctgtcccttacgttgaaaagcttgtgaggtcttcgccacatggaaagcatggaaataggaattctaacagttatggcatcccagaacctgctcatgcgtatgctcaacctcagaccacaactcctctacctacagttgccagtactcctggggcagcgatcaaccctttgccatccacacagaatggacctgtctttgcaaaagcaatccagaagagagtaccttgtgcttatgacaagactgccttggcattggaggtaaacatttatcaagactggtttttgaacgtgggtcttcatttaagttagtcatcccttttagaggtgcctgtgttgttgggaattagactagagagttcacagggtggacttgctatccttgtcctttccaagccctcccttcagtccaggttcttagctactccctctctcctttgctcccagcagggaaagtgataattagacccataacctatgagtaaaattagccatcagaggtacagactacttgtatagatccgtatcattacattgtaattaaggagtaatacaaataaggtgtctaggcagagaaatgagtttactaacctttgcctgttacagattttgtaaatcatgatagaataaagtaggaaaaacttgaacattttcattaccaagtcactgtctttttttgttttt

SEQ ID NO: 23891 - DNA, 4000 bp, Mus musculus
ccctcttcccttacaggttggtgacattgtgaaagtcacaaggatgaatatcaatggccaatgggaaggcgaggtgaatgggcgcaaggggcttttccccttcacacatgttaaaatctttgaccctcagaaccccgatgacaacgagtgattgctgtgctgtccctgctgctgcctccttctgcctgtcagtctcctttgaagtgggaagcactctgtcacatgcaagttacaccgagctgctggcggtcagctttccatacattggcagtccctgcacatacggaatgcctcagcagctgccttgctcgctggctcggcatttgtatcatagtcatgctgtcaaagagtagctgatttagagttcttgtggattgtgaactggaaacactggtggaagcacacagtagagactggaacccagagcagctcttccttcccatccatcactgccttgtttgtactggaggctgacagagagagcaagcaagcctgctgatggtctgcatggagacggtgaggcttggcaaggtctcgctttgctggtccacagaacagtggttttgccaccaactcagttttctttggacgacagaggaagtaaaactccagacaattctgtcccgaactcctcaagtctggctggttttcattttcttttgtttagttttgttttttggaagactaattaattatagttgtgtgttctgaacagatttttaaatagtaggttggtctatgatggtctaaggaacaatccatgtctctgagcttccaaactgaagccactgtacgtaactaaaataggaaaagaccccctccaggggcctttatcttttggttgccacagtaccttgtttaccatgtggcaaacagtgcacagcagcagtcatggtgtaccttgctgtgaagcaccaaggtgggggtgggcctgctgtcatcgctgcctctgacaggagcagacagggtgggcctcttcagtgaaaacgtttgaagtctgtgggcttactagatccgtgagttaaattgcattgctgtgttccaccacagaggccacccagcccttcctgtactgacctagcttgtccaggcagcttgagagtggtgtctgttctggttccacagcctgagtagaaccagaatacagtgcttctgagcaaaagaagacgcccctcgatcatgagccatttttccttgcatgtcagctactacagatatgtgtctgatccctcatccacacatggcaaaccagagctctagaacctttctagagtgcactcttttcagttggaccctgatgaggatacacctccacacagaacgaacgtagcagacctagagatggagtagtggctagtgagcagctctagcatttacagaatatcttctgtaaccatggccctggttctgcaggcctgaggctttgagaactaatggaacatattcaggtgacaaaaccaacaaaaccctttgtccactatatttatttctcttaaagactttaaatttttgtttatgttgggcatggtggacacacctttaatcccagtactcagaaaggcaaaggcaagtggatctctgagagttcaaggctatcctgatctatgtagtgtgtcacaggacaggcaggcctacatacataccttgtatcagaagatggcccaatccccccctcagacctccccccaaaaaaaactgtatatgggtgtttccactacatgtatgtatgtgtatcacatgggtagtttgttaggaggccagaaaagggtgttggttggatcctctggaactgtggagttactctgtgggttctaggaattgaacctgggtcctctgcaagaagaccttaaccactgagccatttcttgagccccattagtttctctttaaatcagtagtccatcaggctaagttctatagtaaagaatgttcatgtgacaaagtaatggtcatttggggtatggggagtgtcacgtctgtagaggttacttctttttgtctctgaaagctgccatttctagccagacctattgagtggacttaagtgttcaggccccagactctgcctaaatcaagatttaagacttgccttctggccagttacacagtttagccccaggcctttgatgtctccactggaatacacaccttgttcactgagggcacaacccccaagggataccccatcactggggcctgaacctcatgccttacacgtgctagataaccggctgccagtaagcttttgaaatccgagatgggatctctataaattgcccatgctggcttcaagatttccatcccagcctcagctgaaattataaaggtttgagtcaccacacccagctcttaaggtcttttaaaactacatttaactgaagggcttggtgccttttgattatagcaccttgcttagcataaacagccatttttgagaacagggtttcccttttcccaagactgttgaccagcaagactctaaggaatacttcatgatcagaatgtcccataaccctggagtttgctttatgtaatcagttaatttggcacatgtaaatgtctatgcagcttcctcagagatccagatctcaaaataaagacttaactttctgaactctcaggatacgtgcgtgcgtgccaacaatagtaattctctgacttagaagctcatcgatttttaatcatggaaatctctctcactgatagaaagcagcatcttccccaagtcccactcttctgggaagacccttggtttcaggggagtacgatggaggcttccttttctcatcatcagtgctgtgtggtctgctctgccatgttgtagaaagtactgggatgataaacccacttgctatggctgttgtatctgagaaggaaacaattaggtagttgagggctttaagggctagttagtcctgggtgacagccccccacctccacctccaaccccatacagaaggcatgcttgtcactctgcactgctctgatgccacctgtttcgaggttgacagggtgtcctggcttttgtcatccagacgtaaccctctgtgctcactggaagagactctgccctcttttcaagttgcacgatcctggcactgtgccagccttcctctacagctgtttacagacaagatgggccaagactgatggccactgctcttgtaacctttactcaaaagaataatgagcatttaaaaaaaaaaaaagggatgatgtgtttttgttccaggtgttcataatttaatcttttaatattatgttcattaacctcttaaaatgagtgaattcttgattgttttaacacagtacctaagactaatgctttctgtggactcctcactctggaaccagtgaacccctccctggttaactgctgtgagcgtggacgctgagctgcttgtatattctgaaggagcaggaggacagttctgagacaggaggacagtggccttgcttctagacggtcttcactgtgtgttttaaaatgacataaaactcttttgacgtgtataacttaaagaacataagcatcaggcaataatattttctgtgtaagcttttaaaattatttttggggatcatagcttgttttattttgtgctataaaattaacagtattaaatgacttatattcttagaatacattgagtgtcttttcttaacagattagtgcctttttatttttgtattccattttgcgttactggtcccagcatcaaaacccttgtttccatggcctgtttgtacattgtctcaataaaacttgcaccagccggcgtggcagcagcctcggtgtttcagtgtctcctcagtcagccccaccagactctcccaacagttcaactgtgctgaagcccctggtactccccagagacccactcacgctgctcctgcctccctcattcaaaaatgacagcttcctaacatgggagcctcctccaaaaggaaataactcttttctgggtgtcgtggaagcaagcacttactcagcattccg

SEQ ID NO: 23892 - DNA, 1139 bp, Mus musculus
ctacgctgaagtcagggaaaaagagttcagagccccagcgttgcattaaagtcttcagctagggcacagactaggttcagatcacctaaaagtcgagtgcaccagcctacaagcacaggccttcagggcacatatgttcctcacaggtcttggagatgtggctgagctacctgcagccatggaggtatgcccctgagaaacaggctcagggcagcgatccccagccacggtgtgtgtcagagaagtggtgagtgtccccagcccacctgtcccagtgatgccattgccctctggtgctaagttaggcatgctgtgcttcaggtcttgagtacacggcgaccctagaaccccatctccttgttcggcctagcctggctccatggtcaccctatcagcacagaggactgaggtggggcatcaggaaggggtaggctttgggagtaaggagcagtgtggccctgcctcctataaggggtctacacggtggtctcactccagctggcccccatcttgctacctgtcttcagggcacccttcatccaggaaaacctgctgatgtacaccaagctgtttgtgagctttctgaaccgtgccctacgcacagaccttgtcagccccaagaatgcactcatggtcttccgagtggctaaggtctttgcccagcccaacctggctgagatgatccagaaaggtgagtcttcagtcccgggcaggctccactgagtgagttagtaccttagctgctgagaagtggcacatagaggaatttggggttgctgcatgcctcaaggatgttctttgtggcttgcagactttgcacatcaaaagtatagtaaaagtttggctaatgtccccttcctagtgctggcatctaggcaatggctatactgagctcaaagacatggacatcagagctctaagctgtagctctccgaactgctgttttaccctatagattggtgggtagtggcgggcattggctgctgtcactctgctagcacagtgtctactgttggcaactgttgcttttgctcaggctcctaagcattagagctgggccctcgagctaccaagcccccgagacagtacacaggtagaggccctggagtacctgcaccagatattcccgttaggccttt

SEQ ID NO: 23893 - DNA, 1193 bp, Mus musculus
agaaggtggaattggggtctctggagctagaattataggtggctgtgagcagctccaggtggggtatgtaagctgtttctgaatggccaagtgggccactgtggcaggccacgtgtcttctgtgacctgaccagtgtggggtaaggagtgcaggtgttgttttccctaagatcccactcagagatggtgtaggaagatgtggagatgtgtccccacatgccagcagtgcctgctaccttgggagaggcacctgattgacttgctctgcagaacagactggccgctgagctgtgaaaggcaggctgaaggggttgcttggtacacagtgattgactggggacctttggagttggtggcctctaggctggcccaggatggcaagaggccaacaggaagctgtcttctccttctagaactgcaatcctttctttgatgaaaggcgggagtacacatcctgtctctttgcctggctctatggtgtcagtccttggagtgcttacagaaacccagtgctgcctttgctagcagtggtgcagtcagccctgtttctgttatctgaggtgccttgagaacagagggcacgctggctccgtggacaacgccaggcctctgagcccaggggactttgatatgtcattcacctcttcagataagctctgccagactagacaggtgctgtggagccagtgcagtcccctcatggatgtgcatgtggctccttgggcacctcacccaattaagatgaggtgaggcagcagcatctgcacagccagagccactttgaccaaggccttgtccttggagctgtcctcctgggagactcatgaaggcactgaggaagacagtcttctgggctagccggggagggtctttactggccctcagagaagagtttcctaggttaggcagaataggacagaacataggaccttccgaggctccctccttatacaccagtgcttgaggagcaggccattaccatatctataccagcccagaaacctgaaatccttgtggtctcccaccaaggagccaggctacctacctggcctttcttctagccccttggataccatgtgttatgtgtgcccagaggtaaggcttgtgcctgagtgaaagaaataagggtggataagatgggatgtcagagcagtggggagtttgtacagggtgtgtgtagcatggagctggct

SEQ ID NO: 23894 - DNA, 1201 bp, Mus musculus
gtgaaagcattgtttgcagtgttgaggatgtttaaacttggagtgtggtaagcaactgctctaccaaggagcctcagcccacagccaagcttctaaggcttgtgattccagagtaccctctgcaagcagaaactcctgggcgcccttattttgagtgactataatatttgctgctgttctcaagtattgccttgtttttggatcttgaagtaatcttataagtgtatggatacattcaagacagttttttgtagtttcccaggagtgagtcgtaacatggctttgagggtctttgcacagtgacagcaagttatctaattaatcaggagctcaaagacctagattagaatttccaaccttgtgtccacatattctgccagtatgcagaaaccacatattgcatctttgtgcatatgaaataccacacaccacagactaggccatcaggcagctctgtgagagttgctggtgtgggggcactaagtgagtagttcttcagcttcattcctagagtgtaccctcagtaggagtgttctggtagagtctataccagtgctagaatgacaggtgtgatgatctgtgcagtaatggtggcagggctcttcacctgggctaagtgttctggaaaggtcagccagccccaagatgtctgttttatatagctatcttatctcattatactcaagtttctgagagagataaaatcaccttcaatggaactttctggggtccaaaaaaacaaaacaaaaaaaaaaaccccaaaaagcagaactatatctttattttcctacacattggtctcttaactttctgttctagtaatataaaactaagcaataacttgcaggtaccaaagaattatcagccaagtcaaacatttgtcatgcatgtatgcacattcaatatagcttacttagaagtgctctttgaccagaccttgacccagagggcctgtatccctgtgagtcctcctaaattgttgccacagttgggatctggcaaagctctattgagtattagaattcctttgcaggtggcagtgtatggagagatagagaagagtcatctttgcaagagttgcacttggtagctgctcatctgatcctgtaaagattttcagtggtttttctctggagtttctgcctcgggtaggccaggtggggctttctttgtcataaagaaaactaaccagggcctggag

SEQ ID NO: 23895 - DNA, 1196 bp, Mus musculus
tgctctccctagggagtgtctgcctttgccctctgcttctctaatctagccacttgttcctgcctgctggaaataagggcctcatactttggtgtctctggaagtctgttgtgggcttactctgtaggagatctggacagagaagaagagtctggttgctggttgagcttgagggctcagcccatcttcagtgcagctgtgcacgtcacagggctccattataatccacattagaacactgacacaggctggactgaaacatggagtatgctctctggttctgagcctcatgttccagcagttccaagtcttgggcccagacttggggaatttcaggcctctggctcctacttgtttgggaatttgaatgggtcaagcacataaaggggagggggtcctctatgtcctgggagccatttacctgtgagattactcagtttgggttcctttcctcaagacattgtgcccttgtgttcccacagaccccatgaatgcactgcagagccttactggtggacccaccccaggagcagctgggattggcatgcctcctcggggcccaggacagtccctgggtgggatgggtggccttggcgctatgggacaaccactgcccctctccgggcaaccaccccctggaacctctggaatggcccctcatggcatggctgtggtgtctacagcaactccacagagtgagtactacactccttggcaggtgacactgcatgctattcttgtgctctccgtgttaatgggaaaagtgtcaaggagcccagatagctctgttgtggacagcaggtattgcaggggaatgctctaagccttctctaaattcagaggagtagtgcttacctgcctgctagctaaggcagtgatgctgaggagaaacttggttatttgtaaacttgtgggttttttctttgcttagggttgttttggttttggtttttagagacagggtttctctgtagctctgactgtcctgaaaccatagaccagcctggtcttggactcagagttctgcctgcctttgccaacggagtgctggatcaaagacttgtgccatcaccaccagcaaggtgtgttttatcagtaaaataggaactattgttaaggtttgtggacacaaataagtgaagtatttgtactctatgccccggtggtgtgcttgaggttatggtacatgcgactcc

SEQ ID NO: 23896 - DNA, 1124 bp, Mus musculus
gttggagctggtctctttggttccgttatgaagacattacttgacatacacagactcttgccttgcgaggattgggatgtggcttgtgtggactgttcattttataggtgagaaatgtagaactgcagtctcacagtactcagatgtagaattgggtaggggctcaggcactcacaggcctagaaatagagtctggctagccacccactgacctaatcaatagtgctgattgtgagcaatctcttgggacagtccccctgtccttaatgcccaggggcttctcttttctttaaggtaattgccttttcttttcaaccttcttatggccctgccctttttctcaaatgtttaactctggccactgccctgctgagtgcctctccttggttcctccccaggacttcagccagactagttccccagggatagtacctgtctaccagggtggacttggtaatgttttgacacatctcttcttttgtatttcagtgaggatgccatgaggaaagctggtgtggcccacagtaaatctagcaaggatatggagagtcatgtgttcctgaaggccaagacccgggtaagaccctgctggccaaagtccccagcagagtaattccaggaggagtgtgttgctgatactgagccccttctacttgtatcctggagaggggagtgcttgcttgctgctctcagatacagctggctttgccacaacactctggaacctcccatgttccatggaagaaaagtcaagactcctagattggcacttctgctacaggccctgcctctgaccctggcctcatttttgaccatgtcatatatatgtagttggccctgtgattcccacaggaagctccttggatcctataaaagagatgctggctttgtgctacacatccctgaggcaggggtctagagtcatctttggtttctctgttcagggaggcagccaatgctggaaaagttgagggtagaacttgccgggtagaattggaagaagactttccaggctagtacagcaccagcctctatgtgaccttctttcagtgtgttagttctcaggagtggaaattagaagtgaaggaagaggctgaacgataactcagcaattacaagaccat

SEQ ID NO: 23897 - DNA, 1171 bp, Mus musculus
agaattttaacagaagaaaagagccaggtatactattggtcacaggaccttggctcttctagtgtgccaggggcagggagtggccaccggttccttctagtctgtggcatctcctgcttcctttgcactcagacttttacctaaaagtaggtgatgtatgtcagacctcctgtgtgccgagtggtgtctgtgcttgtcgtcaggctgtttgttacgactttacccttgtttgtaagtggggactgaggctctgaagggtaaggaacatgccctgtgttaccacagcaggttttaaactaagcctacagaaagtttcagttttctgtcagaagaggttggggtcggttgaggaaagattccactttgcttctcccagtcccagaaggccagctacagggacagccagctctgtatgccttacttctgctgtcatcctgtctttaatattcagatgcagtcctccagctaagacttgagtgggtatccttctttttacagataccagaaattatccacttctgctgtgatttcctcatgtcatgggtagatgaggagaatatccttgatgtctaccggctagcagacctctttgacttgaaccatctgacccaacagctagatacctacatcctcaaaaactttgtggccttctccagaactgacaagtaccgccagcttcccttggagaaggtctactctctcctcagcagcaatcgcctggaggtttcctgtgagactgaagtgtatgaaggggccctgctctaccattactccctagagcaggtgcaggctgaccagatctcactgaatgagccccccaagctcctagagactgtgcgctttcccctgatggaagctgaggtccttcagcggctgcatgacaagcttggtcctagcccactgagggacacagtggccagtgcccttatgtaccaccggaatgagatcctgcagcccagccttcagggcccacagacagagcttcgctcggacttccagtgtgttgtgggctttgggggtattcactccacaccgtctacaatcctcagtgaccaggccaagtacctgaatcctctactgggagagtggaaacacttcactgcctctctggcgccccgaatgtccaatcagggcattgcagtgctcaacaacttcgtgtacttaattggag

SEQ ID NO: 23898 - DNA, 1196 bp, Mus musculus
ctagaactctgatgttgaaactgtaagaaattgccttgtgaaacaaattaattttgtctttgtttccacttgttcttttattttctttctttgaattcatatatacaagtgtattggctttgtatcactactataaaatatctaaagtaattagttgataaagagaggatatttatttactgcatactttggggtatgcccactggtttgtcccctgtgagagtagatggtagcggagggaacactgaacctgttgttacactgtgctccaggacacaggagggagggcagggacccagagttagatgatgttgtttaaagacaggatcttacaaaagaaaagagagaaaaaaggagaaaaaactgagtggtggtggtgtgattgtggtatactcctttaattccagcattcaagaggcaatggcaggtagatctccgagtttgaggccagcctggtctgcagagtgagttccagagcagccaagcttacactaagaaatcctgtctcgagaaatcaaaagtgaggggtgggtggtgggtgatagggggttgattgtcttattctatagtcctggccgacccagaactctacatggaccaggttggctttgaacttggagtgatgctctgcctctgcttccctagtgctacaataggaagtatgtgcagttatagtaggtctcactatcctttgtgtggatcccagtggtcctccccagatggtcaccctgaggatcaggcctctcttagggttactattgctgtgatgaaacaccatatacaaaagcacattgtggaagacagggtttatttcattcatagttccctatcactcacagttcatcatcaaaagcaatgagtgcatgaacctggaggcaggaagtgatttagcgactgtggaggggtgctgcttactagcttgtcttctacagttttctcagcctgatttacagaaaccaggacatccagccctggggcaaccccatgcatgatgagctgggtcctctcacatcaatcactaattaggaaaatgccctatgggcttgcctacagcctgatcctatgaaggcctttttttttcagttggggcttctctgatgactcaccttgtgtcactgacataaaactaggcagcacaaggcctttatatacagacctttagaggacattctacccatgccattctttgtactttt

SEQ ID NO: 23899 - DNA, 1202 bp, Mus musculus
tatttgatgccttgttccaatttttcttccctacagcctacttcctatgagtgggaactatctgcagacagatagcttagctagtgaaacgttgaatccaccaagggcaggtattcgttgctggtgtaattctctggcaacttggaaagtgagccttgacttccttgttccccatccagattgtttcctttagaggcagagaaacacaaaaattacatttagtttctgggtctgtagataacattcccttttggaaagaggttaggggtcaacaagtagggcagtctattcagatagagtcccatacattctcagtatgtgatggtgcatcagctgtggtgaggccttgtctactgtattgtcaggcaggtcagaaagatactggcagtctcagtacattctgcctgactaccttcctcactgccttcttgcctatcccttacctttcctggctctcttggtgtctccaaacaggtatatgcccatgcaggcaccacactgcaggggaagatgtatattacctgtggtcgcagaggagaggactacctgaaagagacacactgctatgacccaggaagcaacacgtggcatactctggctgacgggcctgtgcgacgggcctggcatggcatggctgccctcctcgacaagctgtttgtgattggaggcagcaacaatgatgctggctacagaagggatgtgcaccaggtgagctgggcccagactgcccactttagaatcgagcagaagtccaagaagttcccttgtaccctctggttccatgcatgcatagtttaaccactatgcatatccttgcacattccatatgatgcatacatataccctccatagaagtttcccttgtgcctttagttgttatgtttgtatcaaaaagtcaacttaccaagcccacattgtagaccctaacgaagcatggagaagaatgagaagcactcatatcctctacttgtattcttggttgtcagtctgtcggtgacttacttatagctgttcgtagtcaaagagcatcccaagccaaatgtggtgtccattcctgtaactctagcactcacagtctggggctagagggttgcaagtttgagaccagcctgggctatgcagtgaaatgagattgaacaaaatatgagctagctagcgctctcttctcttctcttctcttctcttctcttctcttctcttct

SEQ ID NO: 23900 - DNA, 1653 bp, Mus musculus
atggcctccgctccagcctttcaaagggagagaagcaggagtggatctagagatgatgaggggaggcatctggactcttaggagctaaaggatgggaaggctagaccaccaaggtgagcatcctccagtgggcctgctatacacctgaccatgggcagaagtgacttggggtgggctggcaacctgtcccagaagctgcctggattgaccctggtcttggctttgcaggtggcttgctacagttgtacatctcgtcagtggtcatcggtctgcccactcccagctgggcatggtgagcctggcattgctgtgctagacagcaggatatatgtgctgggtggccgctctcacaaccgaggcagccgtacaggctacgtgcacatctacgacatggagaaagactgctgggaagagggaccccagctgaacaattccatctcaggcctggcagcctgtgtgctcaccctgcctcgatccctgctccatgagcaaccccgagggacccccaaccgtagccaggcagatgcagactttgcttctgaggtgatgagtgtgtctgactgggaagagtttgacaactctagcgaggactagggctctccccagtgtttgggtgttcaggaagggtaatgggcagtgaaggccgtagagcctgggttagaacaccaggctctaggggaggggcccctccttaagccatcctggttcaccagctgcccctttcactctgtttcttcaaccagccagctgccagcatttgtaaactctgtggctgtgaattacattacaaagaaaagtgctggggggaaggctgctatcatcagagggaatgacccatcctctataaactctgaatgagtgggatctatttggccgcttcttctccctagtctggtccctgatgggttaagtaaggtccttctttcaagagatcctggggagagcactcctagccatagccaaagtttgtggctccctttctgtgaaccgtggtcagtctggtgagcagcgccagctgcctgcagccagggccttgagcactggggagctctcaaggtatactcttagagtaactatatacctgtaactggacctggagatgaagagataccctcattgctctgtgtctgacccaatattgttgaaaaatgaaataaagcattatgcaaaaggtgttacatctaatgtggctacagtctgagtttcttttctctctagttactgcctcagtggcatctagggtggtacaggccagccttcctgggggatggacttggcatgggaattgagtctctgcactaaaaccagggggtcactaccctacttccaacatatgataagctccacaagcagaaagaatgttggtcacacagaaaccaggacctgagctactgaggtggcaagtagttgcctgtctctcagtcagaacatctagaatgtctgccctgaggctcaccagctcctgctgcctcatatccactctagctcctgggcagcctgactctagctgtggtgctgacctagtcccatcctccttggggagctcaaaattgttcgcctcactgcatgtctaaggcagaaagctccgaggattggggtgcaactcagcactagagaacttgcttagaatatccatttatgagaatggaaaga

SEQ ID NO: 23901 - DNA, 2773 bp, Mus musculus
cccagagtggaagcaccccagctacagaagcaccgccagggggtgggcgcctcccccgtgcttccctcaacactgtggtttaggtggctcagcttgtggccccccgtgggctaggagtgtatgtttcttgtccagaagacacctatctcagtgggggacttgaaggggtcctgtcatagcctggaccctactccactgccacatccccaccagctgcgggtgtgtacatagaaactgaaatcaggcactcagagaggagcaagtgcctgtaccatctttacctgggggctgttagtctcttctttaaatggtggaatgacacaggtgttgaaagcacacgtttccaagaagcagaggcagtgggcttcacttataccaagtacatctttggatgggcttgcttactgcattctcacccttaggagccagtcatcagccagtgtagacacagtagagctagcgctagtggctgcttagaggcagcagagcatctgaactgcttctggggaaagcattcacagctgctgtactggctctctgggggcttcctgtccggggccagctgcaaatttcaaggtgccgatcgatccctgggaggaaattgaacttgccacaccatttctagctttgctttgaggccagcactgtggcaggaggccctgctcattcctagcactcttccatggtatacctctgcatggctccccaggagtagactctagacccttgtggagggttggggcatgctggcttttctctgccacactctggatccctgtgctctgcttgctggtgaatgaccactgggtctagccatgcccgttcatcctatctgtgccataaagggttgtttgggaagagaatggttcaagtggacatcctgagttgtcatctgagtccacttcaccccgtgaacactgctggagcccagtgtctgccagccacatacatgcctcccagtccctccacagcaaccgggtacctggggatttttcccaaaggactccattgccagctccagctccatgcagtggtcttgtctcctgacacaggcctttagcatttctaaggtttggagattaagcaaggttctgtgcaatttttagcacattcgtgtcttttttatgttggatgtctgggtctttatatctgtgtgtgtgtcctaatgtggccaaatgtttgcaggtgataatggttcacaggagctcaggacaggggacaataccccacatgagccatttgcccatgggccactcttgcacctttgagcttcttctaggctgtggtcagtgggcctgtgactcctgtgcaggtgagaacaggagtggaggtgactggtgtctgttctgttgtgcatgatcagacccacacagctctaggtgcagccttacactacttggaacctatgtttccccttcccatacggagcatcttcagaccaggtccccagggctgacaggagtatatgattgcttacggatagtctgccccatgtctgagcccacagaccatctgctgcagacatccctctgcagagggcccttgccccctctacccattgctaaggacatcaggaagttcgtcatgcctccagcaagtcctaagtgctgggcgctgggcagccatgctccagagcaacaattgggaattgtgttggtgccaggccacccaaaagagccctaaggaccacacagcagtgcctcaggagactgcacagactggaacttacgtggggaccaaatggctgttggggttgagattaggaggcccagtggagagggtgacctaaagtggactggtgctacagaggtaggcttgtcaggcctgtggggtccgtcccccatgccttaggggtgcatggaaggcctctgttgggggctgtttagactattgctattccagttccaagcactggagtctgccagatctcactggtgaataatcccaaatccaagatttgatgaggtttgtgtgttctttacccatcccgcaaggccccagagggacaggctcctaggaggcccctttcccaggactgccttgccactcttctgaggccaggtgccctctgacctgccttgaagtggaatttgatactgtacattgtctcaatgcctgtttttacatattcctttcattaaaggttttagtttgggtgtatttttttggtcaggttggcattgatcctttcttaagatgctgtgagaaccatttcatccaatgccaaataaacttgtgttatggaaaaagcatggtcagttcttgctgtggccagcccctcgacagggctctcctaagttttcagcccttacaggcatccagttggcttctgacaccccttggttgaggaccagatggctgagcttggagcctctggagggtgcatggcaaggggccacactcctctgaagttacactacagtcaatgccagggctggtatatccccgttactagtgtccagtgcagggagggcgctggacttcatctctgaccatccaggtggctgtaagcagctccttccagcaggagctgcagcttggagggtagcgattggcaacttacacccaggactgggctgttcaatgccttttcctacagggctggaaaggcttgagtcctctgagaagatttcaatctataaaaaattggatgatcttgtctttccagaagtcctaagatgctaaagacttgcatagcctattgccttgggctgaggcctctcctgaaaagagggggttacacccacccactatggcactcagcctgctgggg

SEQ ID NO: 23902 - DNA, 1199 bp, Mus musculus
ttcagggacgccagcacctccttccagctttcacaaggcatgcaggaatgtagtatgcagacgtatatgcagccaaaacacctgtgtttgtgaagtaaaataaaatttaaatttaaaaaagcaaagtcatgggctgaagagatgttggagtggttaagagcacttgttattcttgcagaggaccaaagttcaatttccagcatccatacagtggctcacagccatccataactcgagctccagggatccagtgacctcttctggcttccagggcactgcatgcaaatggtccacagccatataccacacacaaaataaatattaaaaaaaaaaaaaggcagaattaagaacggtggtgtaagttctacactctagctgggagtgcatcctccttttgatccattccctagacatgtgagggcatatgcgagcctttatgagggaatcagacccagggcctccagaacagacagtgctcttaaccagtaagtcatctctccagcaacccccacctcctttttttttaaaggaaaactttattacatttaaactttttgtatgttgggagtgtattatgtgtttggtgcatatgtggggggtcagggaatgacttgcaagagtcaattctctccttttgctatgtgggttccagggatcaaactcagtcatcagacttgccagcaggccaccttacccacccaaccaccccactgctcctcatagtctttgtcaaaagatgaaaccttaagtccagttcctaatcttggataaaattctctataaaatgtcattgtggccttaggagatatctcagtcagtaaagtgttttctatgcaagcatgagggcctgggttcaatacctagcacccatggtacatatttactgtcttgggtgtttggggaggcagaaacaggcagccctggggcttgctggctaaccttaccctaaacagccatctcaggtcaatgagaaaccgtgtctccaaaaacaaagtgggcagcgcctgagaagaacccaataatccaaacaacagcagcagacaacctgtatggaaagtgaggcaggctagggcttaagctcgggagggtgcttgccctccgtgcacaaggcctgggccaccagtgtgctgctgtgtgtctgggccacatggtgagagcctgtctccaaaggaaaggggcatgaggggagagtaaaggaa

SEQ ID NO: 23903 - DNA, 1196 bp, Mus musculus
ctcttgcgccgcccgcccgcgggcatggcgactgcaggcagcgcggccagccgcagggaccccgggcgaccctgccctttctccatcgagcacatcctctccagcctgccggagcgcaggcccgcgacgcggccaccgcagcccgtcggtggtcggaaccccgccgagctagacgaacccgaggcgcccgtccccgctgctccttgcgcctgctgctgctgctgcaacccgcgcgctgcgacccgcggaaccccggagacatcgtccgggccgggtgagtgcgcgcggaggggcaagactaggcggggatctcgcggggcggcctgcggggcgagcctggctccccctaaccctaattggaaccgtaaccctacacctgaccccaccccgccccttaccgccccgcaggcttgcggctggcgtggccgctgaggttggcgcccgccacgccctctcccttgacggcgcctagagcaggctccccggcgctgactggcacgagcggccccggcccgcagaggcgcacgcggcgccaccgtaccatcttcagcgaggagcagctgcaggcgctcgaggcactcttcgtacagaaccagtatcccgacgtaggcacacgcgaacgcttggcggtccgcatccgcctgcgagaggagcgcgtggaggtgggtgttcagcccgcagcctggaggccaactccggcgccactcttatttttcaaagaccgaccttccagaaggggcttcaactcgtagccggctacactgaagggagaccccctatgatcactcgatgagggcgcggggccggttcttccagcacgttatttgggtgtccctggaactggaagaggtcaagagtcgttttctttgactttgtccggctccccagtttcccctgatgatgaaatgcacgtttgttcctgccccagatgtgagaaagttaagaaatgttcaaatctagtcaggcatagtggcatgtatctgtaatcccaacccctgggggatggaggctggatcatgagttcatcaaagtcagtctcctcacacagtaagaagccgcctagccacctaggttacaaggaggagaggtggggtgggaagaaggggagagaggagagagagagagagagagagagagagagagagagagcgcgcctgagcctgggctcaggctgggaaagtgtgtgagggaaggag

SEQ ID NO: 23904 - DNA, 1330 bp, Mus musculus
gccagtgtctttggaaacacacctttggatgtgatcaagaccaggatgcaggtatggatgggaggctgagagagtagggatatgagcactagccagaggctagtgtctaaggactctgccctgcggtgtcctgcagggcctggaggcacacaaataccggaacaccctggactgcggcttgaagatcctaaagaatgaggggccaaaggcgtgagtaggatagaggagagctattgcccccattccaggccctcttttcctaggtggtcttccttcccacattgctcacctcagactctctgctctacccagattctacaagggcaccgttccccggctgggccgagtctgcctggatgtggccatcgtattcatcatctacgatgaagtggtgaagctgctcaataaagtgtggaagacagactaaccctggaggatgcagtggggtatcccagctcctccattccagaccccccgccacctactctgatgattccagtgcagtagtgccaaaaggccccttcctttgtccctcaagttctgtggcctggtgtgtcccatagttctgtatatcccatgtggtctgtgtgtgtgtaacactaccattgtatctgtgtccagcctggccatggctgggtgtctctttggcctgtgaatatgtgctcacttatccatgtgcttgcttgtgagccacatgcctgtttcgtgttctctgtcatgtgaccctgtgccccacttcctggggtgcctatgtgccctggttcatggccttggagccatggtcaggtcacagtccggtgccttccaccccctatggcaagggcgccctgccttggcctaccacagctgcctccaggcttagacctggcttcaccgcattccaggggctataggcccccctgcttttcccgccattggccttaaatggccctcgggccctccctccgcccggaacagggtggcacctgccactctcaggaccaccttgccaaggagaataaaccggatcctgttgcactctcctgtccatccctttgtagatgggggtcattgatgactgagcctcctcagagacctgcctcccctccatcaggagacactgcagttggcagggcagtaagaaagctcagcagcccctagtgagagcgccttaggaggcccagcttgggaccaaaagggatctgtgctacttcctggccttacagggcaattggggtcctgccttcagctgaagggctttgtccacaaggcctcagtggactggcaggacagagggctggaactgaataatgttcccagggtgcctctgcccctccctgagaaggcccgt

SEQ ID NO: 23905 - DNA, 1853 bp, Mus musculus
ctaaaggtagggagagcttaaaaatctatcgccaggctccggtctccaaggtgcctcaagacgggcccactaatttggctaaggtaagaggtaatacaggggccgatcgaacctccctcgtgttccttgaaaggcttatggaagccttcaggcagatcactccctttgatcttacctaggaagcccagaaggcctcagtggccatggcctttcataaggcagtcagctcccgatatcagaaaaaaacttcagagattaaaaggtgtattatgagagagagagacagtcattctatctagtaaaagaggcagagaaagtgtgtgtgtgtgagagagagagaggcgggaggcagaaaaaagaaaaaacaggagggatcttagacaagagaaaaagttgactaaaatcttggccacagtgatagaaaaaaaaaaaaaaagacaggatttagacaggaaacctggacaactgaagaccgagcctcagctaaagaggctcagctctgtgtcagactgaagttacttatttgggatacacccttcgaggtgaaaagcagtggctaaaagaagccagaaaaagactgtaactcagattcccaccccaactacaccaaggcaagtaagagaattcttgggtactgctggcttctacagactctagataccgggttggcgaccttagctgcccagttgtaccccctaaccaaagaaggggaggtgtttgtgtggaccccagatcaccagaaagcctttaaagagattaaaaaggccctactgatggccagcctatgcctgacctaaccaagcctttcactctttatgtgaaagagagagcaggggtcaccagaagagtccttactcagactttgagactttgaaaaaggccagtgacttacctatccaagaagctacaccctgttgccagcgggtggttttcttgcctgaaagctattgctgccataatctgcttgtcaaggatgctgataagctcactctgggacagcaaataagagtgtagtggcatcccacactcttgaaagcattaccaacgctcctgtgacacatcagagctttttgttgtctaaatgagtgaccttcgcttcattccacctgctgtcccactgcgtgagactgcacctactcatcactgcgctgacattctggcagaagaaataatctgaaatatcagatcagccttggcctgagggtacgagctggtacgctgatgacagtagcctcgaggttaaaggtaagcagaaggcggggacagcagtatggtggtgaacagaaaacaagtgatctaggccagcagccttcctgagggacatcggcccagaaagctaaacttgtgactttaagacaagctctataaataaaaaaagaaaagtctacactgacaacaggtatgcttttgccactgtacggggcaatatacaaagagagctgttgacatctacagaaaaagacctaagatgctgtggctaaagaaaatcagatggcagatctaactgccaaacaggtggcccaaggagcaatgatcctggcagtcaaggagcctaaagattattataacatccgagagaccagctttagatacacccctgagcactatcaagttatggacagtatttgacttggcctgggggccaagaaattcaaaggcgtggttaggtcctttgactactatgttacaggactttctgacttgacaaaaaaaaaaaagagtcaaaagctgcaaggcctgtgctatgacgaggtaaaatttctaaaaaaaaaccttcccaaggtaatagacctgcctttgttgcccaggtaaatcaaagactggccaagatattagagattggttaaaagtta

SEQ ID NO: 23906 - DNA, 1050 bp, Mus musculus
cccttaccaaattgacagcggagactggcgctatgattagatagctctcctaccctttgtgctcttcagggatagaaacacccctggacagtttagactgacccccctataaattactctacagggggccccctccactggtaaaaatagcctctgtacatagtgctgacatgctgctttcccagcctttgttctctaggctcaaggtgctccagtgagtgagacagcgagcaaaaaagcagctccagaaggcctactcaagagaagaagacctgctacattagacgtctccacacagaaaaccttaagactccggtggaaaggcccttatcttgtactcttgatgaccctactttctacctttatgggaccccttttgattttgcttctgcttttaattataggtccatgtatgttaaataggcaagtcacctttattaaaacaaaaattagtacagtgtggcttttagttttaaaacaacagtaccatgccctaaagtaaaggatcaagtatgtcagaaaaaaatagtgtctagttctaagattagaactactaacaagtagaaggggggaatgaaagtataacaacgtaaaaacagaattctaggcctttaggcccaggcttgggaatgtggcctttgtaaaggtatgctaatcataaagcaaattgcgacattcctccatccacccgcttcctgggttcaaagagtgctcatttaaagaaagtcacccagaacctgcaatgcaaatgtgctattgttaggggctcttagaagctgtcttgagagttaacaattaccaggtattctttgtgactcttgtaactttacacttccttgtgactcttaactggtatctttggtatcttccaacaacgccctccccacttccttaagttgtggttccttcctttaaatacccccttacccagctactcggggcgccatggtcctctacccctgcgtggtgtatgactatggtcccgagagcgctcttgaataaaaatcctcttgcaatttgcagcaagacctgtttcttgtgggtgatttt

SEQ ID NO: 23907 - DNA, 1146 bp, Mus musculus
tagaggctgtacatggtccaccaagaccaagatcctctcaagatcctcgttcttactgaagctggagtttcagagccaggcatgatggcacatgctataatctcagcacttggaaggctgaagcaggaggattgctaggagtacaataccagcctgggctaccaagtgagatcttgtctcaacacacacacacacacacacacacacacacacacacacacacacacacacacacacacacacacacacgttctgttaggtatctttgtcacagcctgcaaacataatacatctcatttcactaccagagaaactgaggctagaaagacagaccccgcccaggccatgtctttgggagacacatatggggtctgaagaggagtaactgggacatcaggaaggacagaggtgttcacagtcagagctgggaccaggcaaggcctcagctgaatctggcactgctcctgaacagcgggacaagagctaattaattaacataggccattgctaacagggcgctaatgaagacaaagaggcagctgtgagtgcttagtatggacctgtgagcagatgggacagccgaggggtcccctgtcactgcagcttcactggtagtagcaccaagggccaaatgcctgtgtctcctgtttaaatgttccttgctgtgggtggacactctcccccagcttgctgcagtcacctcacagcctgtctcaccacagaaatctcctggtcctgccacttggatctgcaggtgcctctccttttgtagacgtcccctccagcatctctctagcatccctagccaaccaccagagggagcaacccagcaggatgagccccaccctcccctccctgtgtgcgaggggaggggttagcatctcgagagatgtaaactgcatcttactgtactgtgaacgtgcatgttagtttgggtgaggcatgatgtgtactgatgggattctttgatatcttgtgcctatttttctctgtatacccccagaacagtcctttgtgaaatgaattgctgatactttcccattttatcatttatctgttgattttgtttctcctgtgcagctacattttatctttatgaggttgaatatgtttctctctcactttatggcttcaagttttgtataa

SEQ ID NO: 23908 - DNA, 2210 bp, Mus musculus
aggagtgtagatgggtttccccatgtaggacccgtcatgacctggatttcccagctcatcctggagacccctaagttgtctgtagggacagtacaagatagctgagcctagttccccgtttggaaaagtctggccctgggtgcagcatgcatgtgggaaagagacattggcatgctgagccagcacagacttcactcagagtactcctagagctagcttcacttgggtgtgtgaactcctacctttccaggcatgctgtcccttccctggtcttgatacgtgctcagcatgctgagacagggggatattgcctcaccacaacacgtatattgagcatgcagccccagattagcagggagcctccatgcttaaaagtggggaagggcaggtgggagccaggcacctgagcatgggcttcattgttttggtctcaggtgagccctgggagctcttatttaggctgtgtggctacaaaggttctagggcatccctcatgggaacagtagcagctctggccaggccggggaataggagtgtcacccgattttcctgagagactagtgaaagagctgtgtgtccgctgctgggcttcccaatttcaactgcagggagggcccagcagctcaggctcgctgctctttggctgatccaactgggagagatcaatgaacccatgagggggacagaagttctggaaatgtctgtcctgtgacagcataatcctaaggacaaggacacagggctccagtccacacctacatgtgtcctactgcccactgtactgtgttcactgtatgtgcatgtgtgtatatgtgcttgttttgatgcagggatcaccctcagctgaagacccccccaagtaagcttaacgggcagtccccaggcatggcccgtctggggcctgctgccagccccatggggcccaacgccagccctgcccggcacacgctggttaagaaggtgtccggcgtgggtgggactacgtatgaaatctcggtgtgagaactgaccaccactcatctgctgtgatgccacggggaccaggaccccccgcagtagctccccaaccctatcaagttctctgccccagggaggaggctccccaagcctgctgtggacacatcaacaggaaagacagccttgcctccacaagcttgagctccggcctctgcctgttcatctacttacctagtactcacagggcagatgggtccaaggctgtgggctgtgatgggcacctggactgcctccttcatcagccaagctcagccctgcatcctattgccctcattccctaaggccagtccccagcagtcccatgggcccacccactcctgtctggatgggttgctcagccctgttctccagctgctcctaactcacggcctttcactgacaaagctggtcgcttgttgcttggcaaggcctgtgctttgcagggagcataaccctggcctgctccgggttgggatgcatagatgaacgtacggacagatacttgagcggtagcaggggtcccagctccctctgttcgtgtcttgcctggctggtgggttcgtgtccctgtgtctgtatgctgtgctgccgtgccacgtctgatgtgttagtgctcggctgccactgttctttcatcaaagccttaacttctgctttatgctcttgtgggaggtgatggggggtggggtcggccagagcagagagggggccagatgctgcccgggagaccagtggggccgagagccccctccctctctctcgggccttccctgccaaactggagaatcctcaccccaaagcatcccgggttcccagcactggcttggccagcacagctggaaagcacatcagggcgggtccattcgtcccctggcgtcaggggcctgagtaagcacatggcagcgtccgcttgcatcgtgtctgttctatgtttttatatttacatctatatatctataattttattaaaaaaaggaaaaatcattttgagcctttccttgggcaaggctgtggctgtgggtacaggggtgtctcaggaaaggggttggccagctggtgcagggtggcatgttcctcttggacagctctgctggcattgccaagtcaggcctagttggtaacgaatggacttctgctggtgagttgcaaaggtgtcttactcccagtctgtgtcatgccggacggaagggtgtttggtgaaaggctaggacctc

SEQ ID NO: 23909 - DNA, 1193 bp, Mus musculus
agacctgtgtctggagaaacttgccctggccttttactacaaaaccccagtgttggtcaccttaggaagggtctgtgcagcctgttagtgattgtgggtagaagcaggctccacaccagcttccctttggagataaattctgggatcaccatgccaagtcttctgtcccaacttccatccatagtaggcccctgcttccatggctgctgtagtcacagcctcagagttcttggtgctatggggtcaggtaagaggtgaggtgtgtacagtagtaagaataccctgtcctccacaggtcccaggtcctgactcccttactctggcagatgacagcacccacagtctagactttgtgtctgagcccagcctggatctcccagaccacgggccgggtggtctgcgtcctccctacccgccctccccacccctcaacaccactgatgccttctcaggtgccttgcgctccctgagtctcaaggctgccagtcggaggggtggggaccacatgaccttacagccactgcgctctgaaggtgggccccctacacctcaccgtagtctctttgctcctcatgcactgcccaatcgaaatggcagcctgtcatatgacagcctacttaaccctggctcacccagtggccacgcatgccccacacacccctctgttggtatagccagctaccattcaccctacctgcaccctgggccatcagatccaccgcggcccccaccccgcagcttcagccctgtgctgggtccccggcctagggaaccctctcctgtgcgctatgacaacctgtctcggaccatcatggcctctatccaggagcgcaaggacagggaagagcgtgaacggctgctgcgctcccagactgactcactctttggcgactctggtgtctatgatacacccagctcctacagcctgcaacaggccagtgtgttaacggaaggcccccgtggctctgtcctgcgttacggctccagggatgacctcgtggccgggcctggctttggtggtgcccgcaatcctgccctgcagacgtcattgtcctcgctgtccagctccatgagtcgggcacctcggacatcttcctcctccctgcaggctgaccaggccaacaacaatgccccaggaccccggcctggcagtggttcacataggtcacctgcccgtcagggcctgccttccc

SEQ ID NO: 23910 - DNA, 1232 bp, Mus musculus
gctggtactcttgtgaaagtgagccttgcccttggacttggaatataatgtgtatctggtagcccttccaacatgagtagagcctatagtaagaagagctttgacccttgattgtctgattgtgatagacagatagctgagcagagttgatggcctcaggagggactcaactgcagtcattaaatagtcagaaattgtcactggggttgtgcatggttaatcccagcgcttaggaagcagaggaagatggacatcttgagttccaggacagccagggatatgaagcaggatcccatctagaaaaaaatgccactgaggaccatgaattgactgacgcttcagaattttaggatattgccagtctactttgagaactttcagacattagtcccttctctttttacagatgcacaaaagttcaaaacaaagtttgaagaatgcaggaaagaaattgaagagagagaaaagaaaggtgatgtggtgcccgggagtgatgagggtgggtgggttgtggggcttctttgcagattcactctgcacctggctgcagctccagtctggtgctttttccatctgccaaagaaacagtccagaatgctgtggcttcctctgcctatcagaggcagtgcagctgcctggggacacagcctgatgccttccttgtaggctttggcctcacatcggcctcttagcatttgtggtcagtttcaggtactgagctgagttacagctctttggaactcaacagcagtgaaagggcttttaagatatagtcctcgtgccaggtgtggtggcgcacacctttaatcccagcactcgggaggcagaggcaggtggatttctgagtttgaggccagcctggtctacagagtgagttccaggacagccagggctgcacagagaaaccctgtctcgaaaaatgaaacaaacaaacaaacaaaaagatagatttctcattttctcaacaaattgttttctgttcttctgggacagatggggcctgggttagtaagtgaccacacatcaccagcagcttgctggacccatctggggagagtggtgggtgatgcttggggaacaggtcgggcctctgcactaggtaagtgccaagagcagtgtagtctcacagccggacttctctgttgtcttactgcaattgcctgtttttgcaggaccaggcaaaaatgataatgccgaaaaggtggccgagaagctggaagccctttcagtga

SEQ ID NO: 23911 - DNA, 1229 bp, Mus musculus
acctgctttgtgtgttttgcattttcttctgaaaaagttataacagaaaggaatatttcaggctattttggcttaaaataaaacaaaattttagcaccagaaatactcttccgagattgcagtgaagatactgagtgttagtccgattgatcctttttcttatgaagtcttaatgtcctaacagccgtcttctggatactgaagcttccaccttcgataaacttagcaacaattttttacagagatttttgcacaaccaagcccatctgttcatcaatttttaaagcttttatgatgttttaaaatttggaaagaaacttttacagtaagaatgaaagatgcatttcaacagatgaatatgcataaatagggaactggccttcaatgtagcccatcactgaccaagagctgcctggcacattgtacacgataagtagttatggtgttttttgatctcaaggatagctgctctgtgcagccaggcctgattgcaggtttttgtctacctatgctcattggatagcccctgtaaatgggtattgagtagaggggtattcagagccctattacctgttcagaggggctacactctacatcctcagtgtctctaaccatgtacctgaagatacatgggtgacatgtgctgttagaaagataagatggcaactgtgggcctcccaacagcatcttcctcctccttaatcatgtgtgtgacagcagttaatgtttatgttaatcttggcaaaaagaacccttaattcaagttggtagacttggacacttgattcttttctgcctcccattcagttgtgttcagtcttttgactaaccattgcccttaaaacatacttaacattgaaaaagcatatggtaatggtggtatctctgcagcctcaccgacccaggcactgtcaacaggtgctgccacacattcctggtctccagtgccctccctgtctcttacaggtgggtcttatatgtacagtcatgctgcaagggtggggagcctgtgctgatgtgcttctgtgtgttggccaaggctgtagggtgtaccctgatggtctgaacacataaaactgtccaaaagggaatggctggtttctttcttctgatgggagtgctggatctgatttgtggatcttcaactggccaaggttgtctatagtcaattgtgtttttaagtgccttagtggacacacttaactccatatgaactcagcatagatttg

SEQ ID NO: 23912 - DNA, 1193 bp, Mus musculus
ttaaagagaaggaaggaagtgttactaagcagtccagcaaggacactaagcctgtctgaccaggctagtctctctcgtgaggtcatctgacacggtgactgtttccctgggttgtccctgggctttcgtccagctggagatccctgggagaattcagttccttgggtgccttgttttgtttgtttgtttgtttgttttgttttgtttttaaagatttatttgtttgtttgtttgtttattatatgtaagtacactgtagctgtcttcagatacttcagaagagggcatcagattctgttacggatggttgtgagccaccatgtggttgctgggatttgaactcaggaccttcggaagagcggtcggcactcttaaccactgagccatctcaccagctcccgggtgccttgtttttaaccactgagagagtcagaatgggggcacaagtgtttaattaacgtgtcctcatttctcccagacactgcagcatcgatgatccagctaggcttctagaagataccttttttaagctaaggtctcctgtattccaggatgaccttaaactgaaaaatggctgaagataaccttgaccttctgatcttcctgtcttatctcccaagtggtagagttctgtatatagactaccatgcgagtacagaacgactctgttagtttagttctcactgctgcagtacagcaaaacaggtttcaattttctttgtttttcttttcctcctcctcctcctcctcctcctcctcctcttcctcttcctcctcccttttcctcttctaagatattgaacatacataagatgtggtgccgactctggcaagcccccatcttccactggctgcatcatccagaagatggcagtatcaggagcacgtgctttcagctcttgtaatgagtcgcttcttcaaaagcccacaagcaagcaagccctccttaggccttatcaaagccagcatcctcatttacctaagggcctccctctagacctacattcttttaatttattatttatttttatgtgtatgagtgttttgcctgcatgtatgtatgtgtgccacatgcatgtagtgctctcaaatgctagatgagggcgttactgtacatgttacatacagtctgagctgtcatgtgagttctgggtctcaaacccaggtcctctggaagaccacccagtgccttt

SEQ ID NO: 23913 - DNA, 1151 bp, Mus musculus
ctcagggcctgtggctccagattgtcatacactggcacattaaaggtagtgagctcaccatgcaaaccactacaatacccctggaaaacacctgtgcatcaaaggctgcattgaggccagagatgcagtagatcacagtgcgtgcctggcacgcaaaacccctcacggtgaatcctctgcacccaagaacaaaaagggagatttaaaaaaaaaaaaaaagggggactggtgagatggctcagtgggtaagagcacccgactgctcttctgaaggtccagagttcaaatcccagcaaccacatggtggctcacaaccatccgtaacaagatctgatgccctcttctggtgtgtctgaagacagctacagtgtatttacatataataaataaataaatcttttaaaaaaaaaaaaaaaaaaaaaaaaaaaaaaaaaaaaaaaaaaaaaaaaaaaatcaaagcaggtgtcatcctgatggcctcactaactggaagaggagattttttacaaagtttcagtgtgggatccctaggcactgccatcactcagcaagaagtcaggaaactgaacatatccagataccattcggctgtcaccaatggcagcaacgactcagacggtactgtcaccagcaactcataccacatttcatcttaagaatgagtcacaaacttttcaggtatgatggcgcatgcctttaatcccagaatccaggaggcagaggcagatggatctgagttctgtgccagcctggtctacacagtgagttccaggacagccagggctacatagaaatactttgaaaaaaaaagtcataatctcttttatattataaaagaaattaaagatctaaatatttggatataagaaattcactgagttattcttttcagctaccacactgctcttacttggcgcagaacagcctttgtactcatctctgactaaacaggcatggggccacgctgtccccgatgtctctgggataaacagtctctccagttcacaccattgaggcatgtctgccaggcacccagattctgaggaagtgccaacccaagcttaagagtcaccctagcccccatctctttcaagaggctcctcaaggcctcagtaggggcccatttcctagactagaaacaaaggtcagct

SEQ ID NO: 23914 - DNA, 1166 bp, Mus musculus
cattgatacctactgctcagagaaggagtgggccatgaacgtgggtgacgcaaaaggtacatggcccagcagcatgcaagtgacggggaaactgaagtgggtatggcagcgcttataggagagcctgttagagggagagcgaatcatgggtcatgcttctgtctagcccctgtggagaccgaatcatttacactggaaaaggccaggtaggtgggtgagaggggtccctgtgtgtgaaagtccagtgaactctccaagggtgtatgcagcagggtcctctgggctatcagaaggcaaagggcctttctcagcaggtcaggagcatgagaggaatgtgtgttgctggtccggagaggagtaaggccagagttggggatgggtttccctccctctacctgtacttacgccctactcaccaccctcaggccaaatcatggatgcagtgattcgggagtacaggccctcgctggtgctggagctaggagcttattgtggctactcagccgtgcgaatggcccgcctgctgccacctggagccaggcttctcaccatggagattaaccctgactacgctgccatcacccagcaaatgctggacttcgcaggcctacaggacaaagtagggcccagtgtggcagctgaggggtgaagagggggagagctgggcaggcagtgggggagggtgatgagatccttggccagccactaagcacctgccgtatctaacactggagtcaaggaagcaaccccagcaagttaggcacatggtcttactggcctatcctgtagagcaagcaacagccaggactgccagggaaactcaatgcagattcctctccaaagccccaaagagatgtagacacaggtgggggggtccaggcaagctcctgcatgtcacagtgggcacagttctgacagagcattgttccaggtttccatcctcatcggggcatcccaggaccttatcccccagctgaagaagaagtacgatgtggacacattagacatggtctttcttgaccactggaaagaccgctaccttccagacacacttctcctggaggtgagctgaactactgctgctcagcacgatggcctctgtgcggttactgctggggtcactgagccttgacctcttgaacagcccaagggcataggtgggccca

SEQ ID NO: 23915 - DNA, 1250 bp, Mus musculus
cttctaagtttttagggttaaaggataacttgatttttttaattattattatttttaaagatttatttatgtatgtgagtacactgtagctctagagatggttgtgagccttcatgtggttgttgggaattgaatttttagggtctctgctagctctggttggcccctcacactccagtcaactctgatcgctcgctcagtccctgcttgctccggcccaaagatttatttattattatacataagtacactgtagctgatttcagacacaccagaagagggtgtcagatctaattacgggtgattgtgagccaccatgtggttcctgggatttgaactcaggacctttggaagagcagtcagtgctcttaccagctgagccatctctccagcctggataacttgatttttattactgtcaattctgaggacacggctttacaaatatataacaaaatatatattacatattatatattacaaatatataacaaaagggcagaagtatgtttagggttatttttttttttttttaagatttatttatttacctggttgatcctgccagtagcatatgcttgtctcaaagattaagccatgcatgtctaagtacgcacggccggtacagtgaaactgcgaatggctcattaaatcagttatggttcctttggtcgctcgctcctctccatggagtactactcagctattaaaaagaatgaatttatgaaattcctagccaaatggatggacctggagagcatcatcctgagtgaggtaacacaatcacaaaggaactcacacaatatgtactcactgataagtggatactagcccaaaacctaggatacccacgatataagatacaatttcctaaacacatgaaactcaagaaaaatgaagactgaagtgtggacactatgcccctccttagaagtgggaacaaaacacccatggaaggagttacagaaacaaagtatggagctgagatgaaaggatggaccatgtagagactgccatatccagggatccaccccataatcagcttccaaatgctgacaccattgcatacactagcaagattttactgaaaggacccagatgtagctgtctcttgtgagactatgccggggcctagcaaacacagaagtggatgctcacagtcagctaatggatggatcacagggctcccaatggaggagctagagaaagtacccaaggagctaaagggatcttcaaccctataggtggaa

SEQ ID NO: 23916 - DNA, 1196 bp, Mus musculus
tcgaggccgcggggctcgtggaggtaaagctgaagacaaggagtggatccccgttaccaagctgggccgccttgttaaggacatgaagatcaagtccttggaggagatctacctgttctccctgcctattaaggagtctgagatcattgacttcttcctgggtgcgtccctaaaggatgaggttctgaaaatcatgccagtgcagaagcagactaggactggccagcggaccaggttcaaggctttcgtcgctattggggactacaatggtcacattggtcttggtgttaagtgctccaaggaggttgccactgccatccgaggggccatcatcttggccaagctttccatcgtccctgtgcggagaggctactgggggaacaagattggcaagcccccacactgttccatgcaaggtgacaggccgctgtggctctgtgctggtgcgtctcatccctgtccccagaggcactggcattgtctctgctcctgtgcccaagaagctcctgatgatggctggtatagatgactgctacacttcagccagaggctgcactgccaccctgggcaactttgctaaggccacgtttgatgccatctccaagacttacagctacctgacccccgacctctggaaagagactatgttcaccaagtctccttatcaggaattcactgatcatcttgtgaaaacccacaccagagtctctgttcagaggacccaggctccagctgtggctaccacataagggtttttatacaagaaaaataaaagaattaagtctgctttaaaaaaaaaaaaaaaggaccatgtggcagtgagtagttagttcactctggtctcccggtgggtcacacgtgctctgcacctgcccaaaagctatagattcacgaatgaaacacacacatacacacacacacacaccctttatattttgatatgccttgactagctcaatggcagggcacttccaaacctccctgcagctcacacacattcccctccagtattcttgaaagtaatacttgttaaatctatactttatctctgctgctccagacttaatcaggggagtggcccctgggacactgaaaatgttttttgttttttgttcttgttgttgtttttgtttgtttgtttgtttgttttgttttttgttttttgagtaacacaattagcattagaacacaagcca

SEQ ID NO: 23917 - DNA, 1577 bp, Mus musculus
tcgggacagcaagcttctatgaccaacatgttcctgtcactgggcatgggagtcaggggagctgccttagaagcagaagggaacttagtccaaggtgttaggcattagttataagttactcatcctgctgcagattgcattctgcacagcagctgtgtctggaatgcagccacccaagtgtgacatgtatttctagaatacatatgttagaccctaggctttcctggttcatttcttagaggctcgcacttagctgggcatagagcataactgtaatctcagtgattgggaagttgaagcaagaggatccaggagctcagagtcaggctttgctaaatgagaactatcttaaaagaagacaagaaaggaagaaaagaagagaaggaaggaagggagggagggaggaaggaaggaaggaaggaaggaaggaaggaaggaaaggaaggaaggaagaaaggaaggtaggttgatcggtcggtcggtccccttgaggggtctcaatagggcagagatcagctgtgctgtgagactgtgtaagctgggctgctggatcattgccagacactcttgactactgaacttattccgctctagtattctgggtggcctgagacaaagaccagggtgcttcccggcccaactgcaatctcttggcacctttaatgtcccttaggctgacacagtgttgtaagttttccaggcttggagtagatgtcagtagacttttaacatctccatgaaaccttcctacatcctttatcagatacagttcagctttcatcgtgctcatactccagtgtgacttacagacaggagaataggctggcagcctcagcaggatttgttttatccacaaatatttaggtatatgaaatttaaaacatagctttactctatcttcaaagccactacggttttggtgaaaggtaatgggataataagtttggaagaggaggcaagtttagcaaggacttgacaaaaggacaagcagaacctgcttttaattagccatagacagctacagcctaagcctggcctgggaaaagccaagaggcagtttggtgtagatcccagagttcgaggtcacctgaaactggattccaaggatgatttggcgggaatggcccctcccccttcttcataacccagtgtcttggaatagtaaaattgaaccttggtcagactgaaaaaaaaaaaaaaaaagatcccagagttctcagaaggcacctttggaaatgacagaatacctattacaatgtgtttagagcctcagcacctttcccacactatattgtgcctctgcaaccccaggaaaaaggcctcatggaaggtcccaagcctaggaccacactttattatcacactagataataaagtctgttgtagcctttggtaattggctgctatttgacctcagacagtagcagccaggcttgcttattgctcttgaagatcagagcttacacaagaaagaaggcctaaatatactgttaaacagcaggatttctaaggagtgttcccttctagtaaagatacagaaaactcataggtctgagctagaggtgaagctcagctct

SEQ ID NO: 23918 - DNA, 1196 bp, Mus musculus
agacgctctccctctcttccccacccagtgtcctcactcccaggctaggcgggtaactagctccacactctccaggtctgctgttgctgaggcttagcgggttttgcatggctgaaggcagagactgaacatagttgtgcatgcttataattgcggcactcgggaggtggagacaacaatctcagaattgaaggtcatacatagtgatcttgagaccagcctgggctacttgagaccctgtctaaaacatgtccaaagaacacaaaataaaactgctgaagtaagatgaccggtgtgtgctaaaacagaacagttgccaaggagtgtggtatagaagcagctgagcctgtgtgtaccatgtgctcccatgtgttcctctcttcagaagagtgttgaggaagagggtgatataggtgccatgcagcagtactaagagccctaggatccagtggtgaaacagtaagtgaccaagtctcatttgtacagcgatccctctgtgagagcgagcaggttcgggtccaggctgctcagaagcacaccttggtatgggccttgaggcaaaggccccctacggactggaacctccctctaccacaggagaaggacaagtgataagcaactgcaaccctacccttgacctagactttgactggctcttacttgacctggaacacagagcaaagcatttccagccctaattgcctgctgcccactggatctgggcatttcatcactgtaatactctgaaagacacctgtgtgcacatgctggaagccaagcactgaggcaggtgtctgtgagcactcaggtgggtccattctgtccatgccatctcccctgagaacatcaacaccagatgtggcagccgagagttgtgaaaatctcaagtacacagtggcagccccaacctgtgtggatccagggcacagtagttagaataaggttgctagactaccttattttgattatgaatgaccctccttggccatgagagatggactgcaatgtcttgtctagtgattatcgtggtatgcaagtgcggagctcatgcttgctcagcttccctggagacacggaagagcatgctcagtgggtaggcaacttgtcctctgcaccagcaccttttactggttttgcagactttgaaagaaagagagagagagagagagagagagagagagagagagagagaactg

SEQ ID NO: 23919 - DNA, 1660 bp, Mus musculus
gcggccatctcagctgaaaccatccagcagttgtggggtaccaaacacagttttacaagagagtagcttttcttcttacatatttaaaattatgagagattgtacagtttggtatagtgttacagttaataactagtaaaatattgttagagctgggcatggtggcatatgcctttagtcccagcattaagaagcagaggcaggttgatctctgggtttgaagccagcctggtccacaaagggtgttccaggacagccagggctctacacatcctctgaggatcttgagcccatttttctcactggctaaaacacatcaaccattgtgtggatttaagtcattttggttccttctgaagctactactggcatgtgtggggacacttgtttcagctttaggagggggcagttttagagactggtatagcattgactacagatctgaatgaggtgactcagtcacattgtgtcttcagcattaacttccagtttaactcacttaaaagacccctaaatgttggtcgtcttgaactgtgagcctctgggggctgtctaggaggctcgcctcacaattgctgaggtaccttccaggctacaaatatctgcgcctgctgcagataagatttggggtaagagttagcagctgtggctccagcttgtacccttgttactgttcctctgggtcttgtgtggcccccacatgtgttagcttatgctggcctgcatgatgtagccgtttcttcagttttcttttgccttggtggaggtgaaatacggggctcttctgcttgcatttaggagtgggattagttaagttagactgctcaggtcccttcgggtccattcaatcggccattacaacttatgtttctatgtggtggctattttctttttcttatagataacacctgttcatattttattttattttattttccttcacagaaattcttgcaactctgagaggtcattctggcttagtaaaaggtttgacttgggatcccgttggtaaatatattgcctctcaagctgatgatcgaagtttgaaggtatggaggacgctggactggcagctagagactagcatcaccaagccttttgatgaggtaacggaaacagtctagagcttggcctctacccctgctatacttcttgaacagtgagggaactagccgtggtgcaggccctgcggcatgcagtttaggggtctctagttttatgagttaggtgataaaatcttttctttccgatgaggtgttcatggtcaactttgaaatgaaaaatattttattatatttttatttttagtatttttaagtagcatatagtcttttagggttcattatagcattttgaaacatgatttattgtttttgctcttcctcctacctcatccctgaattccattccctctctcatatcctcctccgttggtaacctccttcccacttgccatgttgtatgctttgacgagtgctgcacttcctcaactgttctcttcctgtcttgtgatccctttctagtctcatgacctacacacactcacacccgcacaccctaagccaggagacaatgtgtacaacttttgagtgtagcttaccttggtgagtatagtaatttctagatctagcaattttcctggtaatttcaaaattttgat

SEQ ID NO: 23920 - DNA, 1948 bp, Mus musculus
gaagaggcgtctgttccctggaactgaaattatagttgttagtttccatgtgggtgctggaaaccaatcttgtgtgttctctaagacattaattgctcttaaccactgagccatttctccagaccccttctccctttttatgtgtatatctgtacgtgtgagtttgtgtatgtggacacacacaagcaagtgtgagcacaccatgccagaagaaagtggtggatctcctgggaactggagttagaggtggttgtgaactgcctgatgtgggtgctagaactgaactcaggtcctctggaagaatagcagagttctcttgactcttgctgagtcatctctccagctttcatttgtgtttggactaagagaaatttatactggtgtgtgtttgggacctatctgacacacaggagtgagcctgagtgacttatgtaactatttgcaggagccttgagtaatgtggaccagaggtcagtgcctagagaaagtgagctgggttctttctgagaccatctcatcctgctccgtagatctctgcttttgcaattgctgaacgaatacaaagctgttcccctgccagactttagcttcttcagtgtgtgaatttctgtcaggccttggtctccccagcttgtggttttggcagttgtatctcgattgagttgactatgccttgtatgttagtggagatcatcaaagctcctgggcttataaagatggttaaatttagtgcacagactggttctcagtgatttcattaatttcaacttttttccccttgtagctcacatgtttgaaacggcctctggttgtcatccatgaactgtttgacaagtccatcatggatatttcctggtaagatggattcttactacactgcattggctactccaacctgagacctcttggctactttacagccatgcagcctggtcactttcctctggcaaaccccaaggtgcagtttgcactctactcaggtagcaacatctctgccttgctcctgtgtgaattttacaccatctctgcctgttcctgtgagagtgtcatcacgagtagggtttgttacagggaaatgtctgcttggacaaactgggcattctgtaggtttatagcagaaaacagaaattgaaaactaagaaaatttggtaagattctctgcacgtacctagctctaaagggcaccaaaggctgcccctatctttaggtcacagaagggagctttaggtttctagcatccatcagagtattctttgagcctccccatgtggcaacttcaggtacattgtccacctaggctcctgacagctgtctctttcaggactctgaatgggttgggtatcctggtgtgctccatggacggctctgtggcgttccttgatttctctcaggatgaactcggagaccccctgagtgaggaggaaaaggtaggcttgtggcctatgtgctatgatactggctctgagaacctattcaattgggtcctcttcttgtggaagacatttcttaactattctaaatagtttgctttttatagattatgttaatcctttttgaaaaagaatagattaataataaatactcatgtcagaaataagtattggagcaaagaataaattgggcatctgtgcttgctgagagagcactggctataaggaagtttcacccctgggagagagttggagtcacttccatggggttcttatttatgtcatgtccttcatcctcttgtttcatgctagcatagcagcagttatgtgacagttaatactggtcactgttagccactgtggcaggtccttgcccacgtacaggttttgcacatatttatcatttaaacttcatataattactgggtgcagtggcatatacctttaatcccaaagaggctgaagagaatttagggtcagcttgggctacatagtaagactggtttaaaatgaataaa

SEQ ID NO: 23921 - DNA, 1181 bp, Mus musculus
aattggggtaggtttgagcaggaggaaagctagataagctgttccagaaagtgcgaagactttgccattattccagtgagcaatgggtgaacccacttaggaccaaggggactagactgaagatgaagggcaggaaggatgaggtcatgacttcaagacctagtgagggcttccactatagttcaccgtggaagtggcagagcccgtgttagtatcacttgagtggacatgctgtgttgaggttatggagacccagtatattgtctaaccctcaaaattgttcaaaaaacacaaaagggaaaatgtgaatacatttgcccttgaacttctcagactttcagaatcttaatgcatgaacattaaaaaacaaacaaacaaacaaacaaacaaaaaacaccccaaaacagtagactatattttggagttttcttgtatccgtagaaagaaggttgatacttctttagatgagctccaagttatgtaagtcctagaccatcaggtgctttgttgcttgtgtttgacgaatctcccatctttcccccagtatgaatgctacctctactcctgctgcatcgtcaccctctgtgttaacaaccccatccaagattgaacccatgaaagcatttgattcccggttcacagaacggtccaaagccacaccaggtgctccttccttgaccagtgtgattccaacagctgttgaaaggtaggtggtagctactgtatctcctcgggacttcaccatgcatcctgcctcctttaggagagcaaggctccaggggcttctgtgactgaaagaaacagtgcctgctgaaagtggagaggtggctggaaggtgctgtggggagggtgctgtggtctgaggatacaaagggaagaggcacaagagctgacattctagccacctgccaagaatactctccaactctggatctcagagtttgctgagaaatggagcaaatgtgtggttgggaaaatagaaggctctgctgttgttacactgagtctgctgagaggtgaccgaagacacagggcatttaagttaggtcttggtaggacacatggccctctaaactctgcagacttgatgcaacataactatttcttctatcttcttaacatatagagtagacactaggccagccagggccgcagaggactacccctgtctccaaacaagc

SEQ ID NO: 23922 - DNA, 1151 bp, Mus musculus
aatacattctttcttatgtttctttttaatttattttattttcattttatgtatatggatattttacctgtacctatgcatgcataccacatgcattgttgccctcagaggtcagaagaaagcattgagtcctccggacttgaagttacacatggttgtgagctgcaatgtgggtgctaggaattgaaccaggtcctctgtaagagcaacacgtgctttaaaccactgagccatctttgtagtcccaagagtagagtcttagaaccataaaattattcagtgttagactaaataatcccttatatgcaagtgcccagcatctgtgcccatgcttctcccattatgaggacttttcactcaactatcatttcactgcacacctctgcatcttgcttggtgcatctctttagatagcctttgtggactctgtatatatcgttttcttctggccatatggtgtgagaggcctgagctggtgttggggtgcttgagggtagacaccatctcttccagccataagtgtgtgtggatcatgctgaggaagggttgggcagcttgaagggaagagtagcactcacgtggtggtttgctcatgtgtgcatgtgcgtgtgtgtccccaggtgtcttcaactctcagtaccacatggagccatccttggtttctggtgtctagagagaatggagctccttgcttttaaccaacctcctctctagttcaccacttgcactcatgaaaagttgtcaactgttctgtttgggtttccatacagaaacctagcttctacagatcagatctgtagatatgtataagactgaatccatttcatgccaggcattgaactagacatgataatgtgagttatgtaatgccatagtattacatagggaagtttgttaatgtggagagcacattgtggggttttttttttttttttttttatactttcctctcttatcaaatatagcagtctttggtaatctttcaagtctgaggcttactcccaagtccaaggctgtattcttgggcatgttacaactctgtgagatgacatcccccaggccctgttacccttctctggtggccagtgagctagtctgcctctttgctgtctttgccccacctcagagctcaggttgtcatacagttcctg

SEQ ID NO: 23923 - DNA, 1364 bp, Mus musculus
aatggagcctacctagtaatggcagttgcagactgtcagcaggagcaggggaagaaatacaggcagaacaccagaaaccaccactgtccctatgtgccttattgacccaggattgccctacaggattaccctgcctggaataggaaaatatttctctgcagccttccccaccctacaaggttaaatctctaagaatcctacctggaaagttttgtggtgactcttagcaaatgtaggtctggacagagcctggtctttcctccttccctgcactacattgtctcttctagccactctttcttcatatgcactcacctggtcctgccttttagctttgcacttaagttgcagagtttctgccaagccagaaaaggccccagagtctggacctccctggaatatatccctcaactgtagcttttgtgttcacagggtctgcggaaaagggagctgctgaaggaactgttgccagtcattgggcagaatcttcgattccagcgcctctttactgagtgccaggaacaactggacatcctgagagacaagtagtctgtcctggcttgcctcagctgctgcaagggcaggaccacactattgccactggcaggttgcccagggctagccccacctgtcagggcggtagtaggaagagagaccttggcagaagatgtgttgtcctgcaccagcactagcccagttccctgggtggacatggactatatcccaagcctccatgactccaaaagggggcagcttgtccctccatgtaggcccagctgtggacttggggctgggactggggctctgccttgctgccagcagggatctcttgagcctgtctccagcttgaccccaaggtagacactggcatctgccactgcaggtgctgtgctgcttcagctgtaacgaatgagccatttgtgagagcaggagccggggagtgttagggatgatgcagtcggcagacggacccgaagcctgtgtgaatgctaagctgttctgacacatggactatttttgtactagaatttgctaacttggaatatggagtttctgttggttgatcaggatatccctataagttacttggacattggtcacttgtaggaaatttaaactctaattatgacagctacactgaaaaaaaaataattgtactgaaattaacttgtctatcttcatttggtttaatttttaaatgtttgtaaaaagagacactttgtgtggggggtggggtgggacagaggggagggcaatttcttttctaagtgtaaaataaatgaacatgcattggataccaaaccatttgccttccctgccttttccttctcatgccctctcctccctcaacctgagtctttttc

SEQ ID NO: 23924 - DNA, 1230 bp, Mus musculus
tcttttatatgctaagctacttctttagaaattgaataccagtttaatcatgtactccaggttcacttttgatcattccttgaatcaatattttattaccttagccccttgactcttagaaatagaatctgaaatacagaacacaattgaggcaaataaaccagacaccaaatacattttgtgacatagcaagtcctatgtattattggctgtcaacttgactaatctcgaataaactacagtccagaattggagggctcacctgtgatccaggacttgaagttggaagacagatgtttctgacctgaatcttgtcatggagatcttgaagcatagtggctttgaaaagcttaggctcaggcatggtagtacatgcctttaatctcaggcactaaggcaaggagatctctgagttcaaggtcagtttgggacaaagcaagtactagatccaggccaggtggtgcacatctttaatctggcacacaccttctgctggagaactacaacaagacattggaagaaggaagattctctctttttcacctgatttcatttactttccagaatatctattggcacctacttctacaaaagaccagctgaaacatctaacctggtgggactgagcaactactagattcttcgacttcccattcacaggtgaacattattggggtggttggactacagactttaagacatcacaataaattccctcaatattaagtgaccttccataacttctgtgactctagagaaatctgactaataaaaaaaatgtactgtgagtggttctagaagagcagaagtataaggatggttctttttaaagtctggaattagcttaataatttgtcagcaccttctaattcaccagcaccttctaattcactgaaacttctgcatatattctctctcctgggagttcagagaatattgaaggcctgtggtagaaactatatttcaaattaaagaatctagtgcctttaattttcttgatccatcaattataactggcaacgtataggatggcccagtgtacacaactttctacagtttgtggggaaatatgaaaatgattttgcttgtttgttgcttttagtatctctggaaaaattgatgaaggaaaataatgagctatgtgatagaattgattggctccagatgcaaataagcaatctaaagttttctaaatgtgcccttgaagaaaatattctctacagcagaaaa

SEQ ID NO: 23925 - DNA, 1201 bp, Mus musculus
aaaattttttaaaaagtacccaaaacgcaagtgactttgttttataaaaagaactaattagatccccctcatataataaaaagaactccaattactagagccccgacattttacaatgatgcaaataaatcaagaaaggtagggtattgaattggagatttctgatttctttggagattcagttgtgtcatataatatttttctggaaactgtcctatgggaggatgctttgctgaggcagacacaggagagcatgttttactgagaacagacacatggtgtttttctggaaactgcctggaaagggggcatgtgatgtttctctagagggtacattttagagaacacatggataacctaacagacagtggatgatgctgtggtattggtttgccttgccaatctttgctggtcttcattaggctatgctgacattggtcttctctgacagcactgtggttttggttcactttgccttctttgctattcattacttgttatgatttcatagagagaaatgcaccaaagagcttctcattatattccagtgacttctggctgtttccactgacttgggctgattgacagagactcttctgtttgttctggatgaactgccattgctgattcatagagagaatctacaagtgacttgaggtactgctgctgatctgtgtgaactgaactgcaaatattttgacaagattggaattgccccaaataaatgtttctaaataggtccacatcttcctttgttctgctaaccttttctttccactacctctggtgagtgatgagctataaggaaggttaaagttataagtataatacttgtaagttcttataattcagtttaaaaatcagaattatatgcaatacttatgatgttactagaatttcaagactctcttaatatagtaactaactctcaattttcagaaagagttggcttgcatatagaaactgctgaaataattcaggatgattcttaattgacttcactgtttatttaactgcaaaaagttattagaatcgtccattatatatccattatatatctcagacctcatacaggtctaccaggccctatagcacaaggtaatgatcaaatttatcagctattgataggaagtgtgctggcagcctcagagtttcataaaaaacaccatgttaatagtaagggttaaagaaagaattctct

SEQ ID NO: 23926 - DNA, 1175 bp, Mus musculus
tcccgtgggactctgttattcgtgggtatgagggggaccacaaacctgggagaaaatgggaggaagagaaaaaggagctggagaccaagtagatttttcctatcaaggtctcagtttactaggctgaaatgctgagttttaaagcatacatttatgggaatagggaggggttgagggggaattaacaaagaacaaagaagtgggcatctgctgacatgagggccgaagtcaggctccaggcagcaggcactctgcatcttatctctggaacatagatcctccttaacagccttgggtgtcaggccgggctcagtgcataactcatgtccttggaagtcatgggagccagaaagagatagggaagaggggactataattcagtttttacagcctcaggtgccaggaagggaacagggagaagggagtgacgaccgactcctagcacaaggccatttggcttgtcagggtgggagactgtgaaaggctttttctcaagatatggtctccaacattcctccatcttctcaatttagttttttagatattaggtgccatgtcatccaggctggtgatgaatgtgtcatgtaatcaaagatgaccttaaactcctccttctattttagtctccttaatattacaggtgtgtgtctcaatacctgtttttgttatatttctttatgcttgtttgttctaaaactgggtctcactgtaaagtccaggcttagaaatcctggcaacctcctacctccacttcccacaatccagaaatatatgtctatggcaccatgcctgactggttttgcaatactttcttacctagtaattttttgctgatatgatcttcccctgggagtgaggaaagctgcctaattttacaaagatgaggtttagtatggaatacagctacaatgcataatgtatacattgtttatatgtttctgtagcactttggcagaattgaccagttgtgacaacataactgccaaggttggaatgtttagcaccttaccctttgagaacacatttgctaataatccctgttccatttgcccctatgtactattgctgacacttctgaaatcctgattctcaaactcatagtgcctgttctcaacacaaaataaaaatttagagtctgtcactctatacttgcatattaataccatgaaatttgg

SEQ ID NO: 23927 - DNA, 1124 bp, Mus musculus
ttgctctctttgtttgaggatgagggaaacttaaataaactgtgctcttttccttttttctacttttttttaattctatggaatattctttcttgcagcaaagaaaagaattaggatccaaagtaatcttcttcttcttcttcttcttcttcttcttcttcttcttcttcttcttcttcttcttcttcttcttcttcttcttcttcttcttcttcttcttctacttcttcttcttcttcttcttcttcttctacttcttcttcttcttcttcttcttcttcttcttcttcttcttcttctacttcttcttctttttttgtctgtgattaacgtgtatcaaacaggctcttctgccaaaaagctcttaaccctggctaaaattaaaacaaagaataaacaaacagcagtttaaggagtcttggatcaggcaaagaagttggcattcgaagtgccaggttcctaaagagaatggaaaaaaaggtgctaaaatttttaaatttgccatgcttttggttttttgttttgttttgatttggtttttccattctagacatgtaaagttcccaggttaggacaaagaagctgaacaaaatgtactgtaacgtaaatattttccagattcactaggatagaaatggcaaactattaactgacatgggtaccaaggcaataagatacttaaggtgccaacttgagtaagaaaagggtcagagaaatcaagtaatgaagttacacctaatatacattgaacctctgcatttttccaactcctatcacttgcctgaattgaaaattaattaataaaaaacattcaggcaatttggaaagaaatttaaaatcaacaaaactaaatgttggttttatagatctaagttaaaggaataaaaatcaattccttctatccaccaaaatgaaaaatatttaaaggacttctcatttaaggccactgaaaacatatcctgtaactataagaaccaagtcagaagagatcatctatgccaaagcctaaagccatccaaaagatttgaaccaaattggatcaaggcaatctgtttataaaacatatacttaatagttgaataaattacctctgggcaaaggcaaaattactaaaactatatttt

SEQ ID NO: 23928 - DNA, 2638 bp, Mus musculus
aaatatactgcaggttaattaagatagttcttctctgcagactgacttacaggaattcatacccttgttgggctgcatttgcttagtagtacatgaatgctgtactgtgttaagtgtcactgagccaaacttgaatggaaaataataatctgtaaatgtttctctctaccctaagtcaaatgaattgaaagcaaagagattcatttcaaaacccagtcaaactggtcagtgtaactccaaattaaactgcagcttaatttcatttcaaggaattcatattctaaacgacttagatcatgagcaagggtaaagtaagaatttcaagttctcatttggttctacacatgtatttaaggtatggagaacacctgagaagccttgatatcaaaataatagtttggggaagatacctgagaaatatataatatagcatttctaaaaaattaatacctcttagaacaagcaatcccaattatcttattaaagagttctaggtagaggtggagggaggcaggtgatgcagaaggaacgtgatgaaaggttcatccgaatgaggacatatgtggaaaatgtatataatttcttatagttaagtcgtttaacattggcattcctacagccagttacctaggcagttctggaatcatttaagatatatttgtttcattttctcaaatttaatttttagtgtaaaaactttagaaagtggtcagctctaccctaataaaaactatatgtacgctttctctaaagttataaaacaagaatagttcctggcccctggaggaccttctttaaagataaatcactatcaactccaataagcttgttttaatttaatgaattattcaatggcttttaaaacactagatattggcctctgtttaaggtagttgtttggatgcagcttacaatgaggagtataataacagaagagacttaaaggaaagatagaactaggggtatagctcagcatccaaaagggaagacaaagaagcaataaaagtctcttttccttgtaattgtaacatcagcttggagtccagaccatggcactcaatactcaaatgccgcttccaataaggtcttgtaggacacagattttgttccaagtgaagacttttagcttgaaagtttttaatatagtaccacgtctaaaataatccattatttgactcaatagctatcagaggttatcttttaaatatttcaaacatgggagcaaaataagagtgctagagaaactgaccaaatgagattagaaatgttggtaaatctgcatgttctttgtaatcagaggcttggcagatctaataaattaaattacatttattttacaaaataggattaaaacatgtggctggtatgcaaacagtgcaccagcacagaaaggactaaggggtattcatcgattaaggacctgtaatgcaggtcaaaacacgatttcagcaaatgaagatggatgcttaacaaccctcagacagatgcatataatagggaaagtttagctactattattagggtggttttggaaacaatgcaaaaaaatctaaaaatacacaactaaatgatatctgtgttttcacaggtagattttttttaaaaaaatgtttacagaaatctttgtgaagttttttattatgagatatgaagcttgtttatcctactcgggtagtttcctactaatttcaagactagtgttaaacattctaaggtagttatcttagggtagattcaaggttttagatgactaacagttcagattttctgatcaattttttaaacactagagaataaaagtgtactagagaataaaagcagcttcatagttaattctcaccaattggccctttgctagctgctggctttaggtacacataggataatatgtgtccacgtttctacttggaactggtaaaagttgtcactggctggaaaatggtatctctctcttgtatacaagatggtccattgacactggtactttatgaagcagttctttgtttgtttgattgagctctcttgaaccttgttcatcttttagtttttgcttagaatagaatggaactggtttgaagttaaaggaaatattcattttgaaacttgttcattttgaaaggaaatgcaagtttcaaaatgaaaaataaaatgaaaaaggaaataaattattgtcccagatggtcacttgagttttaaaaaatggctgcacacagtaaaactgctaaaaacaaaaacttacctcattattggtttgcatcttttttcagctactaattttataccaaaatgttaaatatttatattgtttgagtttcaatcttgtatggaaaaaaataattagtaggtctaaaaatgccatgctttccaataaagaagttaaaaaaatcatcagtaatgtgaatttaaaatcctgtgtgggcatcattctgtgtatcgtcacctgctgtcttataccagaagaacctgcactacccatccattgtcctatgtgtgctcaccctgctgctgtgctcactggtgggctgtcatggagctacttaaggagctatgctgtgactgtgggaaatgctgtttgtccagaatgccatgacaaaaagctcttgcagttttagtgtattaagatgccatctaaagaggt

SEQ ID NO: 23929 - DNA, 1198 bp, Mus musculus
tcatttttaaataaaaatgcagtgagtgtattgggggtggggggagctacaaaatgacattgtttccatgtcaggtctagtgaagagcataagtcaagcaaagccttttcagtcagtaaaaatgccaaccctacagtgtctaaaattgaatttggatctagcatttgctaccctagtgtcagacagtagtaggactctcattggctttgggccttactaactactgataaagaatacttacttaggtaggactaaccatcacctgacttaccaagacccaatattcttcatcaagtgtacagataaattattctgcctaatgaaagtaaagaaatgtacaagatagtattcatgtcctaatcttagcttactctgattgtggtattttgggttttttgttttaagttggttactcatatttgtttttaatatcgacttttgaatctgcgtaaacttgagaatgtacaagttctcttaatggatgattggatcagaacagcagttaaatataattgctattctatgtactactctaaatcctggtatgtacttttaagcattcttctctatctcctacacacaaacacacacacacacacatccagatacgcacaatagctcacaaaaattgtgctgaattagttgtgtggacattgtaaggttcagtaaagcagaagaattatgtattaaagttacttgataagcttggaggttctatataaaaaggtatataataaaagcttaaattaaaactaggtgaggttttttttttcttttaactcttgagacttttctcaaattgattccatagttacatgtagtacagagtgaataaactgtttactcttgacatatttggctttgatatcaactttgaatctgcctaaacttaagacatcaactcttagagtaacttaattctatcgaatttgaatgcaatgtaagtttgtaagcatccttcaaatattcaaagtggaattatcacaggatatacttttcttcatctcaccatcaaatttagcttactgctttcataaatagtaaaagaaatttgaatatcattgaatataaaattaatttcctttaagagagtgttacttttaatgatctgtatgaaactgaactttaaattaaaaagttgtaatttactaagaactgttttcagcatattactaatgtacttgagctgatagcatct

SEQ ID NO: 23930 - DNA, 1099 bp, Mus musculus
tgtgatgccttgtgagtgcctctccgctgccttgtgagcagttattagcctaggagagttgtctaattccttaatatcctacagcagtggggcctctcacttgtaactctgaccagcagcagttccggtctccagagagaaatctcttatttgggagagctcttttatttgtataaaatactgatcatcattttcagatttctattaaatttttccctctaggttttttacctccattttgtaaagcttagcagtttgcaaagggaaatgtgaaatttttcttagacacataagtgaatacagcaggaattagcacaactaattattgtaacttccagtgccctgggctgcagcaggtgacttgctgtgtaacttcccagtctctcactataatatactccttgtcaatgacaatggtgtcaatcgatttctgttcaaattcaggcagttatcagaaacctagcattggcaaacaactttttcctcatcttaggataatacaaatgtattttaagagtcatgcttagttggaatctaaattctgagaaaaatgctaaaaaatacacttaggaaatggttttcaagtcataaattataagtgatatagctatagaaacaatgcagaaaatcatctgtcaggtgagcaacagatgtatgtaaaactgagggtatgtgtactgtaattttatagtaagtatctgcattatgcttttgttagagaatggaaattgtttagttcagaaattcttaacagttaagtgtgtgaacaaaagtgttttataaatgcttaggattctacaaatgataattgttattctcatgtatatttgtaagatcatgtccattcataaatatatataaaagacttggtcaaagtaaatttgtattttagtatttttgtctgttgtaaaagtattatctacttgtatcttataatgtttatctttcatatattctcatgtttattgcagtaaattggaaaaaatcctgaaaatcagaatttgttcaaacaaattaatttttatgttacaaattatattaaaagttaccagaaagtacctgaatcctagaaaattaacttttaaaagctacccaattg

SEQ ID NO: 23931 - DNA, 1139 bp, Mus musculus
taatagtggtaagccctggtttaaaaaataataattttgccgggcagtggtggcacacgcctttaataccagcacttgaggggcagaggcaggcaaatttctgagttccaggacagccagggctacacagagaaactatgtcctgaaaaaaataattaattttagggtataataaatgtattaaaagggctatatcaaccatcctagagtcagactatcttcattctgttatcccataattggcagactttcttttgataggtgatgtttatatgagcctctaagttaggatgtgtgtgtgtttatatgtagatagtatgatgtgtacatatatcacaaacacccaatggtttttgcagtttaattatcagaaatttgtataaattaaaaaattagttgatcatagacaatttgattacataagactaaatttgaacatttctagagtactctttattgttgagacaggatctctgtagcctgtgctagcctcaaactcttagcaattctttgccttctgagagctgcagttagaagaggaagccaggaccattttctaaaataagcatttcatctgaaagtgcagatctggtcttaaggatctgtgcacctgtgtaactacagcgttacaaggccaggaagcagacctggagatctgtgtaacgacagtgttacaaggtcagaaagcagacctggagatctgtgtaacgacagtgttacaaggccaggaagcagacctggagatctgtgtaacgacagtgttacaaggccaggaagcagacctggagatctgtgtaacgacagtgttacaaggccaggaagcagacctggagagaagcgtgcaaacaccgcttgtggctgttcagttggaaaggtcatatgttttgtgaatcaacaggaaattacagttggtttttgtgtacattttcatgaacttgaatcctcctccaagtcttctccatgtactccacaaggtggcctgacttcctccctgtctgctgtactctcccacactgactgactgacaggaattgggttctccacagccgtttgtcatagatgggcggttgggatccaggtgtttactccattggaatcaggttttaaacgaccaaatgctcagggagggcattggcttg

SEQ ID NO: 23932 - DNA, 1662 bp, Mus musculus
actactctctggcctctacaggcacacatgatgcatatacatgatatgcaaactgtcatagtacaggcaaaacatacacataaaaataagtatcacgggctggtgagatggctcagtgggtaagagcacccgactgctcttctgaaggtccggagttcaaatcccagcaaccacatggtggctcacaaccatctgtaacgagatctgactccctcttctggagtgtctgaggacagctacagtgtacttacatataaccaataaataaatctttaaaaaaaaataagtatcactaaaatgttgtatgtgagccttttacatgtgtgtggttgccttaaatatcaaacttatacagtgctaaaggtgatagaacatagaaagtgaagtcataacttcatatattgttccaaagaagttttgttttaatgtttgtgccttaagctacccagtgccattttagtctgataaacctcagtattggtttttgagggtctagttttgttttattttttgagtccgggcgatatagatccaaggcttgcctaaaactctgttttgctgaaaatgatcttgaactccaatcattctgtcatagctcccaagtgcttggatgatagcttgtgccaccatgcttggctgtgtgggtttctgtggtctgggtgggttgtttggttggttcttcaattggttgatttaatgtagccctggctaacctggaactcagtatatgaccaggttgaccttgagctagtggcaattctcctgcctctgtctgtgagtgctgatgcttttgtgaataccagctgcctgctaggcagaaagagaatgttaactgaggttgttgcttggagttttacatttttaacttttggtacctaggtgctttgtaaaatactcagataaatacccactgagctatttggaatagtgaagagtatgcgtagttatttctgtttgtcattatattagtagtgctgctccaggcttttccttgagaaaacacttcctcttcatcgctcccgctcctgcagtgtgagtctccagagctatcgaaggctttcagaaccgaacaagtgtgcgtgcttttctgtaacttccacacagccattgcctagagtgaatgctcacagtgaagaaaggagtgttctccatgtccttgttctccgttcagcagtagtacagtaatgtagtacagtaatgcttacagttttgtttaattgcacttcctccatagtttaaatttttaaaagttgtatctaatgtcttttaaacattacttgactatatggttacattaaattttgtttaccaaaaatctgatgagttttaagtttggttttttttttaatatacctaaatgattgtgcaaaaaaggggcaagggggaaatcagatgtttatatttaccagaataaccataaaataattcagaacataaacaagaaactaaaatagtaacttgagaaaaggaaaggtggccaacaagaatactaatgttagtgtgtgttgagtgtggccctggtgtgatggctggtgttaaaatggagctgttcagatgaagcagaagaaaggtgataaaggcatgttaatacagcttatctgtgaggtgtaagggaataaagacatgttaatacagctcatctgtgaggtgtaagggaataaa

SEQ ID NO: 23933 - DNA, 1174 bp, Mus musculus
tacatgtcagctccatttataattaactccccgtcttggtttattgctgtgataagataccataagataccagcaggcaggcaggcttggctctagagcagtagctgagagctcacgtctgatccataagcataaggcagagagagctaactggggataggtctggcttttgacactgaaaggcccacacccaatgacacacaggccacacctcctaatcattcccagagttttaccaactgagaaccatggagttaaatctatgagtctgctgcactcctttttcaaacctccacaccacccaacttggagtggggtgttgtcctcaccaccactaagtccagtttgtgctgcccagctagcctggggagtgggagcccattggccagcaagtcaaaatggtaaccaatacccattactgggtgatttattagctagtaaggtctctagttgggatattgtgcccctattggttgataaatccattaagcctctttatttatatacagtatatactttacagtatatctacagtagtgtttccatgagcttttaaagaaggcctttagtgttcgctgtctccccatagttcttctgtaccccactcttatggctcccatcccaatttagcgcttcctatttcattattctcttttaatgatttatctctgtgtccttgctcccctccctggatacttcactctggtgctttagactgctcagctaccccgacactgctcatcatcaccattcttacagtcttaactctgtgtgtgtgtgtgtgtgtgtgtgtgtgtgtgtgtgtgtgtgtgtgtcctagtgaggacaggtactggaggaagatagaggcctctaatcctcctagagctggtgttcctggtagttattagcctctgagctatctctccagccccccccccttactttttaatgattcaaagctgtcactaaaatgttgaaaatatatagtcagtatctatctatctatctatctatctatctatctatctatctatctatcaatcagatataagtaataaatgccttctgctccatgtttgtatatgcatatttactttagggtagttcttttttcctccaaatgaagtccattttgttcttcctagaaattactttgttcataatttttaaaaatctttatttttgttttatg

SEQ ID NO: 23934 - DNA, 1585 bp, Mus musculus
gctggtgtgagtcagctacagagaaggtaatacgccatgtgggaggccaaggaggctgcagtgagactcttccacggaaccatgacgctagtgcagtgacagcctgtgtcacggccgtgttgaggggtcccagcagaggcctgtgtcgtgtaacccagggactacaagtgtcagtgtgggtatcaacctcaaagtcaggcacttgagccatgtgtggtcctcctccatctgggattcagaagcccctgccactgcctcaggtcaaggggagggaggcagcctcagtgcagactttataggattgtcctcttggtggaccggagtcctgtccttctctgccaaagagttttaccaagatgaaaagggttgaaacacctgtgagtgccttacatgggaagaactgctctaacccactgtgctaatgttcagaagcagagccctcagtgagagctgcacacacgagcctctagcatcactacacagtgtgcacacactggggactccccagtcctcctgactattatggggacacaggaaagacctcagcctcagttgtaaacctgctctttgtctgctcaaaggaaacttgaaatatctgagtaaaagtcaaagaaacccagctaagtaagcaacataaagcctgttgtgtcaggtcctgcaggtcgatgtgtgagtcaggaaacactgcagggaaatagacctttccttccgtacctgagagctgcaggtaccaagggatctaccgtgcagggactgggcaagcacagcttactgctataattgggtatataaggcttaagaatttggtctatgccaggcgtggtggcgcatgcctttaatcccagcactcgggaggcagaggcaggcggatttttgagttcaagggcagcctggtctacaaagtgagttccaggacagccagggctacacagaggaaccctgtctcaaaaaaacaaaaaaaaaataaaaacaagaatttggtctaagaccatacagcagattgatatgctggcacagatttgttcagaagtggacagagacttacaaggtagagtatcccaatgagagcagattcatttgttgtgataaaaaacctaaagaaattacttttttgctaaaaaaaaaaaaatcaaatgatttaacagtttctgtgtatgttaaactttcaagtgtttttttaaatcataatgtgtaataattgtgtatcattttgtctacaataaaacgtttagtatttgcaatgggttttctgagctggaagcaccgtacttagatgggctcattgagagaggtggttgtggtatgagtctttgtaagtttaaattgatatctctacttccctaaaaaaaaaagaaagaaagaaaaagaagatgcaaccatgcaatataaaaggaccacagttacattcaggtcacttacaaaaccgtgagcataattatttcatacaagcaatttggggtaaaggaaaatgaataaatgggttcagtttctcaaaaaagcagactctttgtctaacaagctagtttatctggtgaaataaagttggtctgtgctaagctctgaatcactcccaggatgcaagtct

SEQ ID NO: 23935 - DNA, 1180 bp, Mus musculus
cacgaggatagaagggagctggaagcatgtctggagagcatctcctatagggctttaggctccccaactctggttagctacttactaccctgctgaggggataactcatcctgtctttggaaaactgaggggataactcatcctgtctttggaaaactcatctccataaattccagccagcacgtctgtgtggaacaagcccattcccctttgcacaccccttcaagcgctggaaagagcctgagaggtttagcagtgtctggtaagaactataaggacttccttgtggttcttttcttcccaggctctccccacgggagcatctaggtctgatggtgtttcaaagccatggctgaggaagcagctcagacctcccacacagcatcccctcagaggtgctagcaggcccagcctccctcttaccaaccatatgcatacgccaaggatcctgtccctctaggtctgtcagcttgcatgctcagtgttcctaagagggaaacgattgcctgctgggcagattaacaatttactaaaatgcaaaaatgtgctgcagcaacttgttataaacacaggcatattctttcccatccctgtagcctcccaaaaatggccgtaatatagtgtagcttcgctaatatccttgaactccaaacccttcttgctcagagctgcagatgcttccagtgttgcaggtgttaccttctttccacttcagctctcctgcatacttaagtgggaaaaggggccatctgtgccactgctgcttcctcactggcagggacagtgagcactccacttctgcacctgaaagtgagactgctattacctataccctgctggcttgttaggacatcctccggaaagccagccaagcatggctccccaatagtcctttccactttaactcttccaggtaccttttggtcctgctgtagccactggcatgccccagctaaaagcctccagctgtacactgctagtgaccgcaccacatgtccagcaaccccaccccctgcattcactcttggtgtagagatgcatgacctcagcagtgtgccacaaagctcttctcaccagtcctcctgaggaatgaaaccctgcccttaggaagtccctcctcattgcagatctgagtatggtcacatggttccacgaacaaccaagaagccaccaaggccaa

SEQ ID NO: 23936 - DNA, 1114 bp, Mus musculus
gtagaccaggctggcctcgaactcagaaatccgcctgcctctgcctcccgagtgctgggattaaaggcgtgcaccaccacgcccggctattttatgtgtatcttgagtgtatgtgtgagcaccatgtgtgtgcaagagctcgtgtatgtcagtcagaagaggacagttacaggcagttatgagccaccatgtgagtgccaggaaccaaacctagagcttatagatttactttctttcctgggattattaatgttctgatgggtatatgtgtggtatttattttcatttttgtgtttttaaagaagttgacaaattctggcctagagatttttaagctgtctgagacctttggcttgtgttcctgacacacgggagcaggagatagaagcaccggtacgctcaaggtttatgactgaaagcaggctcttgggttggcaggatgtcagataaggcaagtctagacagtgagttgtttgcaaagtatttgccttctgaattcagagaagtttctctgtgctgctttaatcctagatgtagacaggagcagatggcgaggaagctgcactgtgtcccatgtctagaggtagagagtctgtgttggagaaggactcgtctcaggctgttcttgaaaagccactttttaagggtagggtagaaagcaagctccttttacatgttttgtttgctttggaatgtatcgttgttgttattgttattattttaaatagggtcttatgatgcagcgtaggctgcctggaacgtgtggctgttgtcctgcacctgactcccaagagctgggattgtgtgtgaaataccatacctctttggaagttttcttgctcttattcagaaatatttccctagacttcaagttgcttagggaaaaaagtgtgtgcatatatgtatgtatgtatgtacgtgtatacatatatgtatgtgtgtggggggggcgagacagaggttgacgtcaaacctcttgctcagttgttctccacctgaagacaggttctctcactggagatcactgtcctgtcttctgtctccatccatccatgagggatcataggtgcgcaccaccttcttatgctcttttcttttaaacatgattctaagg

SEQ ID NO: 23937 - DNA, 1889 bp, Mus musculus
cccacaatcacaccctgacacgtctcctcctttgcaggtggtggagtttgacaccccatcggtccttctgtctaatgacagttcaagattctatgccatgtttgctgctgcagagaacaaggtggctgtcaagggctgagtcctcccgtcctcgaagtctcttcctcagagcattgccattctcttcctggtttgggcccctcatcctgtcctgctgaaacttcgcctttcccagttttatctctcacacaaccattcaggattagctgtgtgtttcacttttaaggaaagtcatattttgattattgtatttattccctattcacttaaatgaaatttagtttttgttcttaattgcactcttaagaggttcagggaaccattactataaatgttatcagtggcctataatgaagctttatatgtgtagctatgtctatatataattctgtacatagcctatatttacagtaaaatgtaagcggtttattttctattaaagtgagcactgtgctaacagcagtgcacactcatttctatcgtttttgtacagctgactgcactacaggtcattttgctcttagctgtagcaaaggcagattccgtctctagctggtcgtttcacggtgctgggctctctaggcgtccaggggagacacgcggcagcagtgggccctccatggcctgccccttgggctccccagtgggaacccagtatagtgggctgcaggaggccttgcagagcaccgtgaattctcagggctcctgctttcctgtcttggtgtcagctgctgtttatgttagagcagtgggcaaagccagcccccaccccacccccattccctctcaggaatgagaacctctgcattcctcagagggagagcttctttctgccttccttcttctgctgccatttctaagcaagatccagtctgctcccagtgttccatgcttcaggttcctgaggctggtcgccacagagttgtcgagttccctggccagctggttcccagccccagggtccactgctgctgttgtaggtggcattttcatttgcctgaccccaaggctccagagctcagcaacagggctcaggatggtggggtccgttcttcctcactttagtctcctctgcaaagtctgcacccacccctcagcagctcttgctaatcagtgtctcacactggtgtagaagttttttgtactgtaaagagacctacctcaggttgctgattgctgtgtggtttggtgcgctcttgcagacccccttgtgctctggggctcgtagcttgggtgggtgtggttgccactgtcaccagtcgagtggtcagcgtcgcatgtcgtgaccaactagacattctgtcgccttagcatgtttgctaaataccttataaaagcaaaaatatgaaaaagtgaataaaattattttggatttgtaaagctcttgttgtataaaacagttgtctggggagggtgtgaggtacttctgaatgtctttgtagtactggagccctggatcctaatatctgatgatgaaatctcatctgcaaaagggttgtttgcaaaggccaaggggccccggatacccaattctgtgtgatgggtcttagttcccacagcctgcactcctccacttacctaccagatgaggtacccacgctgctgtaagaggttagagagcatgaagagtgagtgagccaaggtggggagtggtgtgtatacttaaatcaagttactattgaaggcttgcagagactatcactgtcttttcatctgcttcactcaggttaacccaacaagtgttagtgtcttttcagaagggtatttactcatcctaaatcttttatattgtattgaattcagtcaaaaatgggtttgaattgctagtt

SEQ ID NO: 23938 - DNA, 1123 bp, Mus musculus
gcttgctcagcttgctttcttgtagaacccaagactaccagccaggggctggcaccacccagtgggctaggccctcccttcttgatcactaattgagaaactgccttacagctggatctcatttcctcaagggagactcttttctctgtgataactccaggttgtgtcaagttgacacacaaaaccagccagtacaaaaaattatatttttagaaccaaacctaaggacccactatccaataggatcttacctttctgagatattttcatgggatggaaactaacagaattacatattgcaaacaggccgagagcacatgcactgcagtgactcacacacaagtatagagtagctatacacttggtatgtagtaggttatatgaattctaagcaaagggcattttcacgtccatgtgaaacagtacatcgtacaggatttaaatactgaaatgcttcttaggaaactgaggaggacaagaatgcttggggaagtaactggatctgtctgtcctctgctccctggcagattctgattttagatgaagctacagccgctatggacacagagacagacttactgatccaggagaccatccgggaagcatttgcggactgcaccatgctgaccattgcccatcgcctgcacacagttctgggctctgacaggatcatggtgctggcccagggacaggtattacgttcctcaggagctctcactcggcatggggcatggtgtgggaggaaaggaagctggggaggggctacctgtcatcttcatgttcccgggcattcaccaagcagccatagcaacttagttctggtatgtgatgatctatatatccctatgccccagggatgctcttactctcctgtggcacatgagcagtgacacaggccgagagcacatgcactgcagtgactcacacacaagagttgcccagaggccgggcgtggtggcacatgcctttaattccagctgaggcaggtggatttctgagttcaaggccagcctggtctacagagtgagttccaggtcagccagggctatacagagaaaccctgtctcgaaaaacaaaaacaaaacaaaacaaaaaaaaaaagagtacacaaatataaaggcaa

SEQ ID NO: 23939 - DNA, 1234 bp, Mus musculus
tccagagtgctgggattaaaggttgtatgcactaccaccacctgactttatcaggtttttctttctttctttcttttttaagatttatttatttatttatttatttttatgtgagtgcactgtagctgtacagctggttgtgggccttcatgtggttgttgggaattgaatttttaggacctctgcttgctccagttggccccacttgctccagtcatctctgttctctcagtctctgcttgctcccgcccaaaaagatttatttattattgtaaataagtaaactgtagctgtcttctgacataccagaagagggtatcagatctcattatggatggttgtgagccaccatgtggttgctgggatttgaactcaggaccttcggaagagcagtcagtgcttttacgcactgagccatctctccagtcccagctgtttctgaaacttaacaaatgattattctcataaaaagttcaggtagctttgtgatgtacctgataacagctgttctgcatgttcagctggtgcgactttgtgcagtgttgtggtctgtgctgagcacacgtgtataatgtaacactgaggaacattgctcttgatgagtcttttgctggaagagagcaggatactagctagacagtggagggagagtggacgctgctcaaacagtgattgttttgaagattgctttcctgatgccagtctgcaacccagattcctatcccagcacagtcattccattcctctacacacacacaaactcagtacacacactcacacgtacacattcatgcacactcacacatacacattcaggacacacacagactcagacatacacactcacacacaaacacacacactcacatgcatactcccttgtgcttttcaccttagtggtatgaagtcaatgactatttgccagagaagttttaaaacactgagggatgactgctaaaaccaatcacacaggacgttctaacagccttttaatgtaggcatgcgttcccagggccagtcctgcacagtttggaaatgaggaactaaaaagcagaaatggcttgagtgggttgcaatgccatgcgtagcgggtacagcaggtcataatgctatgggtggtacgtgtgggtcacatggccatgggtggcaaagctagaattgcagtctgtagttcttagattggccaacatatttagatgttcaataaatgttaaataccttacttcagttttaa

SEQ ID NO: 23940 - DNA, 1154 bp, Mus musculus
cccacagcggatcttgatgaaagagacagtctgtggttctaaacagtttattggctgttcatggtggaaaatggatgcatactgtatcatactcacttctcagggtgggcctgagatcaaataccttttacagagaggaatgtctgggaagggaagcttatgggcaaagccctctgggcctctaggtacctcattagcatggagaactctgttttgggcctatgtcaccacaggacatacttcttttatgtaaggagcatggcacatgttctaggcagggagtggggagttgcctcaatctcaggtgtgtacctaccgagtctctgggcctctgcacgctctatcttaccaacaaaggtggaaacaaagggactgtgatcagcgcttcatttctccatcttaacagccttctgtctggaatggtgcagtgaatgcctggtgactggctaatagacgcacaccgccaccatttgttccctgtgcctcttctcattcaggaagtagggaagtagttactggatgtgtgtggcaggtgtgctaagaaaggaagcagcagggatgagagggatgatccaacaccccacactgtagattctgacgcgtactctcgcttgatcttcagcctaaaccctgagactgttacttcttcagggagttcatgtccagaagagactcagtgatctagatacacaagtgtatcatgaaacagcaagagaaaagtgtagcactgtgagagagtgaggggaaagagtaagcacagattccttgagtgtgtagaacccagtcatcagaaaagagtaggtgccagcatacaagatttcaaacaccttgactttgatgcagatgaagatgggcatgcagttggcgccacttcttgccaggtgccgccttctgaactgttggggacagtgggacctgtgttttgaagacagtttccttgtcctgtttggtaccagccattgtagtgtactgtagtcctcctagagcacaggactgcgttctgctttatgctatgctatggtccgtgggcccagctctgggtctgtaaaaagcaagagcctaacaggtggtttctcataatcagccagatttgagggccagttatgaagctggggctcttgggagtatgaaggtcatctttcacagcacttctg

SEQ ID NO: 23941 - DNA, 1121 bp, Mus musculus
aaagctgccatcctgatgcattgtactccagactctggaagcagatatggctctgccatgcatttcctctactgtgtatagttgcaagtgggaggccagcccatctgtgtgatggctatccccgttcggctctgtatgttcccaccaaatgttcctgatgcccctgctaatgtacagtgtttgtgagatgctctttgaacatggtatctttaaatatatatttcattttcaataaaagtacactgcttcccacttcctggtatttactgctgttgctgaatgtgcctgtgtgagtgtgtgctccggcgttgcaggacctcagagctggaggtgacactcgtggtttctgggggctggctgtcttccctccctgcaggtggtgttagacataagctacctgaggtaacatgtttttgtttttgagagggagtgggcgtggggagggccagagggagggtctctggagtttggtagcttgtattgtttgctctcttctgtcctattaaactgcccctgtttgtttgcagggatgttttgcacttcccactcttccgtacaactgtaggtacactgttcctttttatcgaataagcacgtgtgaaagggtacagagaaaggtctcggtttcatgtaaagagaggtagccatgtgtgaagatgctggagtaaggtcaatatatacctttggatgaccatgcgtttagaatgcattgcagctcatgggcaggtttatgttacattagaaagagtagtggtcacgatggcgcccttcagaagaaaagcaagtgaccccgctgtccttcacctgggggcagattgccgggaatatttggtccaacaacacagtttctctttgcttacacactgatcactgtccgtggagcagcctgctctttctaacctaacataacactgtggctttgtgtggggttaccgtgggcgatgttgactgtggtgtgtgtttctccctgtaggccttcgtggtgaagcacctcttggagtacacccaggcaacagagtctaacctgcagtacagcttgctgttagtgttaggcctactcctgacagaagttgtacgctcctggtcacttgcactgacttgggcattgaattatcgaactg

SEQ ID NO: 23942 - DNA, 1085 bp, Mus musculus
tctacaaagtgaggtccaggacagccaggactatacagagaaaccctgtctcaaaaaaccacaaaaaaaaaaaaaaaaaaaaaagaattcctaaggctaacgactgttcatttttgacaagtgtttgaatgatttctgtgactcttagtggcaatagaacaatagaaggaaattctatgaagaagaccttagtgcttagagttctagagctatgacttagggccaacatttgtccttaatgccagcactgggctcctagaacatgtttgtgtctgataccatgcctactaggctcaaattccagagccttagactgacccttagagcctgtttgctttagaataaaaggataaagtcgattatagtgtctgcaaaccaaagtataccaaagtataatcctgacttgaagatctcagactttttctttcctgccctataggtcctcttgcccctggccaacgttgcgctaattgactatactctggagttcctgactgccacgggtgtacaggaaacatttgtcttttgctgctggaaagctgctcagatcaaagaacacttacagtaaggcttcataatttttcctttccaggattctccgtcttttttcagttcttccaggatagagttgatgtgaggaggagaacactgaatctgttctgagctcctgtgaggtttagtgttctcgtcacgtgtcccgaggtaaactgctgcagcttcctttgccttgaggtcccagggaccaaaattaaaggcttgcctgtgattttgagtctttctttctttttttaatatatattttttattacgtattttcctcaattacatttccaatgctatcccaaaagtcctccataccctgccccccacttccctacccacccactcccactttttggccctggcgttcccctgtactggggcatataaagtttgcaagtccaatgggcctctctttccagtgatagccaactaggccatcttttgataatttctgagtctttcaaagtttgttcctgtgagttttgctttttgtttgatggctccagagtgtatgttattggaagggcatctttatttttcca

SEQ ID NO: 23943 - DNA, 1791 bp, Mus musculus
atcacatcagagctataccgatcactaggagacgtcctccgtgacgtcgatgccaaggccttggtgcgctctgactttctcttgatatatggagatgtcatctcaaatatcaatatctgcagagccctggaggaacacaggtcaggctggggaagactgcaggacaagacttagggaccagcagagtcctaagactaactgtgcctctggttcttaataggttaagaaggaagctagaaaaaaatgtctctgtgatgacaatggtcttcaaagagtcgtcacccagccaccctacacgctgccatgaggacaacgtggtgatggctgtggacagcgccaccaacagggttcttcacttccagaagacccaaggcctccggcgcttttcctttccattggtaactgggtgtctggggaaggaactcgggtaggagaaggcggagctgcgaggagagaggtgagctcaagcctctgcctgccacttctcccttcagagcctgttccagggcagtggagacggagtggagattcgatatgatttgttggactgtcacatcagcatctgctctcctcaggtgaactctccagaacagggctgtgtagccagagtagagctctcgggggtctgtaattgctccctttcaaggccagggtatgcatcttttccctctttttctgacttgttgtatagtagagaggtaccattacctgactcccagtatgctgggaaccaaatctagggttttgtcccacagccatttctgggtttcatagctctctgggcttgttacttgtaaagtacttaaccttagcgtgctctgttttcctcacaggtagctcagctcttcacagacaattttgactaccaaactcgagatgattttgtacgaggcatattaatgaatgaggaggtgagaagagcttccgaaacctctagtagaaagggtttatcttactctggtagcctttggttcccttttgtgtttcattaagcctgagaacgaaagctctggtcgtttgactatgtcagtgagaggcgctgaaaaggcttagaaaggtgacatgcttggggttcgtcttcctgcctcgcttgattgggtaaccaccccttctcatttaggtcctaggaaaccagattcacttgcatgtgacaactagggaatatggtgcccgggtctccaacctacacatgtactcagctgtttgtgctgacgtcatccgccgatgggtctaccctctcactccagaagtaaacttcactgacagcaccacccagagctacactcattcccgacacaacatctaccgagggcctgaagtcagcctgggccatggcagcgtcctggaggaaaatgtgcttttgggagctggcactgtcatcggcagcaactgctccatcaccaacagtgtcatcggccctaactgccatattggtgagcacaggtggggaacccagcagcggtcctatagatacggggctgcagtgtgtctccagaagctagggaggatgccgagggacaatcctatgaacaggaaactagagtggctatcataaggaaggagcagaggcatggagaggtggttcagtgtgcattgctcttgcagaggactcagattctgttcccaggattcatagctcataactcaagtgcaggaggagccagtgacctcttctgacctcctcaggcaccaaacatgtgctttgtgtgcatacataatttgggcaaaacactcacacacataacgttaaattgactaaatcttgggccaaaggaacaagaaaaagaaaga

SEQ ID NO: 23944 - DNA, 1221 bp, Mus musculus
ctctcttgtctgtcttgaagaggcttcttcatatgtggtaggaagatgataaggtcgtctcttacattatccatcatccttgcttagatagagggatcctgagactcccctttgctgactctgtaggtcctgatggctttctaccagctggagatcttggctgaggaaacaatcttgagctggttcagccaaagagacacaactgacgaaggccagcagttacggaagaatcaacaggtacgctgccctctgctccctggatcccgagtcctccactggaaactctaggactctgtggccagaactgtttatctgctaacaggaacagtgggaatgcgtggttctctcctagcagctgtcccctctgcttccttgcagctgcagaggttcatccagtggctgagagaggcagaagaagagtcatccgaagatgactgatggtgactgccagatccgtgcatctcattggctgtcctcgtaacaagagagctgacagaaagctagctacagaagcatgagtggccacggcagactgagaattattggaacggaagttgcaactacagtattcttcctactgctggcagccatgtgctgctcgtcctgactgaagttaggatgagggaagttagactgcgttaggggaactctagacagaccctgcagttgggggtgggccagagtaagtactttgtgttccagctttcccttggggaacagtaaagagcagctggtcctctctgttgtttgtacttgttaatattacaaaggggagtggactgggcttctccttgtggtcagccaggtaagaaagtacacgcactcacttagctgcttttagccaacccctggaggagagggagaagggttgaggtggccacaaggtggtgccatgctacctaattgattccattcccctggctcatgggacatgaatggctgagctgccttcccatgctccataggccagtctgacctgtgaccctgcagtggtaggccagagcctatttctgtagcttttcctggcctgaacattcttctaccggagggcgaggtgccaggtatatttgaagccatctgctactccccttgccttttccagttgacccacttctggttctgttagacactgggccacattcatcttaaaggataaggagatccacccagtgtggtggtacacacctttaatctcagtaccccggaggcagaagtaggcag

SEQ ID NO: 23945 - DNA, 1368 bp, Mus musculus
ctctctctctctctccgtacacatagatatatacacacacgtgagtctctctctctctctctctctctctctctctctctctctctctcacacacacacacacacacacacacacacacacacacacacacacacacacacacacacacacacacgcctcagggctggtccctgaccggagggctggacccttcttccaagtcatccctagatatggggctggtccgtgactgccctctcctcttcctgctagcccttacgcttcccatacatgttcccaatgtctttgtacttggataaagcccaaaagatgggctccacagagggctgtccaggtgactgacaggccattctctacttccctcctacacccccaccccacccccatatccttataactgttctgttttcatcttctccatgagacctgggaacacaggccagttggagcttaagcagacaactgggacttccaaacagctccagttattttgaaaattgttttctaccttaaatcacaaatttctctttaaaactctgctatataaactctgacttatccagactcttaactcttcagggcaagggtgtcagctgggaacatagctctgtagtgtctgcctagcatgccccagcaaatgtctccccccatcaggatgtccttagtccaggtttgggggcaacttgaagtagggctgttttgccattcattcatccgtttaacaccttttctgggattttaatgaacaaagggctatgttagaagcatgatttgatcttagctgtcttcggttctctctaactctgccttttcctgtgatcttgagaatccctcgtcagtgctcacttgtgcgctggacgccagtacccttgtcatcctgtctttggctcacatctcctcctttcccactcccatgatagtgtcagccattctcttcttaagctgttgatatgctggccacttctaaatctggatctccaaccccagcttcccctctctttagacctgtttttattacccactggacatctccacaggcatgtccataatagtcaagcattattcctcttgaattcctgtcctggtgaccttcgttacaagctacacctacatggtattagtcagcatcacacacccttctactcttgacactctgaagttcagctgttcctctccctttcttaatttacagagcatgggatttggagtcaagttggtttgggcttgaattccagctctcatttttggttgtgtaaaagagttatttaacctctctggagcctcagtcctcccatatgtaaaatgatgataataatacctacctcacagggttgttgtgaggaattagatattgtacgaaaagtgcc

SEQ ID NO: 23946 - DNA, 1144 bp, Mus musculus
tgctgtcaatctcctccttgctgacgtcatttctctcatcccatctcattggctgatgtagcaataggtaagcagcctgtgaagctgccgctcaggtacagggggtcctgcccccccaaattgttttccttcatcatttttcatccccttcagaagtcagaccttagaaaagaagtgggtggcacagtctatagcccctctcaccctttagagtagactcttccaaggtcatactagttttattcaactccctgaagagttagctttccccactgatggacccaacagagatctctttctctgcaggcctggaacttcctggaaagctagagtggggacagctggggtgtatctgggaaagcaagtcaggcccaggagtcagtttattaacactacaggcactcttcccgttattatcatttgagttcccctttaggtagcaagccagtgcagaaccttctcccaggaccctgcaggtggtataagaagggagccctagtggtttaggccttgacttatgaatatatgtcagatttcagtggtgtggagggtggggcagccagcatctgtaggtgatcctcagggggtgaggtctgcctaaatactgaattgcctctttgcatcttttcccttaggaggaatgctgtggatgcctttcgggtcaatgtcattcatgcacggcagcaggtgcgcagccctgtcacaaacatcgctcgcaccagcttcttccatgttaagcggtccaacatctggctggccgcagtcaccaagcagaatgtcaatgctgccatggtcttcgaattcctctacaagatgtgtgatgtaatggctgcttactttggcaaaatcagcgaggagaacatcaagaacaattttgtgctcatatacgagctgctggatggtgagacattggaggattaaatgccactgtggggaggggcctaactgagagggtcttgttttagagtagaatatgaaaataggccagcacgaagttttagtctttgctggggctaggaacctgactgtggggtttggtggccaagccacctgtattagcctaaaatcttcacaaactgaactcaactcttatctcaacactccctcagagcctggagaagaggaagtcctgtaggtcccttgg

SEQ ID NO: 23947 - DNA, 1200 bp, Mus musculus
acagcgaccatgatgtcatcaaatgggtgcgatacattggccgcagtggcatttatgaaacccgctgctagctgcctagttgcagctggcccacctccctacccacccttcccacaggtccaagtacccctagtgaccactcaccagtgtcgttcctccgtcctgctctgctgcctttcctttccaatagcccctgagtataagtctgaaccagccacaccacagtggaactggtcaggtagtgcctggcttcctgggagggtggtttttgaggcttctcttccgtctgtctgtcctggcttagcgccaggccctgagttttgtgaccaaagccaggtgctctcctcttctctctacccctgtggccacacctctgcagtgggaaggttgactacccctcacctcagagcttccccaaaggccagtaacagatccccagtctttagtccccactctgctttgggatagtatgagcttcgttttgtacacgtgtgactttgtccagttacaaacccaataaacaatagagtggagttgctggctaaatgttaatggggcccgcagagggtctgacgggactattattactccatgcagttctggctgtcctggaacctgtgtgtaggctcaggagatctacttcctgagtgctgagattaaagtgtacaccaccatgccagactttgttttgtttgggtcttgctgcttgtagctctggctgacctagaaatcactatgtagaccagactgcccgtaaattttaggtgatccctgtgcctctgcttctcaagtgctgatactgcagatatgtgctttgagatgggtttcattgtgtgagctgaggtggctggactcagggtcctcccgcctccatctctcaagtgcagtgttgtaagtgtgcaggtttcccagttagtacaaagaggcaagatttgtattagttttgttttgttttgtttttttaaggatttatatcagtacactgtagctgttttcagacacaccaaaagagggcatcagatccctttagaggtggttgtgagccactatgtggctgctggaaaatgaactcaggacctctggaagaacagtcagtgctctttaactgctgagccatctctccaagatcttgtattagttcttgcaggaaagatattttccccatgcatcttatcaaaccctggcaaaaacctccattct

SEQ ID NO: 23948 - DNA, 1204 bp, Mus musculus
aaagcatggggaggagcagccgctgcctgctgtggggctcaccaatcaccagcttttcttcgtgggatttgctcaggtatggccccttgggagaactccctccaaaggaaggatgcctttagaagaagttggggtcatgcaggaaaggtgttggggaagtgtactgagagaaagcgtggtgtccagagcccatgaaggtagacttgaggacaggggaattttctataggattttacttgaaagagaaggactgctggcttgagtggaatggatggggaaaaaagcattgattccctcctgttactatggaggaatgtggagaaagaaactatagctggggaatgcaaaacggcttgttaagggttacccaggaataaaataggtagcagagttagcacccaggcagggcctctaagtactttacaccacagaaagcagccttaaagggctcaggcttttcccacagccttgcccatgctgggttacccacgtgcactttaaaggcttcaagggtctgaggaggcatgttcctctctcttggagctggctaagtctcctgcaatggccccgacaactcctgaactcaccagctgggcagtggtggttcctgaccaagatggctctgctgtagctgaagctatggcctagctccgctccacactagacaccatatgtccccatgtctgtcctggcccgcaggtgtggtgctcggtccgcacaccagagagctctcacgaggggctggtgaccgacccccacagccctgcccgtttccgagtgctgggcactctctccaactcccgagacttccttcggcacttcggctgccctgtcggctcccccatgaacccagggcagctatgtgaggtgtggtagacctgggtggggaaagaaatgggcaactgtggccagggactggggcttccaagttaggagagagtgaagatcagctggtatggttgtctctccacactgcaagtgagatcaatctagaccccaccaccaccaccacattgtgcctctgctttaggggtgcctgagcctctagcagagattccaccattcactgtgacatcctttcatgtgtcaccctggagggagtctaggcagaagtgtcagttcccacagagatgagtctgtctcttttggactccaagcttactcagtttaggggatcaagaggatatgcctggggcatggccat

SEQ ID NO: 23949 - DNA, 1042 bp, Mus musculus
gaggtggccaaggagtggcaggagctggatgatgcagagaaagcacagcgggaaccactgcttaccttggtaaaggaaatcgtcccctacaacatggctcacaatgcagagcacgaggcttgtgacctgctcatggaaattgagcaggtggacatgctagagaaggacattgatgagaacgcctacgccaaggtctgcctctatctcaccaggtgagtgagtacaggagagcaggtagcactcgtcttccagggagtcttagggttcctcttgaaggaagagactttgtgactccttagtaatcctagaacatgctacattgccttctgtatagtaggcattcagtgtgtatacttgggaagggatttaaataagttacatgagttgcacgtcctgaaattgtactacttttgactttgtagttgtgtgaattatgtaccagaacctgagaactctgccctcctgcgctgcgccttgggcgtgttccgaaagtttagccgtttccctgaagctctgagattggcactgatgctcaatgacatggaactggtagaagacattttcacttcctgcaaagatgtgtatgtagagaaattggcaaaaggaaagatgagtctgtgtatgtgctttgtgtaaaaatcagagacgtagcagtttctgatgcgacacagaggcttttctgtctcatagtggctaagagtgagcaggtgtgaccgcttcccccacagggtggtccagaagcagatggcattcatgctgggtcggcatggagtgttcctggagctgagtgaagatgtagaggaatatgaagacctcacagaaatcatgtccaatgtccagctcaacagcaacttcttggctttagctcgggaggtgagggtctcctcttggtcctgaagggttttggccgaagttctgtcattctacctccctgactaatacctttcaatagactccctggttaaagttgctattcagtgggagaacagaagggacagctaggtaggggagtactggggaagcagttgtgaccctctggctt

SEQ ID NO: 23950 - DNA, 2067 bp, Mus musculus
ggagacatagattaatttaaagttggagactgggctagcaagatggctcagtggttaagagcgccgactgctcttccaaagatcccgagttcaaattccagcaaccacatggtggctcacaaccatccgtaacgaaatctgatgccctcttttggagtatctgaggacagctacagtatacttatatataataaataaataaatcttttttttttttaattaaaaaaaataaaaataaagtcagagactgacctgggtggtagagggcacacccttttgatcccaacacttggcagaggcagaggcgagtagatctttaaatttgaggccagcctggtctacaaagcaagttctagtacagctagggctacacagaaaaaccctatcttaaaaacaaaaaacaattttttaaaattttattttattttttaaatcagagactttctcccatgctgtgttcctttcatgtcctagctcaactgccttccctctcttatacagggtttggtggcagtggctctcaagtggattctgcacgaatgaacctagcctcctcttttgtaaatggctttgtgaatgcagcctttggtcaagataaactactgactgatgatggcaacaaatggctttacaagaacaaggaccatggtatagtttcattcgccctcccttcctccctccccacccccctctttttctttccttgtttatttgtcatatagtcagatgttacctgagaggcatccacagtacagtttccagaggagccctttataagtttctttggggtggacccttctaaagctgacagtcttccttgtcgtagggatgctaagtgctgctgcgtctcttggcatgattctgctgtgggatgtggatggtggcctcacccagattgacaagtatctgtactcctctgaggactacatcaaggttagtctgggcaaagcttattcatcggggactttttcttctcatgtcctagtacctcctttttattaatgaggtgtcttagttactttctgttgctgtgaagaggcaccgtgacaaggcagcttaaacaaaaattatttaatttgaggcttctatacagcttcagggggtagtccatgaccatcatggtggggaacatggcagcaggcaggcatggtgctggagcaaaacctgagagctccaatctgcaagttagaggcagagacagagactgggcctcaaagcccacccctaatgacacactttctccaataaggcctaatctcctaatcatacacagaaggaccaagaattcaaatatatgtgcttatgggaaccgttctcattcaaaccatcacaggaggcatgcccagtttcttactccagatacagtgccacagaaaggcccatagtgtacttggtagttaagagggtaggtagcttaaagagcctgcttgctctttgcagtcaggagctctccttgcctgtggtatcgtgaattctggagtccggaatgagtgtgatcctgccctggcactgctttcagactatgttctccataacagcaataccatgagacttggctccatctttgggtaaggcttcccactgttctttgtttgttgattttgtttttttctgagacaaggtttttctgtgtagccttggctgttttagacctcactctatagaccgggtctctgacctagaactcagagattggcccactgccctgtttgcttatttatttatttttaaaatcttattttctccgagattgcttctctttttgttaatacctatcttataaactctggagtagatattgccaaagactgtcatgtgctgttgagtaatctggctcctggtgaatgtgttagtgactcgttctgtttttgttcttcctttcttgctgtgttcctgagtatatgtgggggactttatcttctgactttttaggctaggtttggcctatgctggctctaatcgggaagatgttctaacactgctgctacctgtaatgggagattccaagtccagcatggaggtgagttgttgatgtctaatggaaaaggtaggggtggtgtgttgggg

SEQ ID NO: 23951 - DNA, 1978 bp, Mus musculus
ttaggagcacgcaaagccaggactgttgaggttgcaatcaagcctccatgctggcaggacagagtcctttacctttacctgtgtgctgtgtgtgtttgcgtgctaaataagtaatgtaataacactttaaaagagtatgcaaattggttagcacagtgcctgacatatgcaagtactcactgattttacagaaattaattgcctgtaaggaagtataacttacagtgcatcagaagaattaggtttatgaatgaagttacctaagtaagcattttaatatcttaaccgtggttgggtatggtggcacacactttgaatccagcacccaaaagcaaaggtaggcagatctctgatttccaggctaatctagactacatagtgagagcctgtctcaaacagaaaggaaaatgtcagtgtgtgtaatgttgactttcttatttctaggtggcaggtgtgacggctctagcttgtgggatgatagcagtggggtcctgcaatggagatgtcacttccaccatccttcagaccatcatggagaaatctgagactgagctcaaggatacctatgctcgttggcttcctcttggcctgggcctcaatcacttgggtgagaaatgtttatcaaaggcctgacagaattggatacaattggagggtttacgtatcatgctgagctggatacaagccaatgtcctttgactctttactctctattagggaaaggcgaagctattgaggccatcctggctgccttggaggtggtgtcagagccattccgcagttttgccaataccctggtggatgtatgtgcctatgcaggtctgtgccttactatccagcaactctacttctctgttggttctttttttctcaggttgtttcttttttgtctttcattctgctcttcggagttttaaggcttcttgtatttacagagtaagttttttcttgatgctttctcgttttctttccttgctctcgctgtcccactgcaggctctgggaatgtgctgaaggttcagcagctcctccacatctgtagtgagcactttgactctaaggaaaaggaggaagacaaagacaagaaggaaaagaaggacaaggacaagaaggaagcccctgctgacatgggagcacatcaggtgtgggccagcaggcactctgaaaaagatagcatgttgatatgagaggcagaacaaagttgagctttgtttttggcctctgctcctcccctgagtactgctacaagttagaatagcaggactgagttttgtccatgagggacaaggagttccctgcaggatagctcttcttagatgagccttgggtgactcggtttttgttctggagcttactgtagttttgtgcctcttgaattgcagggagtagctgttctgggcattgcacttattgctatgggggaagagattggtgcagagatggcattgcgaacttttggtcacttggtgagtagcccagagtagactggaatatgggggtagtaggtgctgggggttaaacctagggccttatgcatacatggaagtgattcaccaccacactacactttagtcctgcctaattctggttttggtggctattatttgccatacgtgcttgtgtgtaaatgcatagaggtgtcagtcttcaccttctgccttctctgaaacagggtctctgtcttaatcaacactcttgctgtgaagaaacaccatgaccaaagcaacacttttttatttattttatgtatgagtacactcactgaagacagtgacagtgtctggtgagaagagggcatttgatcccattatagatagttgtgagccaccatgtggttgctgggaattgaactcaggaagaagagtctgtgctcttaaccatggagccatctctctctccataaggcagctcttatgaaggagaacatgtaattggggctggcttacagttcagaggtttagtccgttgtcatgggagaa

SEQ ID NO: 23952 - DNA, 1099 bp, Mus musculus
gctacttcataactataattttgctactgttctgaattataatataaatgtctaatgttttctgatggccttaggggactcctatgaaagggtttttcaactcccagaaagggttgagacccaaaggttgagaaccactatgctagccaactgacagttctgtgtccagacctgcgggaagcagtcaggcagtaggcctaggtttggcttctgatactccaaagcccatccctagtgacacacttccttcaacaaggccatacctcaacatccttttcaaataatgccattccctaataaccaagctttatgggggctatttctgttcaaaccaccatagtctcttatatttctcctgattagctggtccgagagcttccagagcactaggactgcagatgacctcatgtttgcacagcggacagttttacccagtgaactatctctgcccaaacttgtttctacctcttttcccaaactattttatttatttttatcaccagctgagatatggggagcctaccctccgtcgcgctgtacctttagcactggcactaatttctgtttcaaatccacgactcaacatcctggatacgctaagcaaattctctcatgatgctgatccagaagtttcctataactccatctttgctatgggcatggtgggcagtggtaagtacttgaaaaagatgttgaacagactagaagattcaaggttctttttctaagcctctgtaatgtttcttgtttctaggtaccaataatgcccgtctggctgcaatgttgcgccagttagctcaatatcatgccaaggaccccaataacctcttcatggtgcgcttggcacaggtaaagaataggtgtctcctttttcaagtgtggcagtagaaatatatgtggtggtgtaggagggcctaggagagatacgactgggtatgggatttttgtttgcctgagaaggaacatgtctcctcagatatgacttcttgtttattaacacttctggtttgtttgtttgttttgttttgcagggcttgacacatttagggaagggcacacttaccctctgcccctatcacagtgatcggcagctcatgag

SEQ ID NO: 23953 - DNA, 1584 bp, Mus musculus
gcaaacttataacgctttgtgtcctgcagacgggaggcagtctggagcctcaacccaatggggagtcgcctcaggttgctgtcattatccggccaggtaaggaaggcagtggcacaacctttacgggggaagtggggagtgtgaggatttacacttgaaggagtgattcaaactgagtaccagagaatgacttaggtgtcctgtagtgggtttgaagttgcactgtttggatgaggggtgagaacagccaaggtgggagaaggttgggatgtgttttgttaaattggaagtaagcttcactaagaggaagaacaagaacagtgaaggacttgctgtcatgcatccattcttcctgcagatgaccggtcgcagggagcagccattggggggcggccaggactgcctggcccagagcatagccctggcacagaatctcagccttcgtcgccttctccaaccccatcaccacccccaattttggagccggggtctgagtctaatcttggagtcctctctattcctggggacactatgacaacagggatgataccaatgtctgtagaagaatcgacccctatctcttgtgaaactggggagccgtattgcctctctccagaacccactcttgccgaacccatactggaagtagaagtgacactcagcaaacccattccagaatctgagttctcttccagtcctctccaggtttccacggccctggtgcctcacaaggttgaaactcatgagcccaatggcgtgatcccatctgaggatctggaaccagaggtggagtcaagcacagagccagctcctccccctctatcaccttgtgcttctgaatcgctcgtgcccattgctccaactgcccagcctgaggaactgctcaacggagccccctcaccaccagctgtggatttaagcccagtcagtgagccagaggaacaggccaagaaggtttcatcagcagcactggccagcattctctctcctgctccacctgtggctccttcagatacttctcctgctcaggaggaagaaatggaagaagatgacgatgacgaagaaggtggagaagctgagagtgagaagggaggagaggacgtcccccttgacagtactcctgtcccagcccagctgtctcagaatttagaggtggcagcagctacccagggtaaggaggtgtggctggatgattgacgttgctcattctggagatgctctctcttcactgacttcccacttggcacctcttaatgttttgctttgttttgagattggatcttgatgtagtctggctgcctgcttctgcctcccgagtgctaggattaaaggtgtgcaccatcgttttgggaacagcctcacaaaataggctggcattgtggcctagtgtgttagaccctaagtagagttgaggactcaagcttttgtgtgtgtgtgtgtgtgtgtgtgtgtgtgtgtgtgtgtgtgtgtgtgtgtgtggtttttcgagacagggtttctctgtgtagccctggctgtcctggaactcactttgtaaaccaggctggcctcggactcagaaattcacctgcttctgcctcccaa

SEQ ID NO: 23954 - DNA, 1811 bp, Mus musculus
gtgtacatgaagacagctacagtgtactcatataaataacaaatcttttaaaaaaaaaaaaagaaaggtgtgatatagtatatagagtatgtacaatttgggttcaggttaacagcactggcagttctttcgaggtcctgagttcaagtcccaggaaccatctgcaatgatcgtgggctggtgctcttttctggcctacatgcagacagaacagtatattcatagtaaacctttttttaaaaagtatatagaacttgaattttactgtctatgggtaattacttgatatgacaagttattcctttatgttaacactattttcacattataataacaatgagtagtagccataggctgtggattgtaaagccctaaaatatttactctcttgactgtttagtcaaagcttgcctcacctgtcatttgtgctaagggcttaagttaggtaagacatacgagtctgctgtctttcctttggcagcctggttccattgattctaacaaccagctttttgcacctggaggacgactgagttggggcaagggcagcagtgggggctcaggagccaagccctcagacacaggtatggaggccactgtagggatttgggtacttgctattctcagcttccttgagttcgtctttcctatacagaataagtaattagggaataaatgtaggagttatacatgatgccaaggcctgaattacttgtgaccaagagtcctaaacaataatgggatgcataaagtagtaagggtgtgtggtgtactctagctcttggaaggtagaaatgggttcatgaagtttgctttctgcccttcctagcatcggaagctactcgtccagctaccttgaatcgcttttctgctcttcaacaaacattacccgcagagaacacagataacagacgtgttgtacagaggtgagtttctgggggtggagttgttagagaatactgtgattgggttttagttgtcacagcatagggatctctcctttattgcctggacatgtccttgatgacaagaatgagaccccgaggttgccctgaatattggatagtcaacataaaatgcttgagtggtacaggtgagaaaccatgtgttttgtcttccaggagtagcttgagccgggaacgaggtgagaaagctggggaccggggagaccgactagagcggagtgagcggggaggtgaccgtggggaccgacttgatcgtgccagaacacctgccaccaagcgaagttttagcaaagaagtggaggagcgaagtagagagcggccatcccagcctgagggactccgcaaggcagctagcctcacagaggatcgtggtcgggatcctggtgagaaggaagggaaggcttgtagaggaatggggggaaaggctattgggtgatatgggactgagtactccccaactttcttgagaaactctggattcttttaagccgagtcactgaaaagctcttcccctgtagtgaagcgggaagccactctacctccagtgagccctccaaaggctgcgctgtctgtggatgaggtggagaagaaatctaaggccatcattgaggaatatctccatctcaatgacatgaaggttggcactggggagggactagtgattgcttgtaagggttggggaaggggaggcatgctgactggcatggtctatattggctggggacccggcaatgatggttttcttcttcatatgtactgcctcaggaggcagtacagtgtgtccaggagctggcttcaccctccttgctcttcatcttcgtacggcttggtatcgagtccacgctg

SEQ ID NO: 23955 - DNA, 1413 bp, Mus musculus
attttggcttttttttttttttttttttttttttttttttttttttagtatagcctcaatctgtagacccaggctggatatatcattatacccagccttctgtctctttgttctcttgagacatggtctcacttgtgtagaactagctggcctagaaaattttattgcagaccaggctcctctcaaactcttcctcctgagcaatgagattaaaggtttgtgccaccacacctggcctctgtttttccccttttcagttttgctaagctgccagagttggctttgagctactatcttgatctgcctcagtcttccaaatatttgtttctaaggattgctagtctgtcatgagattagcattctgtcgctgagcaccaggatggtagatcacggttgtgtttagcagtgtctttttgggagggatctccgggtgtagactgctaacgctttggctagtcacctaattgatgtccttgtggcttgcagacctgcttcggatgttctttgatgctctatatgatgaggacgtggtgaaggaagacgccttctacagctgggagagcagcaaggatcctgctgaacagcagggcaagggtgtggcccttaaatctgtcacagcattcttcaattggcttcgtgaggctgaggacgaggagtctgatcacaactgatggcgggtggggcaggggacttggagccatggacacgtggatggcccagccagccagccgcctggactgcaggggggcggcagcagcagtggcggcagtggcagtgggtgcctgtagtgcgatgtgtcttgagctaataaagtggctgatgaggcaggatggcttggggctgcctgggccccccccccctccaggatgctgccaagtgtctctctcctccccccagggcacagagatatatataaagtcttgaaatttggtgtgtctttgcggggggaagggcactaccgcctgcctctagggtccttttttattttctgaaatcactcttgggactgccgtcctcgctgctgggggcatatgccccagcccctgcaccacccctgctgctgcctgggcaggggaaaggggggggcacggtgcctgtaattattaaacatgaattcaattaagtttattgcctctttactgacctatggatcatctttcttaccagatctggccactgtatcattgatacttgcttgtttacctgtcagaaaattttggggacctggggaattgcttttctggagggttgagatctttggatcagcttgacacagtgatgagtgctgtagtgtacttttgctcctaccagattgatccgagctctgagcttgagacccttgtagaagccctaaatgagatgtcctatgtaaaatgactgcatggtctaccggcttctgtcagtatcgctccg

SEQ ID NO: 23956 - DNA, 1172 bp, Mus musculus
gattcacccagatcctggccccacaggctgtcggtaggataggaggagctgggggaggctcaagcttcccgaatggaatggcgtgtgtaatcagacaatgctcctgggaacatgtatctctgcagggtctggcatccccgaaatgaaaaccatccttcggggagtggtgctgaaagaatacctcaccctcaagacctttgtagctaaggtcattgggctaacctgtgccctgggcagtgggatgccccttggcaaagaggtaattgcaggttggggaatgaaggagtccctcccattggaagaaaaggccaggcgaaggtccagaaagtcccgtccctactcactaccgacccctacctccagggaccctttgtgcacattgccagcatgtgtgccgcccttctcagcaagttcctctccctctttgggggtatctatgaggtaagaggaaagccctaagatctaggggacgggagggtggtctgctgagcccaagctgacactgcctcccatccttgccagcatgagtcccggaacacggagatgctagctgctgcatgcgcagtaggagtgggctgctgctttgccgcaccaatcggaggtaggcagggctccattcagcacagcctagccctacatgtggcctctcctcctctacctctcttcccctgggagttaagtccataggtcagaccctggcctcaagggtgatgtcctctgccccctgcaggggtcctattcagcattgaagtcacctccaccttcttcgctgttaggaactactggcggggcttctttgcggccaccttcagtgccttcatctttcgggtcttggcagtgtggaaccgtgatgaaggtgggaatcttaggggagggggatctaaggtaatttaaatgggacacagttagacctgcccccctacttctcctcgttagaaaccatcacagctctcttcaaaactcggttccgactcgacttcccatttgacctgcaagagctgccagcctttgctgtcattgggtaaggagttaaagggagggcgtaggtcaggaaggaggcttccatgaaaaggcatgtacttctcatggaaaccctacccctgtacttctttcttctctagcattgctagtggcttcgggggagccctctttgtctacctgaaccggaagat

SEQ ID NO: 23957 - DNA, 1199 bp, Mus musculus
tgagacaaggtagcctggactgggactgacccaggctgcctttggactcaggagatccactttattgcctcctgctgctgggattaaaggcatgagccgttctcttggctccttagcattttcaaaaatgtatttattgtatgtgtgtgtgtatcatgtgcaggcatgagtccaccaaggtcagaagaggaattaaagtggttatgagatgctgtgtggtgctgggaagtgaacccaggttttctgcattttgcaagaacacctagtgatcttccggttgagccatctctgcagctcctacctaaacagtctagtagctgtataacgttgcagagaatggtgacatcttcatttgtatgtctcctagctctggacttaatgcacatgtctacatgcattcatttctctcctaatctttggttcccggtgacagaatactaggcctttttaaaccatgggtgggagctgctgggaagcagctgctgtagagtttaggctcaggacaagggccttctctttcagctctgcgtacgtgtcctatgggggcctgctcatgaggcttcagggtgatgccaacaacctgcatggatttgaggtggactccagagtttatctgctgatgaagaagctggccttctgaacttcgtgggaaaccagacttgctgcttagtcactcatgtcatggacactgttcaaggctgtgtagaagctgtcggtgttagcctgtaaaaggggcggaactctgtccactgtggggacgtcttcagtttgtctgaatgcagtggaaaaccgactctccctctcggaaggccgagagggagaacttagcatgaacctgaagttgtatatgattttttttattaaagttttctttttcagactcttctccattgtcattgcgggttggggaatccaaggttttgctttttctgttttggccacactggccttgaacttgattttcttcctgccgccatccttcccccctcccccccaagttctaggattgcatcacacctagcaatacatcacacataggcaaatctctgtctctgtctctctgtctctgtctccctttcgatttccttctacttcaccctaccgctgtggtgtgtgtgtgtgtgtgtgtgtgtgttaaacttccatcacctgaatcctgggaattgaactccgattgtcaagagcagcttctttaccta

SEQ ID NO: 23958 - DNA, 1453 bp, Mus musculus
gaaagagaggacagcaagagggagagggagggagaggaaggaagagagagagagagagcacaaaacttctgaattatatagggaagagcctctgggctgcaaagttcaggactgggagcagggtattccaaggtagagtctgagggatgctgggagaacctggaggccaggtctgctttgatatgtaaaatatgcacctcaatatagtctaaggctgttggctttttttttccccctgaggcagtctctcagctagcttctaacttaaccaacttctctgcctttgctttcctccacatggctcccactgttctacctctcagttcctcctgtaccatgcctgcccggacactgccttgcttcccgccctgacaataatggactgaacctctgaacctgtaagccagccccaattaaatgttgtccttttaagatttgccttgggcctttccagcctccgcctcggaccctgcagccgccgcgatgttgatgcctaagaagaatcggattgccatctacgaactcctttttaaggagggcgtgatggtcgccaaaaaggatgtccacatgcctaagcacccggagctggcagacaaaaatgtgcccaaccttcatgtaatgaaggccatgcagtctctcaagtctcgaggctacgtgaaggaacagtttgcttggagacatttctactggtaccttacgaacgagggcatccagtatctccgagactacctgcacctacccccggagatcgtgcccgccaccctgcgtcgcagccgtcccgagaccggcaggcctcggcccaaaggtccagagggtgagcgacctgcaagattcacaagaggggaggctgacagagacacctacagaaggagcgccgtgccccctggagccgacaagaaagctgaggctggggctggctgggccactgagttccagtttagaggcggctttggtcatggacgtggtcagccacctcagtgaagttggagtttatgttgtattgaataaactttaaagaaaaaaaaaaaaaaaaaagagttgccttggtcatggtgtctcttcacagcagtcaaaccctaactaagacacacagcttactcattctgagccgatcaacagcaggactaagcccattccatatttagtattgtcttttggcctcttccatggcagcttgctttttgacatgataatttcagagatacctctttaggggcagaaagtgacagcatttacatatccctggctctgccagaggatcaattaacaactgaaaatacagggacacctcaacataaccatttaacacagtatgtgtgggtaagccaccctaacaaacatgcggggggggggggggggtcttttcttctaagattgtgtgaactcccttaacatacattttttagattttttttattgattctttgtcattttcacgtcatgcaccccaatt

SEQ ID NO: 23959 - DNA, 1149 bp, Mus musculus
accaaaaccccaagctctccacccctagaagaatccgacccagcgactgtccttcccttaagagaagttgtgggggtagatggtctggtcagagtacacggtcccttctcactgagcgaactttctcagatagagaagagattgggctcctatacttctaattcttctgcctttatcaaagaatttcagaattgccgggcgtggtagcgcacgccttaaatcccagcactcgggaggcagaggcaggcagatttctgagttcaaggccagcctggtctacagagtgagttccaggacagtagcgcacgcctttaatcccagcactcgggaggcagaggcaggcggatttctgagttcaaggccagccagcctggtctacagagtgagttccaggacagccagggctacacagagaaaccctgtctcgaaaaaaaaaaaaaaaaaaaaagaatttcagtatatcactcagtcgtacagcttgacttttcatgatatacacatgatacttactaacaatttgcttcccgaggaatgtgggcgagtttgggaacaagcaagagcgcatgcagacaagatttatcaaacagatcggagtggagacagtacctgacctggatcctcaatggaattataattctgcagatggtattttagccagggacaggtttgttacatgtcttttggcgggtctgagaaaagcagctttaaagtcggtaaattttgaaaaacttcaagaggttgtccaagataaacaggagaatccatctcagtttttagaacgccttaaaggggctttattacagtataccaatctggaccctgagaacccagagggtaaacaactctttttttttttttccattttttattaggtatttagctcatttacatttccaatgctataccaaaagtcccccgggtaaacaactcttaatgacttacttcttttcccagagctaccccaacataaaagctaaacttaaaaaattggagaggggacccctgactccacaggcagaagtcttggcactggccttcaaggtatatataccatgaaagagatgagagggttagcaagcagaagtacaatatgctggcaaaggctgtcccaccagccccagttgctaccctgagctcatggtctcctaa

SEQ ID NO: 23960 - DNA, 1174 bp, Mus musculus
tttgtcggtgctgggtttgcatcctttgacctggtggcccagatgactgcagagtaagtgtaccgctcaaggtgcaggctctgggcaggaactctggctgagcccagcgtcgcgggtagaagggagggactgagtaccatttttttctgtctctagagatctgctaaggattggggtcactttggctgggcaccagaagaagatcctctgcagtatccaggacatgcggctgcagatgaaccagaccctgcctgtgcaggtctgacactcagctccaacgaggggggggtgcccccccaggactgcacaaggattctgaccagccagctggacttttggatgcctggcctctggctgtggcccagaagatggaagtttgggggaggaccctagctgtgacttctccaggcctgtgctccctcccaggaagtgtgccccaaacctcttcatattgaagatggattagaagagggggtgatgtcccctccccagatgccttggggcccaggcctgcctgctctccagtggggagtcttcacaactcagattgggctgcgcttcagtaatggacgtcctggtagggtcaggtggggataagcctgggttcttcaggccccagccctggcaggggtctgaccccaccaggtaagcagagagtactccctcccccaggaagtggaggaggagactctggggatggggagatatggtgccccatcctgaagccagctggtacctccagtttgcacagggacttgatgggggctgagggccctgcctacccttggtgctgtcataaaagggcaggcaggagcaggctgagaagcagcctgtgcctcccagagactgactcagagagccagagactgtgtgtgtgtgtgtgtgtgtgtgtgtgtgtgtgtgtgtgtgtgtgtgaaagacgggggtgggggtatgtatgtgtgtgttgtgcacatgcttgcctgcacagagagcatgagtgtgtacaagcttggccctgtgccctgtagtggggccagctgggcagacagcaaaataaaggcaataagatgactcttgcccctgctcgttcttcctcccaaagcaggtttccttgatttcctcatgtcagtgagggaactagggggctgctagaccttcacaacttcctgggggtcagtgggaaactacagcg

SEQ ID NO: 23961 - DNA, 1181 bp, Mus musculus
ttgtgtcgtgaattgtaattaaaatgcaggtgcacacaaatgctgtgtgagtcagagttctctagaggagccgatagataggatttgtttatttgtttgtttgtttaacgggtctttattagggtgtgtttcttttaaaatagatgttatttcagtgccaagagttgtcctctgaccatctgggtttatgaggttgaagttgctgtttttcttcactaatataaaaagttgaaacatttgttattgcactaaggtcatttgtgccaatatgtccttcaaaaaaagtcttgtaaaaaatgcaacattctgcaatatattagagctcttagccttcccttatgcaagcagagtgtcatctgacaccgagacacttagcactgttttctgtgtatctcagagctgctcttactgtgccgctgtcactgttgaagtaaggtccttgtggagtggccaagcccccttttgtcatgggaggtctggactggccctgactcttactgttatgtgcttgaattgcagtggatcaactcgcgcacagtcgtgcttttagacagcgtggagaagctgcacgtgattgatcggcagacgcaggaggaactggagacaatggagatctcggaagtccagctggtctacaacagcagccacttcaagtcattggccacgggaggaaatgttagccaggccctggtgagtgccaccacacccagcattgatctccccacagtggcattccaggttttgttttgttttgttttgttgttttaaccactatgttgcttataaatggaattactaaggtttttctgccttggtgtgttgaagtgggtatcagtgtgtttataaggattcaggattatatccccaaacagtaattcctgttacttaatagtaaggaatgggttggagagatggctcaggggttaggagcacttttggaggacctgggttcaattcctaacacccatttgtgagctaacagctggtctctaagtccagttccgaggggactccagtgccctcttctggccacaacaggtactgcatgtacgtggtgcatagtcacacatgcaggcagaacatccataatacataaaataaagataaattcgaaaaacccaaagaacttctaatttttacttctaaaaaaataataaacaatttccttgagatggaatttg

SEQ ID NO: 23962 - DNA, 1179 bp, Mus musculus
aaagcccacctacacagtgacacgcttcctccaataaggccacgcctcctaatagtgccacccccccatggccatgcattcaagtacatgaatctatgggggccaaacctattcaaagcatcacaataagtgaattgagtatgaagccctgcattgatttctagaactcagctcacctttccctgtcttcaaattctccccactactggtgctaaactcctggttcaattcttgccatcatcccaacagccaagtcctacagaaagagttcagacacgtttgtcgctttcagagacagttcctgttgagaataactatagcgcagcctcatgatgagcacggaccgttgacttgtaattggattgttaactcggttttgctaattgtcttagtcactgttctgttgtcttgaagagacaccatgtccatggcaagtgttataaggagaacatttcattggaggcttgctcacagtctcagaggctagtccactatcatcaagactgggagtgtggtggcaggcatggtgctagaaaagtagttgagagctacctcctgatctggaggtagagagagagagagagagagagagagagagagagagtgtgtgtgtgtgtgtgtgggtgggtgcctggcctgagcacaggcttttgaaaccttaaagcccacccccagtgactactttctctaacaaggcacacgtccttgtcctttcaaaagggatctatagacagacagagacagaggggcaggggcagagcctgacatgagtttttagaaacctcaaagcccagtgacacttcctccgaagggccacacctcctaacccttctcaagtagtaccactccctcatgagtaagcattgcaatacaggagccaatgggggccattgatattcaaaccaccacactaattttaggtctaaacccattattctggttccttctctgtacttcttgctgtgggtctccatttctaggcgtgtttggttctgatgggcaggggatattagagctgagtgtgggcaagaactcagggccctggtagaacaatcaggcaggattcagcctaagaggagtcctgcccaggctcagtcctcagcagcccatcaggataactggcatttttctaagtacaagcagtcagcgaagtgattatgtgtacgagagtaaagtctt

SEQ ID NO: 23963 - DNA, 1135 bp, Mus musculus
aaggattggaaagattggagtcgttgttggtaactgctatggatttgttgggaatcgaatgttggctccctattacaaccagggctatttcttgatagaggaaggtagtaagccagaggatgtagatggggtcttagaagagtttggttttagaatgggacccttcagggtgtctgacctcgcagggctagatgtgggttggaaagttcgcaaagggcaaggccttactggaccgtccttacctccaggaacccccacccgaaagaggggcaataccaggtactccccaattgctgatatgctctgtgaagctgggcgatttggtcagaagacaggtaagggctggtatcagtatgacaagccactgggtcgcatccacaaacctgatccctggctttctgagtttctgtcacagtatagagaaacccatcacatcaagcagcgctccatcagcaaggaggaaatcctggagcgttgcttatattcccttatcaacgaggcattccgcatcttggaggaggggatggccgctagcccagagcacattgatgtcatctacttgcatgggtatgggtggccaaggcacgtgggtgggcccatgtactatgctgcctcagttgggctgcccacagttctagagaaattgcagaaatattacagacagaatcctgacatcccccagctggagcccagtgactacctgaggaggctggttgcccagggaagccctcctctgaaagaatggcaaagcttggcaggaccccatagcagcaaactgtgattcagccttctgcattttgccatgtatggtggcatctaatttcagtgtgattcattcctaaaatccaaacagatttctctgaagtacaaatgatgattgctgctgttgctgctgctgctggtggtggtggtgctaaatggtcagcaaaagcccctctctgtatcttcctacctcataattctaatggccagatttcaggaatgtgttttctatacctctgacggtacttctatcagaaaaattcagcaaatatgtatttactactgcaagcgttcttctcttttgactgtttgcttggtatagccataacttatacaaaatgttgctaagagaataattcataactccagttga

SEQ ID NO: 23964 - DNA, 1194 bp, Mus musculus
tgaaccatgtctccaccctgtttccttactgcactgaaatactttacttggtgccttggaattgtttaaatttaacagaaggctatacaaagtgttgatttttctccttatacaaattacataaatgcatataatcccagtgatgtaaatatttgtcaagaaatgtaaaatgtggacaggagctacatgttgcctagtcataaccaagcttcttgcattggtggagacagaacgaattgcatagactttgagaattgagcctgccaggaacaagacagttggcctctgatggagaagctggcctctgatggagaagctggcctctgatggagaagcttcttactgcctgtgactgactttcttcttctttgacccctcccctgaacccgaaactcctcacattgatctttatgaccttgcatgtagaaatactagctaccagtgaaaaagcccaagagacactaattggatatcttgactgtccttggtctgtatgccctgcccttatgaatctagtatctgccactggcctttcttttctaccttctaaatacctttaaattccctcttttaggtctagcctgtaccttactctgttgtcagatttcctgagcctctgtaaaagcccctcgcttggttctctatatttactctccttcccttctctcatctcgctgcattcagaggaatcttctttttgatcctctgctttaagtccttgatgttttattgcctcaggccgctaagcaacagcagcagtgtcccctatcccacgtttcccccttgtgtctctgacggtttcaatgagaaacgaccctcattgaaaccgtttaggacgtgcagtcctgctgggggaagtttgtcactgggggaagcatttgagagcttaaggctccgtcctacttcaagtttgctctcagcttggactagtggttgagatgagagatgctagcttcttttttcctgcctctgctgccatgcccttccataatggactcttagccctttggaaatgtaagcccaaataaactctttcttttttaagttgcttttagttgtggtgttttatcatagcaacagaaaagtatctaacatagcatcctagccctgtttattgaactcattctaccaatctttgtccaaatagtttttcctccttttgtgtgtgtgtgttttgttttgtttttgtttttc

SEQ ID NO: 23965 - DNA, 1099 bp, Mus musculus
atgtctggagttagcaggacttggcgttgttgtctacctggtacaggttttgaaatcagtgaaagatgcaagattgaagaggtggtggattcttgctccacagtttcagagagcagccgaggccaggtagtgtggcaaggtcatagtcccacaaagggcctgagaggctactgcctgaagctgtgaatgttgatgtcagacccatgggacatctgacagggaaagcagcgtccatggagtgaagctactcaagggagaagttgagtgtgcctaagtggtacgtccggagggatggggatcccgtcaccccaatggcagacttggtactgcaagcttgatgtcttctctgttgggttttaggcttgctttgggcatgattattctctcctatgccttcatttctcccttttggaataggaatggtcactcatgtcattttattttggaactatgtaacttgttttttttattttctaggcactcacagttaagagattacctcaaatctgaaataaggctttggacttgtgaacagtattggaattgttgaagaatatggggacttttgaagttgtcctggacatatgtttgcattataagatgacaatgaaggctgccaggaaaactcagaaagtattgtattaccttttgacttgagttcaatccccaaagccaaagtgtggaaggagagagctgattcctgcaacttcttctgacttctatagcactcacatatatcgggcacatgcatgagtatgcacacacacacacacacacacacacagatcgaaaatagttgtaataaaaaaaattaaacagatggtcatgaaattctggaaagatgggttgaaaggtccatggcttcaaattattgtgtttggatgtcaagttttaaaggatggagttgtggttagtgttgattgttaactttatagcatctagaactttctaagaaacaagcctctggcacacagagatcatcttgatatggttatctgagataggaagagcctgctatgggtggctccattccttaggcttgcaccctggacttaatgaaaggaggacgcagacagagagccagcatttcccgtcctgt

SEQ ID NO: 23966 - DNA, 1177 bp, Mus musculus
gggctaagagttggacagacagctaggttccctgttctgagtccctggccaccctgcccccttaatgaccatctccattttccattttccaggtttgatcccttacaatttcatctgcgtgcagacgggctccatcctctccaccctcacctctctggatgccctcttctcttgggagactgtcttgaagctcttggccatcgccctggtcgctttggttccgggaacgctcatcaaaaaatttagccagaagcgcctggcgctgagtgaaacaagcgacatcggccacccagaccgcaggaaggacgcatgatgtgggttctgtgtttacagggcccggactgtgctgctggtccctttaatgtcctcattgtgttttaattaccctcaaaggatgagatggacagtgctctagtgtgtgcagaggtctgttagaagggcgttttgtcctgttcagcaggttctatgaaatggaccactttctagaaatcctatccagttatctgtcgggcttgcctcttgctggaccctgagatgtcttggaagatgatgctggtggcctttttggacaagctgtgtgtcctctgtgactctgttgaagagtgtcctctctacctttctgctgctgatctacctctccataagccaagggaaacatgacgggctgcgtaggtcttacacgcagcatttaagtgcagggattcctgcatttcccctgttcacagatacttctatccatgttgaagctccttgtagttatatgtcttgatagttaggctgattcaaacatgattaaagatgaacggaagccagccttgcaggttctgaatgtgttcggaggaaattctacccatctgaaggtcctgctctgtctcatcggaatcaaatggcctgcaaatcccctctacttcctcttgctgggcgaatggggtcactaaatgaggctgtcagccagtgtgctgagaatagctgaggaatagttgtacttttcaattcagagagaaagcagtgtggttgcctagtgattgcctatctgagagctgtgattgtgtcttccagctagggcactgggctgtggggctagcacctgagctgatcgctctgtggcctcggaccttgtgaggacaactcatgacaaggacttagcagaactccctctaagacatccatcacttgt

SEQ ID NO: 23967 - DNA, 1725 bp, Mus musculus
aggcttgcctgactagactgggagatttgtgttagctcactgacgagggtctttggtttccccaggcctcacttgtgtcgatatgatctcgtccttatggagaatgttgagacatccttccaacctatcctgtgctctcagcagcagatgtagctgctgttaagacctgtgggcagtgatgacatcaagatctctacagctataggctttcagtgcctcaccctatagcgtcctgaaggcttccaaagcatggggaagaaaaccaaggttattttcggctgtgttccaaggatgtcgcgtcacaaaaatgtcaaaggacctgcgattatgaaacaccactgggagggggggggcgccctaactagggcaagacagaaatagcccagctccctacagcaaagcactttgtctggctgcgtcccgaggccccacttgttccccactgtcgaatctgctgcctgtcataccacaccctcagggccgtggggcaagcatctaaatggtccctgtgcccaatcctctgccatctcggcgggaaccgaatggagaatgaaccagactacctcacagggactgtgggtggggagggccaggctgtgaagggtttggaaatcccttgggtcccttgggtggactactgtgaacatgcttttcttttgatagggtttggctcttacgtaaagacacacaatctctctttttcaacaccagctttcctcctggactgtttgcctcggggcgacaagaaggctctggcttagtccagactcttctgaagtgatgctgatggccagaggtattgggctgggctcatagccctgaggcctgtgcagctaagtggaagaaagagaaaaaacaaaaaaaaaacaaaaacaaacagggctagcattgcagcatgtggactgggcagagaaaaggctggaaggaaactggcctgctttcactcaagttgcgaaagtgttaattacaaggttgtttttctgctctgggattgagtatgctaagtgcactgagccctgctctcagcttcagacattttttaaaagtagtccttaagactgttttcttaaaaaacaaaaacaaaagctgggcagtggtggagcacaactttaaccccagcacttgagaggagaggcaggcagatctctgtgagtttgaggacagcctggtctatagagcaagttccgggacaaccagggctacacggagaaaccctgtcttcaaaacaaaaacaaacaaatgaaagttttctttccttcctattggtgcaatccatacttattccaggaaattccttaagatgtatagatgtaaaatacaaaactgtgcacagtcctgcctgttagaggaattaatgttaatatttagacttgtttctcaaacttgtggggctcagattcagagcatggccggctcttggggcatggaaactctgagaagtcttcccaggcctccctggaggcagatgtgacttcaaacatttctgaataacagtggcaaacagattaaggggtcacagggggccagggacagagggcaaaatgaaagtagaacaggtagagggtccagacgcctggtgtggaggtgagtgccccccacccctcatctgtgaccactgggggaaggtgtcacaggcccagggcccttctcttcattgaattgccccagctattgtaaagaaatggatactgtgagcaaatgtgttgaaatccacactgtcttagt

SEQ ID NO: 23968 - DNA, 1191 bp, Mus musculus
ctgttgtattgaggccacctgttggtcttgagtgactagaagttacctcacgccctcccacaccagtttcagttggagaggacagaagaagaaagctgggggtggagggaccaggaaaagagagatgtttcaaggaatcacaaggactccgggagagaagaaaataggaaacagaacctcagatgctgtctctggattgtgcatggaacacgggaaggggagccgtcctcagaaaagcatccagagggattaggggaacagctgtgtgggagcacatggtttgcatgcacgaggtcgggggtttaacctccagcacctaaagcaagaaaaaaaaaagaatttaaacatatgatgatgttcataggttactcccaaagaggatacccttaacacactctttgtacagggctctggtaagcggggactttgtcagagttcatgttgtggtgtttcacgactgtggaaatgaagccccgttcaccctgactaagaccaagaatcagttcaggcattatgggatgcatttgatttgccgatgatagtgtgatatagtgcttttccaaacctagtctctccagagaatctcacagcttcctggtgaattgagagactgagagaccagagcaaatggagggctagactctggccaggatggttgagacccccctgggcctcaggggaagtcacctgtaggatggaatcttactggccaacatgactttgtgatcttgttcaaagttagtaagtgaatgaaagctgagccgagtggggcttctgaagtccctagaatggggaagatcagagaagtgatgaatgctgttcattaatcctgacacacaggagactgaagcagatgaaaatccaattagaggctagcctgggctacatagctaattcaggctggtttgagtgatactatggaactttgtcaaggactggggatgtagctgggtgtagcttcatgcagaagataagttcctgggtttaattcccagccctaccgttcttttcctctctctgagggctttgccagaggagcgttttctaagctgactccctgctgcggggctctttccccaaccgggcctcctcctggagctgttctcagggtaacagcctctgtcagagtaacactggtgggaaaaagctacaggctgtggacaggagtcctgactgcatgatgggatgatg

SEQ ID NO: 23969 - DNA, 1211 bp, Mus musculus
catggcttccccgggtttgtcttggattcttttttcttacttttccccaaagccaaggctaccttaattatctaatttctctacctttctaggaaaccaaagtagttttaaaagttcagaatgtattattatcactatatattttaaaagcagtgtctatacgagagagagagagagagagagagagagagagagacagacagacagacagacagacagacactctcacttagaaggacagaggcttgggtttgccccaccctggaaatccctttctgatagagggaacggtatctttctcatgctgtgtgtataagtgactgcttatacaattgctggtttctatgctgatttccttggtagtaactaatgatgtcattgccaattggaggtcactgatcacagagctaggaagaaatggaccagatgtacccttaaaccaagagtttcattctacccaaatgctacgttctcccctgtgccctcctgaccacgtgaactgcagcgttcctagactctaattacagaaatttcccaaaccaggctttctgctactctatcccatgtgacctacccccagacctggactcaacttcctgaccacaaatcaattgtctacctccgtggatgcccccagttctctcctcaccatctccgagtctcaaatttagtcccagctgcgttgggagaattctgagtctcagtgttcttgcttgggtgtgctcactgggtcacggggtggaatgtgatctgtcacattcactattctttcttttttttcttccttctgaaccttccttttcaaaagccaatgcttattttgcacctacagcccatctcagttcacaccggcttcatttcaagtgtccagtggctacagggacctaacagttactgtattgtttgtgattggacacaagtcattgttatttcctgagaccagggtaggtcagctcagcacctgtttgaccttcaccctgctgtctctttgtcagtttcctctcttctgcttctcttctccaggtatagcttttggtttgacttttcattagcttcctccctccctccctccctccctccctccctccctccctccctcattccctccctccctccttccctccctccctccttcccttcctcctttcctccctccattccttcatatgtttggtgctgggatgaatccataatcttatggatgccaggcc

SEQ ID NO: 23970 - DNA, 1205 bp, Mus musculus
atgtagcccctagctgtcttggaactcattttgtagactaggctggcctcgaactcagaaatccgcctgcctctgcctcccgagtgctgggattaaaggcgtgtgctaccacgcctggcaggatttgggattttttttattattatttatattattattattatttatttatttatttatttatttatttatttatttatatgaacacactgtagctgtcttcagacacaccagaagagggcatcagatcccattacagatggttgtgagccaccatgtggttgctgggatttgaactcagggcctctggaagagcagtcagtgctcttaaccactgagccatctccccagccctgggatttttaaagaagtataaaactagaatttgactaaagcaactctaagagcaatgtgctccaagtgaagtctgtctgtggctacctctccccggctagtgtctacttagatctgaggctaagtttctgtgctactactcacctcgcgtactttatattcagggtgtccaaaaggatgaaagagaaaagtatcgaaagttattggagcgacttaaagaaggtgctcatggaagcacgttccctcccacggtttcacaccacaggtaagagaaattgctttgtgagactttttccttagtacagatccatttttttggttttagagcggtgatggtgtgaagagaactgcggtgtagtttgtctgacactgtacacagtgcttagacaacgtctgatattacacagtggctacagaatgggattttctgttagttttacagtcctttgcccacatgaattcttttttctttctttctttttttttttttttttgtttgtttgttttttgtattttgagaaagagtttctctgtgtgtagtcttgactgtcctggaactcactctgtagaccaggctggcctcaaactcacagtgatctgcctgcgtctgcttcctgaattctgctgggattgaaggtgtacaccaccactgcctggctgggtttgtttatttgtttgttttgattttttgttttgttttgttttgttgtttttcaagacaagatctcactatctagcataggctagcttggaatttatagttctctacctccacttcccacttgctgggattatattcatttgataccacatctaactcacatgaactcttactcatgtagcaaaaggaa

SEQ ID NO: 23971 - DNA, 2410 bp, Mus musculus
cccagccccagagatgtatgtagtcaagaagataggaattcaagaaggccgccttgactagaaataaatcccactgtgctttagaatcatgtgcatgggggctggagagatggctcagtggttaagagcactgactgctcttccaaaggtcctgaattcaaatcccagcaactacatggtggctcacaaccatctgtaatgagatctgatgccctcttctggtgcatctgaagacagctacagtgtacttagatataataataaatcttaaaaaaaaaaaaaaaaagaatcatgtgcatgatgtaaaacggtgaagcttatgtagaggacatgtgcattgttgtatttatgacacctaaaggctgtcgtgctgcacacaagagtgtataacactgtcgttcctttcagcaccagatgcctctcttccggaagaagatggtgtgggagatccttcaccagcagttgctgtgacaatgccccgcctggtcttctagctgctggtggttctttgatggatgtttccatatacctcatgcattgtgggttaaaaagtccccgatcatttctcttctctcacaggtactgagctctcaagagtgcatgaaggcctctccacaatggccctgactagaggtgtggaggggctgcttgaaaccctgtttctaaggctgtgcctgctcagagccctggactattcaccccatacaagaacaaatgctaattaatgtgttttgttttaaagcgttatttccatatgaatgtgggaaatgcaggatctgttatatgaattgttctgtgtgttcacacgaattcactctctcattgggcagtgcccttttcccactgctcttttataattagctataaataatttggactatttatttctgaaaagaatgttaatcaaactgccacttcctgctgcagagagatatcagcagggggaggaaggaggtgttcgctagcttctctaatgctggagtgcgaactgccgacatacagttaaggttctctcttttaaggcttgaaaatgccagaagaaatgacgatgctctgttgtaggatctggctgccttttagagagtctgatgctatgacacgggcacagttcgtggaaatgtggccaaggaactcgatctgtgcatcctcagaacggggcgtgcgcatcttagagactttcttttctagaaccgaagtagcttggcttcctcttgaaactggattcaaagtaactgtgagcatccatgttaagtcgtaggtctggtgagtgagtgtgtgagcctcaccagggaagggctggcctgagctgtctgctctgaagatgctcctcaatggaagcctatttttcctcagagttttttttttttttaatatatatatatataaagctgaaattaagttcttggctcatcagcatgccccactccagccccactgagcctttggagagagattagtacttggctctgaggttgccaggtttacaggcatctattttgcatatgaaagtttgtatttaacttttttgttcattaaaaatcttacaggtgtggttatgcattgtcaatttcagaaagttggtcagagcacattttgcaagatctagtgcctagtgttgcttttatgacgtaataaaagactggcagaacctagagtatattctgataatttttcctcttttctctgcctcaaccttccaaagttgttctggtacaaaaagagagagaaagagagagataaaattagaaaagctgcacacatgttagatacaaacgtacacgtctgctcttgggacgcctgggcagctgatcagaggttgtagctgttgaaacctgtttgctctgagacttgaaatgaccttcgttatggaagctgggcctgtgatggggactgaaatggctgagccaacccgagaccaggtggcctaaacctgaaagcgagcatgtggtctaacaattcaggggtaaacggtgttgtaacctcctcaaggcagactacacagggaccccttcctttatttagcctagaccccccccccccccaagcactgtgccagtgatgccgggatcaggcagctggtctaaccaaaagagcccagaagttgatcctgtctacactactaaaacctgggtgctagaattctacctgagaatttatgatcccggcctatcaaacaaaatagctacctgaccagagtttgatccccagtgcccacactggagggcgaaaactgactccccaaaattgtcctcagacctccatacttgcacaaaccaacagatggaccaaattagtaataagtaaaaaaaaattaaaggaattttaagggccttggataggtttgtttctgttggctcagtcctgcttggatggcgactttctctccccaggtgagtgatgctatagctaa

SEQ ID NO: 23972 - DNA, 2500 bp, Mus musculus
gctagttcctccccctccctcctgcgagcccctgccttgtaccctgcaggcttgcggtgaggtggagaggaattctgcccttgactgccaggcctgggggaggtgaaattggcctgagtatccaacttttccttgcccaagccctagaccctcggtttcctccgggccctcagaactgggattgtttcttccctgtgccctcccctcccctctctcacactcactcactctctcactgcagactgcacaacgcaagatcagggaaattgtacagcaggtgaagcagcaggagcagagataccctcagggagtcgccccacagcgcagcaagtgaggctcccacagcaccagcaagcaaccgatgaatgtagccctcccaacacctgacagatgagaccaaacagccagcagatcgggagcaaaccaaagagcatcccgaggagtgcgcagtctgcagagcagccagggcctgcagacctctacacatcctgggatccaggagggcacagggaaggccaggttgtccagaaacaccgcttggcctgcccccagcttcccctggcttctgcaggcataacagccatccactgcccatccaactcagattctcctcagttcccaggacgctatccctttcggttgaactaacataggtgaacatgctcaaagcaaagcaaaattcctagccgtttctttgttgtggaaagttgtctctgtacatgtatgtacatatcagaaggggaaggatgttaagaaatgtggcctgtgggttacacagggtgcctgcagcgttaatatattttagaaataatatatcaaataactccactaacaacaatttttactcagtgattaattttgttttctttttgaagagaaagcaggcttttctagacttccaagaataaagtattgggtgaggtccactggtatagaaaggaactttgagccacccacacaaaaaattcacttggagggaaatcttgtcaaggacacttaatggcagttgtgggtcacctgtgtctgtcaacagaagggataccgtccctgaggaggggccctaggccctggtcacctgtttctcccacacacccattgctcagtttcacaggtttttaaactgatgatttttggtttgttttgtttttgttttttgcatactgctatatagttctgtctctctccttatctccctcctaaccttcctctgtcttctttacccaaaattcttttgagtcccttcgttctttttctgctccccgtatctatgcacccctcccctccccccaggcaaagcagtgctctgaatatcataccacacacaaggaacaaatgcgaaccacacagaccagcctcagcttacactcggttactcaagcgaacaagagtcggcggtacttgtcctagcattcggaagaggaaagcaggatcccagcaaataaaccagccagccaaacaaagaaaaatcccacaaagaaagaatggactctctctccatcttggtatacaagccatcaacatttagtgaaattctttctttctttaaaaatttaaagtgcaggaaaatagcaatttatacgaggttgttggcccagggcgttaaatttacagattttttttaaatgagaaaaacacacaaataaaagctacctcaggtgttttttacctcagcaccttgctcttgtgtttcccttagagattttgtaaaactgatagttggagcattttttatttttttaataaaaatgagttgaaaaaaaaaaaagatgagctgccagccccaagcaggcggcagcccaggtgtgccgcagctcttctgtcttccgctagccaagagcctacgtggccttcttgtggacaaacctaaaaatgtttattttttaaaaagtgacaaagaaaaacagagaatattggagccgtcctgaatttcaatagggtacgtgccgtgagggcttttgcgctgaaggatgaccacatcctggttatgtgaagaaaccatgacactaccagactgcgatgccggtttcctctactgcaagcagtgttctgtgacaaaaaaaaaaaaaaaaaaaaaaaaaaaaaaaaaaaaaggaaaaaaatatatccaagctaacaagatcttggtgtcttggtgtcttattttctgagtgttgggtctcccagaatgtcagctggaggtttgggggaatagcaggtggacaattggactggacagctccttggctacctggctgtaggccgcccaagcagcctcacctgaaacgtggctgggttccagccctgtgggcggttgaggtgccaactagagggcagactgcatggcaggcgaagcctcaggctcagtgggtctcagccttcccaactaacgctgtggtcctttagaatggttcttcataaaaccactttgttgctacatcataactaattttgctactgttagtttgtttgcttggttgtttccattttttttttttttttgtttttgtttgtttctatgaca

SEQ ID NO: 23973 - DNA, 1175 bp, Mus musculus
tgtattttaattgttaggctttaagtaaaccctgctacttactctctgtaaggtgggcgggtctaatgcatcctcccaaaaggtgtttgtggggggttttgtttgtttgtttgtttgtttgtttgtttgagacagagcctcaagaagctcagatttgacctcaaaaccatgcattgatgcccttgtatttcagtcttccttgcctgtacctcctgagagctgagatgatcagcatccgctgtttatatggtgctgggaccacaccaagggcttcggtgtatggtagacaggtgttcttctgattcactccattcctagccccagaaagatactatttttttcgagacagggtttctctgtgtagccctgctgtcctggaactcactttgtagaccaggctggccttgaactcagaaatccgcctgcctctgcctcctgagtgctagaactaaaggcgtgcgccaccacgcccggcgatactatttttataataataaaaagtaccatttaaagaccttcagttactgtcaactgttgattataaattcgctgctgtttctgtaggtttttgctgtttttgtttcttagggttaagtcgcttcagtgccatcctggctgtgcgtgaacgtctaagcctgaaggatccttctacctcagcctctctcatgtggctgagataggcctggccttgctgtttctgagatccctctaatctccctgtggtagtgacttgtcattgtgacagagtattaggcagaggcagcctaagggaggagcgggttattttggttcagaataataaataaatctttaaaaaattatcttttaataagacatagtaatatctttaataagactgacatatgtctaagtaaaatatatagaaaatctggtttacccatgggaatgttctactttttgacattgccatctgcagagttcacacgtgagaaccattcagtcaagtggcctgtgtgagttaggagacatatgatgtgagattgccatagggtgattcattgttaaagctgaggtcattatacaatttctccattttatgtaagttagaaaatatacagaaagtgtttagtccgatttatgattatgttatcggtacagaaagactctaacatcacagctagagttcttgcccatgagaaacactgctatttgca

SEQ ID NO: 23974 - DNA, 1231 bp, Mus musculus
gacgcgcgaggaaagttgtcagccctagcgtgcagagctctcctcaaggtgcacctcactctggccccgcgcccacgtcgcgtccaccttgcacacaccccgcccacgtccgcgcccctcacctcccgcgcgccgcctggctccgccgctcccggccccgttggggccgccgccgcttccgcccgccgggcgcgcagcctgggagcgccgagccctcggagcgcgcggcgcgggacgggcagggcgcgcactctcggcggtgcacacgccgctccaactctcaggcgcgcggggtgcgtccgcccgccgccgccgccccggcaccgggaggcagagcaagcgctttgtccgcacgcccgctcgggactctgcccggaggaggcagccgcgccgagtccccgcctccgcctctgcccccgggcgggccgggccggccgcggtggggggagccaggctgagggcgagggtgggggcgggggcgggcgcaggaggagagaggagggcagcggaggcggcgggagcgccgggtgccgggccgggggagccgcgggctctcgggaagacgcggatgatgaacaagctgtacattgggaacctgagccccgccgtcaccgccgacgacctccggcagctcttcggggacaggaagctgcccctggcgggacaggtcctactcaagtccggctacgccttcgtggactaccccgaccagaactgggccatccgcgccatcgagaccctctcgggtgagcactcggcgcagcccacgccgcgcctcgccggctcgggacggcggcagcggggaggccgagccccatgggccgcgcccgccgcgactcccgagccctcacgctcactttcacgcaccagccccgcgactctcgcggcgggctggctccgggatggccggctgccctgcccccaccgcgggggctaacacagacccttgggcctcagagtcgaggcgaccctgtgcccctccgagggtccccaggctcgctggctccctaggagcgcccctggagtgcccagctgctctccagagcttcccccgcccccacctttgcagagtcccccgtttttctttttctagacccttctagtaccccctttgccagggacccccccaaatccagcatctctcctcctagccagaccttccttcttcccatgcctcgtgccaaagacctctcgccctctgtcgtctcccaagccgcactctccttttgag

SEQ ID NO: 23975 - DNA, 1193 bp, Mus musculus
cagccatcatcagagacgcctcctcctgcagtagacaacaagtacagagactcaccactggacaacgtacagagaatgagagaccttgaaacacttagacctaaatggggtgtctccactaaatccttcccctcagggctcagtgaactctgaggaagaagaggcagaaagattctaagagccagaggaggcggaagagatcaaggaaaacaacgttttctaatcacagcagaactaatgcacatacgaactcacagagactggggcagcatgcacagggctaagacagatggggtcccagggctgagaggggaagtggacatgagagcacacctctgcctcagaagctatgtccgattgataaccactcacaaaaggaaacttagtcctttccagcagtctcactaggtatacagaccacactgaggggctggagccaggcagacgggcaacacaagatgaacttagtggtagattgggaggaattttgcctcacggtgctttgtctttttctcttttaaactttacagctcttttgcttatatattttggtttctaattttgttgttgttttttatggttttccatgtgtgctaatgtatgtgtgcgtgcgtgtgtgtctcagagtctgtgtttcttgtgattattcattggtttttttttttctgtttgctttgttctattctgttttgtttttattttattattatcactgccatttgcagatgcctgtttgtattctaatcagagacagaaagaaagggtgtagacttgagggggtgggaatgtggaggatctgggaagatttaggagagggagctttaaaaatatatttccaataataataataataacaataataatcccagtaatagatcttgaaaatctgtattctttatttttttttttttgttttttttttttgttttttcgagacagggtttctctgtatagtcctggctgtcctggaactcactctgtagaccaggctggcctcgaactcagaaatccgcctgcttctgcctcccaagtgctgggattaaaggcatgtgccaccacgcccggctgaaaatctgtattctttaaaatgacatttattttgggagcacagcagtgcatgccacaaagcacatgtggggccggaggacaccgtgtggaaggaagttctcttctataccatgtaggttctgccg

SEQ ID NO: 23976 - DNA, 1213 bp, Mus musculus
ggggaagaccccacagcacagttgccttttggacaacacaggaaaactgccccaaacatgtttcagcagcatttgaaacaccaacagcagtgcatacaaacaagacagtggtgggagacgtgccaggccttcacctttcagcaggggtgtgaccaagttacagcaaaatggtgccaaagcgctgccacagcactgctaaaaaggccaggtgggaagccggttagctcctgacctggaatgcacacacctgaccaagtcctcacctcgaccttgatagtcaacagatgagcagtattttgtctctttagcactttttaacatggtttcctgcccacacctccacctctgggagaaaaatatattacagcctcacatgagtccaagccagaaatgggttacagggaaggaaggtgcctccatttctatcttgaaacccagcctgctctgggttattctggtgctggttctatgaacggctctcatgtccctactctggcacctcacaccactgggcttcctagtacgcaggcttgtgagggtgactggactgtccagtgtatgtctgctgcttgttccactgactctacagaaacaaaacccggtgggtgctagacagtgctggctctgcttgcaagccatgttgctgtggttgttacttatgtgtctgatccaaataaaggcagctgctgatttgttgttaaaaaaaaaaaaagcactttctgctcccctagacaacccagggaagcacgaggtacagacacacgcaggtaaaacacccatacacataactggttttaagttatttattttctgattataatataatttcatcatttccatcttccctttcctcatgccaagtctcccatatatctcacgtgttagttacttttctaatgttgtagagagacatcagagttaagagtctatgatggtggatctaactctggcggcaggaagagctgagagctcacatcttaatcctctgaggaggccatacctcttaatctcaaataattcagcaacagggaatcaaatattcaaacgtatgagcctatgggaaccatactttttcaaatcaccatcctctctgtgctttctttcaaatttatgaccttttaaaaattaattgttgttacatatataaatgtgtggtcatacacatacacacacacaacttgaatttatgttttcagggctgaccatttggtat

SEQ ID NO: 23977 - DNA, 1495 bp, Mus musculus
tttttttttcaggttatagaaaaaagaaacctcccatttttaatatgtgtgtttttttttttttttttttttttccattttaggtcgctactaaagcatgaagttgaagactttctgaaacctgccatagagctgggatattgtttgtggacaatattttctattgtctcctgtttaaaaagtgaacagtgcctagtgaagttaggtgacttttacaccttttatgatgactacttttggtggagttgaaatgctgttttcattctgcatttgtgtagttcggtgctttgttcaaagttaagtgttttcagaaaagtatgttttgcatgtatttttttacagtccaaattttgactgctgagaagtttctattgtaaaaaacttcatttaaaaggtttttctactgaatccagggtattctgaagatcgaagcctgtgtgtaaaatgctaccagatggcaaaaagcaacaataaacaagtttgatttttacttttctttctaaatatcaatgcttaaccagaaccattcttaagttatcagtaaaaaagtaaaaagttaaataaatgtctttcaggagtccatgaaacttgccatattcaatatacctgcgattaagtgttaaaaaatacgctgtaactctgtactgctagtattagaacaaaactcttcccatacagcaaatgcttaatgcttacattaatgtggatgtgtcggcctttatgtaatctgtattatatatagcagggaataagagctacagatacatgcctttaaagggctgtttcttaaggctgttacaaggagataatggtatttcaactaattatcagcaagtgacaatacattccaccacagatggactcttgttcttctagcgtttagactatatgaaaatactgggtgcttcaaagtatggaaggagcgaagggatcatcaaaccttgtcatggatgaagactgcctgttcattttttaaatatgattttcaggtcctttgcttaccaaaggaggcccaattcactcaaatgttttgagaactgtttaaataaaggcaagaaaaattgctgatgcaacttgtttttacaaagaagtgttggttttctttttaactgttgtaattaaagtcctgtagtttatttagtgactgatgcaatattgttcttgcttcaagataacattaaatctatttctcaaatatattggccaagtagaactggaatgaatgtttctctttggtgcgaggttgtattaaataacctcccaacatgtctgggtattttgcaaagcatgtttttagtacaaatctgcttctgtttaaggctgttaaaatgtaggacttactaaggggcttttagcactttgttgttacttagtatatacaggtgttccataagtgctacatattattatagtatccacttgcagaggcagtttggcttagattaatttgatatctaaaagcttcaagaatttcagaactacagccccagcactg

SEQ ID NO: 23978 - DNA, 2682 bp, Mus musculus
cgctgcagcagcctcccctacaccgaaggcttcgcttactaagtttctgaatggccgagtagccacaccctagagctagcagtcctcatccaggcaaccgagggcagtggttttgtttgtgttcttggctgttcctaaagcttgccctttgagtattatcaggagaacccaagctgtctctggattcgacaccctttaagacaaataccttggctcgggaggagtgggaacagggagagacaaaaaccaccacttcctggggagacgtggataccgtcctccttgccaccatggccagtatgtgcagagcagtactgcagtgtgttcagggttagcgcccatgaaaggggaccgagtgtatgacaatctgcgttgatcatggactactaaaatgccttcacacaggaggctttgacttgcacaattctttgggaagaaactgcacacccataggacagtcgataaggctgagtcggggaggctcagaccattgaggcttgaaattgcaaaactcttgtagctcattctgaaatctttcccctgtagtccagaactggggaggccaggagagccgttactcactccatggctctcagaccgcgttcctctttggccttccttccagccgagccgtcaccataagtaaatcaagtcccttcctcccagtcacacggctgagcgcagacggcttgttttaaaaagatgatgaacatgacagtattttgttttgctttgatttgggggggaagggttcatcttgcttttggaggttgttttggggaaaaaacagtttatataaactgatttttgtagttttggtatttaaagcaaaaacaaacaaaaaacaaacccctttttggtacctgcactgcatccctcgggtggggcagtgcctactttggaagatgctgcagcctgcgaggggatctgctggggcttccccttcgccacacagaagcctgcttagtgctttctgcaccagacaacctgttgaggcgtataacctgatctgtacatttttttaagtgtgcagggcagcctggacacagcttagcgttctacgtgtatagttctccatgctcactaactctccttctctgggaagcagatgtacatactacatacatgtcacatactacatacatgtcatgtactacacacatgtcatatagtacatacatgtcatgtccatttaacgactggtcacctgctggggacccaggcatctgccttgttttcctttttctttcagttttggactttggaccctgcacagccgttccccagggtctgaaacttacctgtcacgcacaggtagagcagtgctagctagcattactggcttcctgctactttttcgtttttttaaattttttattctgattgctgtattatattggggatgttctaaacaaccaaactaaagctgtgtacagattgggtttggagcggtggggacgtcagcaggaaacgccagtgctttgctgcctgattgacaggaatttgctgtccttgacactccacacattgtgttcctcacgtgtgggacaggacacagagctgactgagcgtgggacactccacagccttctcatgacttgtgaaggaggttcacaggaacgaggggtatgttttagagctatgagaacctagtcagcccacagaggcgtcaaacctgaagcttgggccttaattagcattgtactctgatgaaaggactctttcataagcatatttatagctttctaatctatacacagtctatccatagatgcatattttaccccaactggctagagatttatttgttgtaaatgctgtatagattttgggttttttttttttgttcttcctctcttcacttatactggtgtggggtttgttttagttttctttagtgaatttatgctgttttggggggcggattgagaagaatcttccgtagcctgagctgtccctcctgttttgacggcacatgtgccagtcaagggacatgggacagtcgcgccactttgcattcccacgggactcatgtacctcccgcagagccgtccccgtcaaggtgtggggctcctttcatgcatttgcttcttttccagagtgtggatttgaactacttccccctgcaaagggccgcgtgcaccctgccgagctgcgtatattctgtactgtgtacaataaagaagattgctttccttacgcattcctgcaacctgcctctttcttgcactcggtgttttcattttcaagtaagcaagaagcaactgggctttcccccaactcctgcccccaccttcagctattgaactttattggatgacggagttaagttagggctgaacatctgacccactgctagccactccaccccaagcccaccctgcctcccttaaggcatgattttgtttgaaccttggattctgtgaaaagattaactaggcaagaccttttttttgattccttttcttctaactcagcccctttggttgataattttaaaactgctaaacacaaagatcatttccgagtttttctcctaataggttttgttttggacaagtgaaaatatttttttgatggttcctcaaaagaagagcaagtttctcttttttttctctctctttctttctttctgtctgtctgtctctctctgtctctctctctctctctgtctctctctct

SEQ ID NO: 23979 - DNA, 1157 bp, Mus musculus
tcctgagttctctgagcccctgtgaaagggaaaagagaaatgaccccgagagctatcctctgacctccacatatatgtgcccttgaacatgtcgtgcacacaggataaaaataaaacattgttgattttctttaagtaaaagaatgctcctacagtccttagtttttcgtacaagcacagcctctgttgagcagtatggcctttgtctttaaactctttcaggattcccgtatgagaaggaccccaggctgtactttgatgatacttgcgtggtacccgagagactggaaggtaagacgcccccgcccatctgagggtccatgctaagtgagagggttggcgatgtcagagcgcctcagtcccgatgagttcgatgactcagtcaccagtagccactgcttccctgcaaatcctcagccgaaatgattgcatgcacacccctgtcccacacaggcaaagtcaagcaggagcccaccatgtatcgagaggggcctccttatcagagacgaggctctctgcagctgtggcagttccttgtcaccctcctggatgacccagccaatgcccacttcatcgcctggactggccgaggcatggaatttaagctcatagaaccggaagaggtgagtccgggcgtctccgttactttcctgttgatgctgtattatggcttacagtttcagttttagattttaaagtatttattttgtgtgtgctgatgtgcgtatacctggccgtatgtaggtgtgtcgtgtgtgtacagtgcccatggaagccgggaagcggcattgggtcccctggagtttggtggtggctctactctgtgggtgctgggaacctaacatgggtcctgtgcaagagcagagagcttttatttaactgctgagccatctttctagccatctctccagaatagagatgctttttcaaaaactcttgttttgtacgatgctggttgttggagtgagggttgctattctgcgctgctgtggtaaagcaccatgatgagaggatagtggggctgtttgtttctggtttggttttggtttatacttcacatcattgttcatcaaccaagctcagggcaggagcctggaagcaggagctgacacagaagccacgaagaagtgttgcttactggcctgctccccctaact

SEQ ID NO: 23980 - DNA, 1220 bp, Mus musculus
acatttagcaaagagcatgctcttaagggaaatatttttagtaagattttgggttgcttactacacagagaccatcttgtgaagccacctccgccctccaacctattcctttgcccagttgaccgcacacactgaaaaagtaaatttcaaagaagccagcgttttaaaaactgctctaaattatcttggcctggtttttctctccttcctttacagtcttgaaccacagatgcctaggaaacagttatcaaaacaagtgtttctgattggcatctctgattgctcagatagccgtcctgcctcgggtcctcacctggaatccttgtgtgatattttgagtctttgcgtttcacttcgcccttccttcctacacctttatttgagcaatcagatggtgtgtggccacaacagaaataactgttgatgccaactcatctgactgattaccagaagcgtctgccaggtgttgtagagggcgacaacaactagaaaccacaaaatgtccccaaatgttccttatgatcctttgaaaaccaaagcaagaatttaatctagtcttgtatggttgtggatgaattatctttaccttagtggggctaggaggggggcgatgaaagttaacacgacacagttgacaggtgtgtaaactttaaatcgtggccgatgttcacttacaatgactttataacaagaccgtttaaaacagtactggaatatcaaaacccatatggaaggtgggaaatagatcacctcctggcagctaaggctacagagcgtgacgcagagggaattatgtcttgctgataatgtgaagtgcaccaggttgtcataaaagtcagtttgccaggtgtcgtgcacacacctatatggtcctaacacttgggaggcgggggggtgggggtgggggggggcaggaaggtggggagtttaaggtcctccttaagtatatggggagttcaggatagcctatgctacatgacaccctgtcttaaagggggaaaaaatgtcaacattctttgcctcagttgtcaggtgctaattgaatgcttattgtatgtaaggtgttgagagaacactaagatgcttagggtgtgacccttcttgtccttgagaagtcctgctctgtggcaggcacgtgtcaagattacagttctcagactcattgggcttggttggttggttttgaggcgtggtctcactattactgctcctgtgtggac

SEQ ID NO: 23981 - DNA, 1099 bp, Mus musculus
accagagaaggcccataaattcccagcctcacccatacacccctgcacacacacacacacacacacacacacacagatcttttagaaggagggaaaaaggaaaccggaagcagaagctaaaattatcttggagaaaaatcacaagaagtgttaaacaagtcctttgacgccccgcgtttgtcacattaccgaggtacaaatattcccctgggctgtagcgatttcaccgtgttaatgacgtcatttcctggcaacaatgggctgcaaactggttttctgctgggcctggttactatgcaaatgcctccctggagtttaatggatccttctgtctgtctctttacagtgcctacgataggaagcctccctctgggttcaagccattaaccccgcccgccactcctctgtcacccacccatcagaattccctatttcccccacctcaggcaactctgcccacctcaggtctcacccctggagctggcccagttcaaggggtgggtcctgccccgactcctcactcacttccagaacctggatcacagcaacaaacatttgcggtcccccggccaccacatcagcccctgcaaatgccaaagatgatgcctgaaagccagtatccatcagaacagaggtgggtaccactctgaactaacttactctctcatgtccttttctcatcgggagagagaagcagttagtcatgttggccaggtacctagaaagttcctactccactaacgccactgacacatcagtgaagtgagactgcagatgtactgtgggtatgggctagttatatagcaccctgttcaggaggttctcagaatggtttctaggattgtaacctccttaggaagcctgggtggagggatggcttgcccagatgcacagtcaacccaccaatttctgggctcctcatgagatacagcctgtaaaactgagctttagtttacgctgctcctaatcatggtattattattattattctacttgcattctgggaagagtctgagttatgggagccattattattcacattttagcatagtgaactaagaatgttagtaataacatctgcttttttgaggtagaaact

SEQ ID NO: 23982 - DNA, 1197 bp, Mus musculus
ttaaatcagagaagatctgagggggtttagcagaacactgtctcctctgcttatgccctgagtcttgtgataagggggttaagtagtgctcagagaagttaccctacaccctgcaggtagataggcagaaagtagccattttaatattcttgccagaagggacagccctcgtgctacagtgtctgtgttagggtttgttctactttggggaaagggcctctttgaagcaatttagtatccaggtaagggcaaacttagctttctgtattctggagtgtggacgcacggtaaatccttcattttgagaagtcttgtttttctgccctctcaggctaatcctatgcagaatctgtagtgggtgtctaagcacatggcccagccacgtggacttacctcatgaattcaggagaagccattagcattgtcttagtccattttctgttgctgtaacaggataacccagcctgggtaatttatgaagagtacataaatatacgtgtgtgactataagtctgtccatgtgtagtttgtaaagtttattttggttctggttctggacaccgaggagcatctgctgaagtctttatgcaaagcagagggaacggggagtgcatgggaagagacgagacagtgaagcacactcatggaagtgaagaacgggctggagagatagcttagcggttaagagcactggctgctcctctagaggtcccaagttcaattcccagcacccaggtggcagcttaagatgtctgcaattccagtttcatgggggtctgacaccctcatacagacaatcggtcagaacaccagtgaacatgaaattaaaaaacaaaagtggagaccctgcttcgtctcttcatgacccagacacctcccttcagtgtggttacattgggaaacagtttcaaggggaacaaaccatcactgggtaccacgacttcttatggaagcctgcccttcctgataggctgctgggaatggctgggagcagatactgtggacacaaagttccccacagacttcctaggtggtcagccttggcccagagggccaccaagttggttttgtctttcgctctcaagtgttttgtaattcccctaagcctgcgtggtccttactcagaactactatttagtgacacttgagaaaagactttgaaaatcatatttaacttggaaagatgcttctgtataa

SEQ ID NO: 23983 - DNA, 1164 bp, Mus musculus
tggattaggaggtgtggccttgttggagtaggtgtggccttgttaaaggaggtgtgtcactgggggtggactttgaaagcagttttctctcctgctgcccgttattctggatacagaattctcagctatttttccagcactgtctgcctatgtggcgccattcttgatgacgatgggccaaacctctgaaactgtaagcaagccccagctaaatgctttccttcagaggagttgccatagtcgtggtgtctcttcatagcagtagaacaccgtgacagctatttagtatagatctactcctaccctactccttcccctgccaccataagaagtgtcaagccaacatttccctctttttcttctaatttctcccttttgaccacaatttttctgaaaggacagctcaaccttacttgcatgtcttactgtctagattagggcccaggctagtttacttaaagccttgtcccatatatgctacttggagatgattgtagtatattctctaatccatcagccattttgggggtgtctcaatactcaagtggactcatttgtcatgaggcatgccactccataactcgaggaaaatggccaccttgagatccacacgactactccttcagacatagcagatttcgtggtatgccttttacccacagcacggatagtggaagtcctggcatcctctgccacatttggaagtgttgttccggtggagtctccactcttaaacagccagcttcaaagacaatgcaagtgctcctcacaaagtcatctttggttccgtcatgttgcacgtttgggcaacaagcattgtgtgaactttttctgggagtacgaatggatatttttgttcatgccaacaacaatttaaaaaatgtgtacgagtctagaatggtaaccaatgaattttttggagttacttacgggaacatgagtgatgggggtttagtaggagcacgggcagcttataagtgactacaccttgaggaaagttgctgcctctcagcagttgttcactcactgcctatatagcttcagagagggctcgacttctgagccttgccatcctagtaactattaactgcctgaggagcctcagggaggggcaggcctcatgagcctttgcaccctccatggtagaacaccaacatacccaat

SEQ ID NO: 23984 - DNA, 1671 bp, Mus musculus
tttagagctgggagacatggctgcaggccttctgcaaagcaaagaagccccgctgtcgctgtgctcacttgagggctctgtgagctgggctgtgaatcgagtcgcttaggtgaagaagccaggccaaactgaagggaagatgcgatgtcagtgggagggacaggaggctcagggtgaacttctctgcgccaactgcacgtgccctgctctaagtgtttaaaacgataaggaaatgggtagaagcggtgaaagctggcaaaagggcaaggaaggaggagtggagtcagctggggtgattgtcttccccctttttacctgatctcatttcccagggcttcacaagatggggggaggtgggcttgactgaaagaagtaaggcatcacacatgtgtgtttggaggtgtccgctgtgaagttggaagctgcagagaagccacgttttcgttaatgaagccatttactcgttctttctgcaggtatcaagcagcttctcaaacaaggccccgtgcagaaggtgtacaacgggctgcagggctattaggagcgaagagaactggactttgaaagaggtggatcagcgatatttattatctgcagtgggtttttgtgtgtgtgtttcattattttcaatatgcaagtttggcttagtccttttttccctgatgaccgtcctgacaagaactagaggtttgaggctctgtctattgcattcagacaacaatggccagcagaaggttacctaatacctccccctctggggatttaacgtctggtgctgcccgaggttcaaggagtaacgtctcagaggatgcccgagcaaaggaaaccagatgagggttagagacaattgttagctatttcaaaatgccaactggagaagtctgtttttaaatacatcttgttgttattttttttttcttgactcctgtttctttttcctgtgagccgatgggaagtcttcccatcaggcaggatggccacacagcatgcagaggaacgatgagagcccggctcccaggccccactaaacacatggtgtctatagcaacgagctcgaagaaaccgagtagactagagactgagctacatgaattaaagttacacaaagacctcactgtctttgagagaacatattttcccgttttctttggtaataataaaatctgatatgggtattttactgtttagaaggtacttttctgtatctgtccaaggtagccttatgagctaagatggcagctttagagaataaatattagaagcagaattgcaggtggctttgtcttccagtggcacagactcagacgccagcaggctcagcacacttgcctttcagtctcctcctccgctgctccgtacacaggacttgttgccgcagctgagtatttcattcagtgcgactgagggttactgtggcagtgtgggagctgctttggatgtactggtgtagtccagcgcccctgccctctgtgcagcagctggtgtggttgagactgtcaagaatccaacaaaccgcagaaacccagacctggattcagccggctttctgtacactgtatgcacatacaggggctcagtgtgccttttgcacatctgtaaacactttcaggtcagtgggctttcacacgttatacacaagtagaagttcagtagggtatttttacattatct

SEQ ID NO: 23985 - DNA, 2100 bp, Mus musculus
agccttatttataatagccagaagccagaaagaacccagatgtccctcaacagagaaatggatacagaaaatgtggtacatttacacaatggagtactactcagctattaaaaagaatgaatttgagcggaggtcgcgactgagccccaggctggcttgtgggggctgcagcgggcgcgagggggtgtgaggcaggcacgggccgagacgtcgaccccggaccccgcttggtgaaaacagattccagcgctgggctctgcctcccccccccccccgcccccccaatggaaccggcgctcactggagcccagattctctttgttccgcagccatttcaggcccaggacgggaggcagtgccactttggcagaaaggcctgagcgccagaggcctctgggatggtgtgggaccggcaaaccaagatggagtatgattggaaacctgatgagcagggcttcagcagatcctgcagctgctcaaggagtcccagtccccagacaccaccatccagaggaccgtgcaacaaaaactggaacaactcaatcaatatccagattttaacaactacttgatttttgttcttacaaaattaaaatctgaagatgagcccacacggtcattgagcggtctgatcttgaagaacaatgtgaaagctcattttcagaacttcccaaatggtgtgacagacttcatcaagagtgaatgtctagggctggtgagatggctcagtgggtaagagcacccgactgttcttccgaaggtccagagttcaaatcccagcaaccacatggtggctcacagccatctgtaacaagatctgactccctcttctggaatgtctgaagacagctacagtgtacttacatataataaataaataaatctttaaaaaaaaaaaaagagtgaatgtctaaataacattggggactcctctccgttgatcagagccactgtcggtattttaattacaaccatagcctccaagggagagctgcagaattggcctgatctcttaccaaacctctgtagcctgctggattccgaagactacaacacttgtgagggagccttcggtgcccttcagaagatatgtgaggactctgcagagattttagacagtgatgtcttagatcgccctctcaacatcatgatccccaagtttttacagtttttcaagcacaggagtcccaaaataaggtctcgtgctgttgcatgtgtcaatcagttcatcatcagccggacccaggcgctcatgctgcacatggattccttcattgagaacctctttgcactggctggcgacgaggaagcagaggtgcggaagaacgtgtgccgggcgcttgtgatgttgcttgaagcccggatggaccgcctgcttcctcatatgcacaacatagtcgagtacatgctgcagagaacccaagaccaagatgagaatgtagctctggaggcctgtgaattctggctgactttggctgaacagccaatatgcaaagatgtacttgtaaggcatctaccaaagttgattcctgtgttagtgaatggcatgaagtactcagatatagatattatcctgcttaagggtgatgttgaggaagagaccatcccggatagtgagcaggatatacggccacggtttcatcgctcgaggacagtggctcagcagcatgaggaggatgggattgaggaggaagaagatgatgatgatgacacgatttctgactggaacctgagaaaatgttctgctgctgctctctcgatgttctcgcaaatgtttatcgtgatgagcttttgccgcacattttgccacttttgaaagaattgcttttccatcatgaatgggttgtgaaagaatctggcatcttggttttaggagcaattgctgaaggttgtatgcaaggcatgattccatacctgcccgagctcattcctcaccttattcagtgcctttctgataaaaaggctcttgtacgttccatcacctgctggactctcagccgctatgcacactgggtagtcagccagccaccagatacgtacctgaagccattaatgacagaactgctgaagtgtatcctggatagcaacaagagaagacaa

SEQ ID NO: 23986 - DNA, 1547 bp, Mus musculus
gggagcgggggctcagtgtggacccactgtggcaccccctcctgccacatcatgctgctgcattccaaaatatatcagttataaccccagatggccatgcatgaatgtccatggtcaaactccatgtattcctgctgcaatggaatgcaatgcagacccaagaaaggctcgaggagtctcttatgccatgatgtggaactgatgtcccagatacgttggctcagtggttaagagcgttggtttatctagcaaaggacccaggtttatttcccagcaaccacatagcagcccacagctgtctatcactccactctcagtctcaggaaatctgagtccctcttcctgacctcagcaagcaccaggatcacatgtaatgcacgtacatacctatgtgcaggcaaaacatcatacgacccctttcctttcagcggtgcagctgcaagatggcagtgtagatttccaagaagaggaaggacacagaatgttcttggggagaagggtcgttggatcagagagttgaccacagttggccagaagctctttggcttccctgaaggcagtgtagagctttatacagagaaagtggccacaagaggtctgtgtgccattgcccaggcagagtctctacgctacaaactcctaggggggcttggggttcgaagggcctgctatggtgtgcttcggttcactatggagagtggggccaaggactgagaggttgtggtgtctgggaagctccaaggacagagggccaagtccatgaagtttgtggatggtctgatgattcacagtggagaccctgttaactactaggtcggcacagccgtgcgccatgtgctcctcagacagggtgtgctaggcatcaaagtgaagatcatgctgccctgggacccaagtggtaagattggtcccaagaagcctttgcctgatcatgtgagcatcgcagaacctaaagatgaaatcctgcccacaacccccatctccgaacagaaggatgggaagccagagccaccggccatgccccagccagtgccaacagcataacagggtcttggcagctgcatctagaggctggatgctaccttgtaaagacatttaataaaatcttgaacaaagacaaaaaaaaaatcatacgtgtaaaataagaaaatctatttgtaaacaggtccacaaacgccttttcctattaacctttctttcccctacctctggagggttgtgggctaggagggaggttgaagtgttaaagaaccataattaaagtaggttttgaaaaaaaatctaagcttacagagaagccctgtcgtggaaaaccaaaccaaccaaccaaccaaacaacccaaaacaaacaaacctgaataccagctacaaagaaagttttagcatggtcatgagaatgaattcagatgttcaagaaatatcacttatgatctaattaattcccatttcatgtaggcattctcctgggctaagggaaaactaaccctagtccttcctggagtcccttcagcctgcctctccccacataaatttgtaacgctgtcgta

SEQ ID NO: 23987 - DNA, 1117 bp, Mus musculus
gcatatataatagtgcaattatgcctttaagcttagtcttagacctaggttttatagaataactaccatttttggcttttagatccaaaaggtaattttggctcttggagattatatgggagcaacttgtcatgcttgcattggaggaacaaatgttcgaaatgaaatgcagaagttgcaggctgaagcccctcacattgttgttggtactccagggagagtgtttgatatgctaaacagaagatacctttgtaagtagtgaatcttaatggtccttcttatcaaaaggttatgagaacttggtgatgcagtatgactttcttattaacagctccaaaatggatcaaaatgttcgttttggacgaagcagatgaaatgttgagccgagggtttaaggatcagatctatgagattttccagaaattaaatacaagcattcaggtaaagtttatttcttctatttatttggggttaggtttcatgcaggtacagttacaataaaactgaagtgttctattgtcgttccccctgcttaaagcatttgatacattactatctctgcctagctctaccatactaaggcagagacgcttggtttcaaacattttcccgtctagcatttgctaaaaagattatacaaactaaacagataaagacaagcattttattttttaaaggttgtgttgctttctgccacaatgccaactgatgtgctagaagtgaccaagaaattcatgagagatccaattcgaattctggtgaagaaggaagaattgacccttgaaggaattaaacaattttatattaatgttgagcgagaggtaattttgttacaagcttttttttttttttcaccttcttgtataagcactgtgctaaaattgcaggaactaagattctatcttggtttttgtaataatgctagcagagtacacacaagaagaaaagtaactgcactggattgcaaagactggggtggacctctttcttaatgtccagtgtcctatgtcataagattcggtgcaataagtatttagaccagcaataaatactcagcttggagatcatcatgatctttgtgggtagcatatcagatactacagtcaacagttacgaa

SEQ ID NO: 23988 - DNA, 1117 bp, Mus musculus; identical to SEQ ID NO: 23987

SEQ ID NO: 23989 - DNA, 1879 bp, Mus musculus
agtccctacccacattggcaccaagtgctgccccacaggagacagcagattagtcagataggctggggctcttttattttattttattgttttagctgtctactccctaaccttctcctaattgctatcattactctcccttacagcaggcttccctcccaaattacttttaatcattttctgttttgcaattaccccaactttcgctgaccttatgggcccccccgccccccatgaaaggtctctcagggcatggggaatatggtttctgggacttaggttagaatcttaatcataactgattctcacaaggggtgaggtgtgtgatcacagattgccctgctccccctgcaagggagtagcattggtctctgggcagggaggacccaccctgtttggcaagcatactctcacaaggattttctgagacctctctacctggtgggaaaccacagcagcccactcagcccctggtgtggagtggttcagtgacttacagatcagaattaatgctattgaatcaaggtcactgagacacagtctactggattcccaaggctgtgctcacagggcttcggtgtttcgagctgcagacccacagtctcagagctcagaaacttgtttactgctgacccccttgccttatgcgggcaatagaaagcccggagtgaaaagccctggctttccaggttgacccccacttcctcactgtgccactttgtttccatatctgtaaaatgggggtgacaatcctacctcacaaggctgtgtggggaccgcaggaaaacatatatctgggctgtgtgaggaccactggaaagcacgtggctgggctgtgtccacggtgcataggaagtaggtaccctgatgtctttccttgtttccttatggagggtcacacccatactgggccttgctgcaggagagggcagtagagaaaagcagggcatcctttctgttgtgaggcatctgcatcatttgcaacgtgcaggagcctacctgtcttgctgcctgcacctcagggtgtgcagagcattgggctgcttggccgctgtgggggttaggtctagggaattcctggctcattataaggcatcaggactgtggatagagtgcccaggaagctgatgttccttcaagaggtcagcaagaggtacattagagatggagactacactgggtagattctagtttttagttcttattaatgtgggggagtaaattaataagtgtaatatgattctgatgtctgttagactttctctgtgctctgtaaatgtggatacttgagtaaagtggactacggagtggatgtgggcgtcactgttagtctgatgaggtatttagtatttgcgacaggtagtttaaaatctgtgactgagtgctataggaaagtgtctttctacgtgggcactgacgtcactagccatctatgcatcctaaatgcaggatcctcttgattccttctgccaatcaaatctctcattgctcttggtttccgggtttgtgtcagaaacttttaaaacatacctgttaattctaaattatccaaagattatgtgcaaattttaaaataaatatctttttcagaaatctgctgcttctctttatacttttctaaaggtaatgactgattgccacttatgtgtcccaaggagacacgtctggaaatcgagtgccctgtacttcaggagtctctggcattgatctccctcttcaacactccaggaaaaagtttatatatttactgtgatggaatctcagagatattgacagcttattgattttttttttgcccattcactcttgctagatacaagtaacgaagctatcatttatcgcacaccttaggagaaaggagaaatagaatagggtaaag

SEQ ID NO: 23990 - DNA, 1156 bp, Mus musculus
ctgcctttatatgttacttgacctttttcctttacccctttaaatattctttctttgttctgtgcatttggtgttttgattattatgagacaggaggaatttcttttctggtccaaactatttggtgttctgtaggtttctagtgcgtttatgggcatctctttctttagattagggaagttggttttgtttttgtttttgtttttgtttttctgattttgttgaagatgtttattggccctttgaaccgggaatcttcatcctcttctaaacctattattcttaggtttagtcttttcactgtgtcctgaattccagaatgttttaggttaggagctgtttgcactttgtattttctttgactgttgtgtcaatatcttctatggtatcttctatgcctgatattctctcttctatttcttgtattctgttggtgatgtttgcatctgtgactcctgatctctttcctaggtttttcatctccagggttgtctccctttgtgatttctttattgtttctatttccatttttaaatcctggacagtttgttcaattcctttacctgtttgattgtgttttcctgtatttctttaagggattcacatgtctcctctttaaggacttctacctatttatctgtgttctcctgtatttctttaagggagttaactctgtcatccttaaggtcctctatcatcatcatgagatggatttttagatcagaatcttgcttttcaggtatattagagtatccaaggcttgctgtggtgggagagctgggttctgatgctgccaagtggcattggtttctgatgcttatgttcttacaattgcttctaaccacctggttatctctggtgtgaactggcctctccctcctgtaagcctggttatgttgggcctccttgggtcaggctgtgtcttactgtgggagagggtctggagcatttgatttgtgtgcctggttgtggctaacctccttagagtcaagctgactgtgagtgtgggcagagtagtaggtgctggagcaaaaatatgttcccaaaaaagttgcagaccagaaggaagatatgtctccagcagggaagaaggtcctgtgtcttctggaccctgaggctagaaggtcccagttagatcaggtgttggggtggaggt

SEQ ID NO: 23991 - DNA, 1236 bp, Mus musculus
gatgaggattatgtatcccaggttaataaactcagtcttagtgttaaggtgtccaaggtccaagtgattgtctgtctgtcactgtcttcaatgatgatttcagatgacgacaaccactttcactgcagttggggtgagaatacttgagtaggatcccttccgacaggttccagggttcaggaagggatcctctttatcccttccatgtctcctgggtggaactggtgggtgagttcagaagcaggagatggcaggactgactccctttacaatttggtcaataccttgcaagcttcttgcaaagcatgcagggatttgagaagggagtgattatacatttctgcctaggaaatctctcagagtatggggaggggtggggggtgtatctgaaagacaatttcaaaaggagacagccctttctggtaaggacctcactgggccctgaaaagggcagaggggaggaggttggcctgaaagtataacaaagtaaaaacagaattctaggcctttaggcccaggcttgggaatgtggcctttgtaaaggtatactaatcataaaacagatagcaacattcctccacccacctgcttcctgggttcaaagagtgctcattcaaagaaagtcaccctgaccattaccagaacctgcgatgcaaatgtactattgttaggggctcttagaagctgtcttgagagttaacaattaccaggtattccttgtgactcttgtaactttgcacttccttgtgacttttaactggtatctttggtatcttccaacaacaccctccccacttccttgagttgtggtttcttcctttaaatacccccttacccagctactcggggcgccacggtcctctacccctacatggtatatgaccgtgggcccgagagcgctcttaaataaaaatcctcttgcagtttgcaacaagaccgtttcttgtgggtgattttggggtgtcgcctctcctgagtcagaatgtgggggagtcctcacgttgtgggtctttcagacccaatttttgacagtttccatgagcaatttgtttagcgtctccttaagacttttactcttctgttctacctgacctaagctctgtggcctatactgacaatgtcattcccaactgttttatacccttttttttagattgtgagacaatttggccatgaaggccaagccattattggaccccaaagctaggggtggtccaaactttggaattatttcct

SEQ ID NO: 23992 - DNA, 1190 bp, Mus musculus
ggtgttttacaagaaatgggattttgtttcctcatgctaagaaattagacataaatacttaggtaggtctgagaaaaatatgtatgtatatatatatgcacatacataagtatgtaatgaaatactttgggctgaatttataaattattttccaatttgataaaaattaatgtgaattctcaattgctacatttcctcctagtgtttattttttcctgaagccttttattgtaaacaattccagtttagaatgttgagagcagctgtagccctatactctccactttagaatgttgagagcaactgtagccatatactcatatcttttattcagagtcgtctgttgtttatattttgtctcttcaggcttatcatgtccccacctgtgcttctgccttttctctagtttatatacacatattttttgtgtggagaatttgagaataaacatgcattgcttcatgaaattttgggtaggatcaagtgagaacaagttgtaaaaactatgtgtggtgctctacccttgaatgtggcgtgtggtcctgtgaatgaggcaggtggggatcacctcgtcctctctgtgtggtgactcagtgtggtgtaagctactggctgcgcctccctcctcggctaacccacttacattctccatggcatttcctctttcagtgcccaagccggcctagactgatactcatctagctgtcatgtcttttcagtctcctctgatctggaacatttatttctccattctttatatttcacagtgtttgcatttctctacaaagtggtactccgtttgaaaacacatccttcataatagctaattatttctttatgtttaatttgaattgtgcattcccttgtgggttgagaccccttggggtcgaacaaccctgtatcacagaggttgcctgagaccatgtgcatattagattatgatttataacaacaaaactacagatatgcaatagaaacaaaaataattttatggttgggggttaccacaacatgaggaactgttttaaagggttacagcattaggaaggctgagaaccactggtctccagacctttgtgaagatgttgtgtgtccctagcgtcatactgagagactcagaatgtgtattggtggcactttgccaagatgccctgtgatttgtccactatacatgcctgctatcccgctgt

SEQ ID NO: 23993 - DNA, 1144 bp, Mus musculus
ttgcacagattatactccgtcccattcacttctgcattcctgagacttttaatcctcatgtttgtctcacttctcatgtggttgaatagatttttagtgtggtatttgctgtcacatgatttttcctgggtgaatgtgccagcctgcaggtgccttaagtcttgtcctgtctgtcacttttcctctggctgtggctacaaaaggcagtcattctgttaccaggtattgaaaaggtgaagtttcccattgcactacacccctgacgtctcttgctaaaataatggtagggggatatttttctatgttaagctataaagagtttatttgaaaaagttaacaggagcccactttagtctgcaactatccaaattcagcagtcaaggctcattggaaaacattgattagccaatatctaaaatgtggggaaataaaaccaagtttcaccactgtgctaaagaggcagaattctaggtgtatctggaaggcccgttgtatttccacaatcccaccctgagagttagctcaccacactctctggatataagactgtcaggcttgcttttggtacatttataaatctatccaactcttcatccttaaagcactgtgaaacttcacctaatatataagcatggttactgcaattaatatttatcttcagaaagataagtattaaaatgaatcaaattcttatctttctttctttcactttatagtgacccaaacctaaatctcttttgcctgaaaattgcaaatcgggacacataaaatgaaattataggaccatgtttcatcttctttaaaaaagagaaaaaaaagctgggaaagattgtgaaaccagagtttattattcttacaatcctctgtaactcaagtacatactgcaggagacattttcctatcatcaacgtgacattcacaccacactttcaaagacaatcgctgaaaaccaaattgtctttctgaggtaaaaatatgcggaatgcctgcctggaatctttatgcgaactcttattagccagtgaaacacttgcttgccaactggagccagttcgcttcgttaagaggagacacctcgctttgcagttgcagttggccattattgtaaagtcagtatctcagaatgagatttctcaaagctttc

SEQ ID NO: 23994 - DNA, 1306 bp, Mus musculus
ttctacttcaagtgatatgtgttccaaactgatatgtgtcccagatgaaatagagactgatctaatcaaaaaaaaaaaaaaaaaaaaaggtttggcagggaagcagtagcaaaatcatttctcagtgactgtcctttacccatgtgtgcacttgggacacctggggacactagcagactacctaagacatctttcctcatgaatgaagggtagaagagttcccctctaagcgttggagtcaagtctttactcccttccagaaaatatgtcaaggagaaaatagaattatagatggcacatgactgtctggctcttgtcttaagaatgctgtgtggaattatgtgccttacgcaaaacctgaaacttagaagccaagttttgtgcagcggaagggagcactgagctctgtggtggctccgcgaagtgacttagcctgggttttgcattgccttgtctggatctatgcctttatcgttacttaacagatttggggcttttctttctttaccgctaagcatgggcatgtgtgcaattatgaggtgaactttctaagtagtaagcccttgccacaaagtagacgttacacaaaggcacagagcccagggatagtaatcttgcctgagctgctcgcacaggcttcttattccatggctttgtcgcaggcttttctctttctgtgccatcacctttgagaaacatgattgcaccttctccaactctgcctttttaacagcttcagttgagttggcaagactttcccagctctgaatatagccatttcccgactccggcctctgcgagactgatttcaaatctgtgatcttctgttcagcgtacacatcagcaaagtgagaagttgggtgctaaatataggctctattaactttacttttagatgtgctgccttcaaagagtgcctattctgagcaacgtaaacgttattcctacatatgtatgtacacacggtacccggactcacactgttcgggcttcacaaacaccatcagcaggggtaggtgctgagataaggaagcatcgccaaattgaagagggtggctcatttccaatctccccttcagtggctaccatgaaatgggctaaaacaagagtctcctgcacttcctgctgacacagccactttgcatttatatcccaggaatagtggcaaattgctgaggaacccgtatttcatggaaataatacaatcatgaacatttcatcaggagagggaaaggcaattaatatgtgtcatgtgtgttttaaaaactaagtattgctaagttttgagtgtcagcaggtttctttt

SEQ ID NO: 23995 - DNA, 1460 bp, Mus musculus
cctggagctctctctgtcagcgacaggaactctaggtatttttgaggaggcagcagcatagcctgggagggtgagtggttacccagcagtcgtgctcggaggtgagccaggtagatgtgctgaggtacatggagataccgtatgatcgtacaagggttgaacggaggacatgattccaaaaaagattgttctcaatgtgtcgtctgactcaaccagctggcagattacacttgccaagtcgcttcctttccttctaagtcatttggctccatattcccttgaatatgcctgtgaggaaagtaagatgtgtcgccccatccacttagccttcctgaaaggacattagtgatgccctagtggtcaccaagctaccatgaaatgccaccactcctactcagttgtaccaaatgcaagtagaggggacaaactgtgggagacagatttagtgccatcgtggttgtctgccactctgcccagtatgatcccagcaacccacgagatctgaaggaacaggactggtgagtagctttagggctatggccgtacttctttaggaacgtcatgattggagtcaggttgattttttttttttctttttagaggtgggcagtactttttcccatttctcctgttacctatcttttgatctctatctaatctcaacactaataattttctgctgttgacctgatcagatttcagtgctagaaaagaattctaaaatctcttgtgtgctgtcctcaagtctttgggatacacaggtactcctccttgggaacaaacaaactgagacagacacagtgtggccttgctctgagtttcagtctggtgacttgtggccatgagagagagcttgatatgaaagctaagtcatgtttaatgggacagggtaaggacaggagagaaaagctgttaggctttccctgtgctaaacctatctcctgggagcaggcacttcctcctagctagccaccatcacagcctcaccagcagcagcctcaagactcagtaacatttccaacttaggaaaagctacacagacgcatagaggatatgacattgttcatctgcatgatcctgacagagccttggtattttcacagtgtaagcaaattgcatatctttgctgtctcataaaccatcgctgacatccccacgggagcacacataatcctttctgaaaatcagaagttgtgttacaagaaagtggtttgggtaatttcttttgtatttacacattattcaattatattaaaacatgattttatttacattctatcagttttgattgtgtttccccagtgctcaatgagaataaatatgaaaatcacagttttttctgtaaaagaattactttatatttaaaaatccaataaacttctcattccacttaacttgcctctgtgtggaattctttcggagtcagatgatctctgtttccttttaagcccagttactgt

SEQ ID NO: 23996 - DNA, 1118 bp, Mus musculus
aagtcaacacatagaaggttacaaaagtaggctcggtgggtgggtgggtgggggcctactgggctttgaaatgtaaagtgactgcccttttcttagggagataggaccattatatatgactactgtttacaagactcaccttagacaggaaggacaaagagtgttttgtgattctgttcaaaagtaaaagcaaaatacatacaaactgttttagggtttctattgctgtttaagagtcaccatgaccactcttataaagaaaacatttaattggggttggtttacagtttcagaggataagtccattatcatcatagcaagaaacatggcagcatgaagctagacagtgttgtaggaagatctgagagttctggctacatcttcattcacaggcagcagaaggagactataccacactgtgggtagtttgagaattataagcctgtagtctcccctcccccagcctgaaacctgcttgctcggggtggagcttcctgctcattcgttctaccacgcccactgctggaacctgaggagccacacacgtgcacctttctactggaccagagattattcggcgggaatcgggtcccctcccccttccttcataactagtgtcgcaacaataaaatttgagccttgatcagagtaactgtcttggctacatttcttcttttgccccgtctagattcctctcttacagctcgagcggccttctcagtcgaaccgttcacgttgcgagctgctggcggccgcaacattttggcgccggaactgggacctgaagaatggcagagagatgctaagaggaacgctgcattggagctccacaggaaaggatcttcgtatcggacatcggagcaacggacaggtacacatgctagcgctagcttaaaatttcagttttgtaaagtgttgctgaggatgcggtaggatacgaattaagcttgaatcagtgctaacccaacgctggttctgcttgggtcagcagcgtgttaatcggaactagaaacggaaacaggcaggttagccgcagctttttaggaagctgcttaggtggaagaagaaagggtttaaagtcatggatcaggcggtaggccgtagctctccgaagctac

SEQ ID NO: 23997 - DNA, 1233 bp, Mus musculus
cacatccagatgtagattcacatgctgaaatcaagggaagacccttggacctatagcatcatgatgatgatgaaacactttaactgcagaaccaaaacctgacttaacctgaaacagaacttacactttaacaatacccccaggtgacccaagtgtacttttgagtttgagattatctttttctttggttcttactattttaaaaaaaaaaatctttctattgtgtattcctggcagaaattttcttggcagtatgagtgaaacatttgaatctatcctgacagaaaagaagaaatacaccatgcttgaagattctaatctaattcagcatgctttgagaagaaacacataatctttatttttaatgactcatggattttgttaaacaaatttaagggatgatcaatatattgaacctaaacatggcttacttgttgttctttttaggtataatttggtcagtttcattgtctttctcaatttaggttctaatgtattagcaggtatttttctagaacactgagtagaaatttcttgcctgacattagccactagcacctgtgatgttcatctctgttcacttaagtcataaggcagtctttacctgcttgctacaggggcggctccctgacatgagagtagaatatacatcaggtgcagtttgaactcccatgcccacttggcatgagtactgtcggcactagaaaattacatattattcacaaaacgcaaaaaagtaaaataaataaaacaggaaaggaagaaagagaaaaagtagaagaggagaaaggaaaagaaagaaaatgtccaacacccagaagttaaatttaagaaaacaaaaggacagtttgagacgttttcctaatttgcatcggctatgtgttccttttactagatggaaaggagtatgatatttatgtttcctatgcaagaaatgtggaagaagaggaatttgtgctgctgacgctgcgtggagttttggagaatgagtttggatacaagctgtgcatcttcgacagagacagcctgcctgggggaagtaggtatttctgatgagcagcaatggtgcctccctgaaaggacagtgaatcctgagctttggtgcacacatgggttgtagctcagcgttggtattcgggtatggaacatacaattccttcgagtaatagagacttctatagagaagcagccccagtgtgaggtacataggtgtacactgttccgtttatggct

SEQ ID NO: 23998 - DNA, 1165 bp, Mus musculus
caattcttacaaaggaaaacatttaattggggcttacttacatgtttagaaatttaatccaatatcatagtgggaagcatagtggaatataggtagacatggtacaggaaaggtagctgagagtgtggattaaatgtggttgtcctatgtctgttcagggcttgggccactgggcaaggtgtgacatgggagttttgactgcatgcacgcacctcacactggtgccaggagggtgggaaagtatagtctgatgtccctgaggaactacaggagctagctctgtggtccccaggctttgtggtgaggccaggacatcaggtcttggtagaggacatggttgggagcactgagaggccttctgtgggagattagatgcagctctttagaagaggcctgctccattattccccatggcagatcccgatgagaagaggcagtccctcaagaagacaactttggctttcctctgggacttcttgcgctgctgagtttgtggacgaccaggtttggtacggagtgatgagtccagtgaggatgaattttcagcagagatgacagaagaagagacacccaagagaaccacccccatccgcagagcatctgggtgaagacacaggtcctaggagctgcctactcccgtccctgccgtgcaaggtatcttactggatgatcttggattcagtgccccccccccttgtagaagtgcttgttgcctgtggttttaacatggaaaaaatggcctttgcattgaggtctttctcttagagccctgctgccgctttatctttctcagagcctgtgccaattgccgttttctaatgaataaatgtttatatagacttaaaaaaaagaggcagtccatggctttaatgcatttatagtcatggcagagagttttgatgcttgaaactgtaccccacttcttagggtggacctgaggttaaataccttttgcagggaggagtgtctgggaaggggagcttcattgactaagcccatcaaggctttaggtacctcattaaaatggagatttgtcaagatctgtggtcatgtcctctatctgtggaggggcttggggcattgccctcatgtgactgatggccaaagactatcagtggggacctgcaacctcctgtcaggaacctggtatctgggaatgtggcaa

SEQ ID NO: 23999 - DNA, 1327 bp, Mus musculus
aaagctgtaaagacagttagctttcagttctcctttctgtctctcatacctccccttccccgattacctggattttaatggtttttcctttttctcttttccctaggcttccataacaagcagtaaaataatacaaacaaaaagggatcggcctcgaaaatggacttcgtatagcacatattacttcttatagcacatattactgaaagatacaacatgcattccacgttggctgttgtccttctgtgtgccattctgggagttgctctcaagtgttttcttaactaaaaaagtacttcacttcattttaaacttttggtaattttggtcactttggccgtgtaagaaatgtagcatctgaacattggccgtctcttctgtggatatgtttcctgggatgtagtaattctataaaattattacacagttgctagtcataggatattggcgtctagggaactgagtttctttagcaattagaagtgcacagggattcattatgaagtcaagcatagcgtttggatggatgaggtgtaggaaagctgtggagcagctgctttgctgtttattatgatagtttgaaagatacagcctttgcttttttatccttttcagaaaaagaaaagccacaacaataaagtacaggaaaacacacagagcagtgaagtgtgttcctctgaataaatggatgggtagaggctctagatggccttgtaaccctcactcgttatcgtgtactgctgtttcctcaggaccaggtctttttgatgcccttaggcaatgaatcatgtgttaatattaatttgtatagactttaattgtctgatactttctctcaggtccatgaggcgtcaactcaaaattaaagaacaaacagccttccattgccttgcttttctaagttaattatagagccaaaggaatagaacagtttccataggacttggtaccatccgcccaactagctgtgcacatccagcctcctgctcccaggatatagcagtttttgttggcaaccttgcagtgatgttttatgcacctgcaatattagattagttcagtgtgaagttgaacgtgatgaagtgagtcactatccaggtgtatacatctaagctgatggtcattgtattcctctctgtaagacctttaagctcctctataaaactttgtgtattcatccataccacttactcaatatcaatggcagctatgctgaacctatatatgattgccattttcccagcttgacttcctgttcttttcaatgtgtgggtctgacattttctgtcatgtcagtatgctgtttatttagaaaagaagaaaacaa

SEQ ID NO: 24000 - DNA, 2510 bp, Mus musculus
gccctgtgatcttacttcatgtttttaaaagatattttgaaagggtaactttaaagaaaaaaaatatagttgcatttttatttgctaattaggcaaagcaggcaacatcttctgccatatttttgtttttataaatatttatttttctatctcatgaaatgatcacttttaactttaaaaactgtatttcttttgttttgcatgaacttcacttaatcatatttattactgtaaaatgtacatgttttagtttaaaaaatgccaagccacttaaccagaatgctgcagtcttacctgtcgccgtggatggccagaggcagtgcaacctgtgtgatggctagctcaacatcagtattggaaattttgttacattttaagttctttttaaagtctacagttttaaaatattttgtttgtcttattttacttttgtaaagtgaacagtttttttaagagtaccagtaattattatgagtaagaagatagaaaaatattcttatttattcttacttagaattttttctatcagtcaaataatatatctttgagatgattgaaacaactaacagctcttactgaactgccagtcttcactgtggtctctgctttttaatttttatattgaaatgaaagcatttattttgttcctgttattgagcacatgcaatttaacttatgaggtccacacagtgttatgtcttgctgtcaacataagagtaatccttctagctttgggaaatctttttgtttctcaactgtttttctctgcaggccatgtgctgttaacagcagcattcctggatgagcacactatgttaaggagcctcattatgagactggtgtgtcactctctcatttccatcctagaaaaggggctagataaaagtcagattaaatatgctgacctgaaagaaaattaattccagtattcaagctactgttagtcataattgccttattgggagaatagaaaaatgcttcttttgtgctcaaagaatattgagattttttgcaaatggctttgcatgccattgaaatgctatggggtcaagtgactttatgacaaatggcagttggtaatgaactcaaaaccaaactatgtatttctgatcttgagaaacatctaaattaggaagagaggtatgcataaaaatgtgcccaaagaaaactcttcacagtggcctgggtcactacacctaggcagcagtctaaagtatgtgacctgtggtccactggatgctttaatactatcagagcttctcttaagtcactttgtgccaaatttaaaacaaaaacaaagacaaaaaacatattgtaatatggtgcattctgtttaccacataagtggttaacattttacagccttgacttataatatgagtaatgcctttgtataaatctcactttgggaaacatgaaaatgttactctcctttaaaaggtaacttctaattggctgagagcatcagcctattgaagagatgaggcccatgtagaaataactcgaaggcctgagatagaatagagcgtgcagtaaatggctacttccatttggggagggtggtgtttgtggaaggagcgctgacattgaagtcacactgacaaggagacattgttccctttgatttcactgtgaactccgtgccatgttctcataggacacttgtacaaaacagtccctacaacattgaaaacccgacctttgatttatagaagtctgtaatgtgtctgtcatatgctgtttatgactcggtcactcattctctcttcctatctcacaatcagagaagtgacccaggagagtcagctcctctctctctctctctctctctctctctctctctctctctctctctctgtctctgtctctgtctctgtctgtctgtctgtctatcggtgcctgtatgctgtagagccatatctgtatctgactggtgactgatgcttccttcttcccaccctgtaacaaggcagtgcaggcagacagaagcctcctgtggagtaccctgtccacgctgcatgcaacagtattagctgaatatgtgctgggaggtttgtttgtttggttagtttttatcatggtgatatgtaagataattaaagggaagagttaaaggctttgttgcgtctgctataactcatcagaaatgctcaaatttcatcgtagcgtctccaagaaggtagagagcttggaaaacattagttatagtcacctttctgatgagccctgcactttatgtcagcaatgtctgtggagatcagttttgccttaaattagtttgagtccacccaaggccattgtgcttagtatcatgagcacttgtcagctctccattagcatgcagttcataacagagcttcaagcagcagcagcacccagagctttgaacctcgcccactgtgctctgggtgacttgtaacattaataggaatatcttctcagttccctgatagcagcggcatggccagagcactgctgtgagacagttccctggctggagtattcaccca

SEQ ID NO: 24001 - DNA, 1989 bp, Mus musculus
actacaaaagattagaacaaaggttctttggttcagtgacaatactcagattatttctaagaattttagcgatgacctttgtgtattgaaaagcttatttaccattaacaaatacaggagaaacctctccccctcccccaaatggatgtattacttggaatcgtgatctgaaaagtgctctagtttatttcttttaacagaattaagcagttaaatgtggctatggttgaaaagatagaagaacagcttttctaggctgcacacagaagagtacagttatgcaggtaaccacactgatttacatacgtgtttgccactaaaatccattttctgcccttataaattcgaacactgctactaatatggtcatataggtttcatatgcctctgtgtattacaagtaaaaaaaaaagttttttctcctcattttaaaaagttacttttcataatatgctgacttaagcattttagatcagggcaagcttaattatgtaactgtgttgcccaggtttttattggtgaaattcaaatatgaagatgagaaaaaattcaaaaggtttgagtaacaaattagcaagaattgcctacagtaaagagtaggcattgagaggctatgcagtaatgggtggcagtctttggatatattgctacactgatttcacactatgctgaaattgattctagctaaaaatttgataagagtttgggtgtgagaagttttatacttatgtatgaatcgtttctaaattcctttagattgtagaccttgatgtaacccgaaaggcagatgtcctatcccaaggatagctgtatttttcatggttttaaatgagcaaccagatattcatttcatgaaataatgtaaatattagaaagtaatatggataaatgacatataaaagtgacatttccaaatgacaattctctgtaatgcctgttgtctgctaagaagaatctatccctgtgaaacatttgaaaggtgctggatttgaaagtactagagtttgttacataaatcaagtttctcaggatatttgaggtgatactgccatttatttctgttataatttggaaaaaaatcatttcttttgttacactatgaggaaactgcacactttatttggtaagagtcctttaagttcagtaacctagagatgagtataaaacaagtgtgggatcccagcgctggtcagtttacggtcagcccacccctcagtggggaggtgtgaaggagatcccagtgctggtcagtttatggtcagcccacccctcagtggggggttgtgcagtacatattttatggagctgaatggaacttcaatagaatatcgtcccttgtctgaggaaagaccacctcaaccacatgcctatctagagattgaataaaactgtgaggagacactgtgtggatgccttaagatggctggcgctggctgcagggaacaatctatttcagctcatcttcataaagcccaagatgctcccgtgcataaccttgttgaagaaatgagaaatgcggtgctggctactttgatgtgtctggggaggctggcgtcattggttaccatcattaagtcactgtccagtgcccaagccttccttcactaccactcatatgtctacatccattcattcatctatgcaagcttgtgtttttgtggtttgtattttacacctggacatcaggtttaacattggtgttttaaataatttttaaaccaaagtattttatgagtaagtctatgtgctctgtttttgtgaatgttttgagataaatacctatcttgttttctcttaataaagtcatccatttattaagtcaatgatggcctactgttttcattgctacactcaaaatctgaagtttgagagagttacagcatatatacatacatacatacatacatatattactttttatatataagagagcaccactaggtttttgtagatactagtaaaattttatggctcaccatgttctttagt

SEQ ID NO: 24002 - DNA, 1197 bp, Mus musculus
ttcccatcaatgggaggttgatcagccttctctcaggacaacagtgaggtgttttctttccttagtatgtttgtagagcctttaatagttctaataaatagattcctttaaaagcttcggctgggacggccgagcctctgctcgctcgggactgaatcagtcgattcttttcctcagctgcacactaatcttgattgagcctcctggctttgagatttgagtgagcagcttcaatctttccagcctcagtttccccaactgttaaaggagtaatgccagcttgaccaaatggacactgacatatacagaagtacatgggaagaactggcagcatgtgctcttttaccttgacggctccttccggtcgctaccaaaggcttctgttaggcaatgacagcgtgccctattgtcaattgtccgatctaatgcccatggaatggccttaattgaactaaacaggagcagcgatcccacagcctctgagtacctggacagtagtatttgccaaagatcctgaaagataccagggctcaaatggcttttgactttgcattggctttttggtggctttccccccgccaccataagactactgaatgagactgatactgctaatatcagtgctttcttcccctcccccacctctgttgtacaggacagggttcggaatttgctttcctgtgctctgcagcatgccctcttttattaccattatttgattttgctttattaaagataatagtgtggtttggatgcagttcttgtggttagggccatttaagaagaaacaaagtttacgtatttgctgcgtttttctgtctataaagtccaccatatttatggtattaattttgtagcacgctacactgggtaccagaacagcatgttatatacatgatagcggtgatgtgactgaaaaatgtgtcccatggcaacagtatccttaggcatgtaactaaatatgcacagattaaaggagctctcgggctctgcaggcagctgcaggcagggaggttggcgcttggttgggagagctggggccacacgcctctcattcatgttctctgcttcttcttggctaagctccacttcagaaccctcccctgcttctagaagcttcctgtttgactcggcggcttctggtttggtgtgggcagcacctgtgtgttcgcttggggcagtgtcctctcagggctc

SEQ ID NO: 24003 - DNA, 1200 bp, Mus musculus
ctatgtaacttaggtcatccccagatggattcttcctgatcccctctccctccccacccccacccccacccccagttatgcagtctaaggagcagtctaagggccacagaggttgccacaagtttcaggctctctattctgcattcttggctcgagtctcattgaaaccgtctttcagccatgcagcccccttagtagtgttttctagcccctaattttttttcacattgtcccctccacccttgatgcctcatctggtcccacctctcatctttatctgtttttccccctgaataccacccatcatttaaggacaaatgtcatctaatttccctttttaattgattttttccctctccacatcctaatgtgtctggggttctgagcttgggcctggtatcccttcctgtggtcctcaccttctgctgcaggaagacaggaggaaatgtacctacagagggtcggctagtagagcaggggctgttgtaactttgagcatgccggcccaggaggaggctggctggtgcatggctcgtctctgtgcttaatttgtatttggggagtgaatttcattgcccaggcttgtttgattgctctgctcagtgagatgaagctagatttattctgaactgtatactgtcgcgcaaggatcaatccgggatccctctgggtccgtggtcttactggggatggtgctggggtctgctgacacgctttgtctgtggagattgtaatgcctgtgggaagaaccgaggccagaagcccacgctggaagggttaaagagcggtttccctttgggtcttccatagttctgggcagccaagggctgcttttggcaaatgttggaggcacctgttcagaaatctgtatcgacttctacagtggcatctaatgagttctgactgactgcatgttccccgacttgccagtggccctttaaagtccatcttgcccgtggaattggcaggctcgtttaattgtctagaattcagataaaaatgctttgttctttgttcccacatgacatcatttcagagtatctcctctcccacagattgctaaggctgttcaatttggaccttaaattgcttctctttgagcagggctttcagtttaaatggcaaaggcagctccttttgattagacatttagggcatccgttaggtttcctgatccagtcactccttccgccgcttgct

SEQ ID NO: 24004 - DNA, 3520 bp, Mus musculus
gtgtacacacaaacacacacacacataaatgataggaaaatgttgggggaaaaaagaaattctagtatttacataatatatttgataaaattgtgctactattttatggctgatagagataattttaatctagcagatttgaacagttaagctttaattttacaatcatgtcgtgatatagttgcttatatctgtccatttgtcttgccaaatctaagtttatcaaatgggtttgttcctacagaatcctgctcataatgtaatcacctctgcgtttatttgaagaatgaaaacttgagtcttttgtcctgcctcctttcctcccgttctacccttttccgtgcaaaataaagtcacagggtaaaagtcatgtacgtgtgttccaggcacttaacctgcagctgccgtttgagcagaagagccctggacgtggcatccacggtctgtgagctcgtgctgacggcagacattgggaaaacatcactggtgtggccgtgaggcttagtcctcagagattaagaagttgctctctgagtcgtgtttgtggtggcactgatgtgattcactatggctggtatcacacgtacagtggtagctgctctggaataaaacttacagtaattttttaaaaggcatcaattgtatatgacaagatgacagttactgctaaaccatcatgtctacagtgttctgtattcaggaacgctttgactgtaaacactcagtttatgttcaccacatgaaagaaagctggtttataaacagatgcttcagctgggttaatttatgttgggcagttcagtgtatattcagtgaaagaaacatccaccctccattgccagcttagaaactcgccttggaagccaaccgcagcagcgtgcagtccatcgctgcttttgcgccctgtatccgtgtgcacttagttcagtttgaatattgtgtgctctcagtcaggctttctggaacagtaggtctctcctggtgacacagccattgaattatgacccacgctggagaagactaaagaccaccagttgacgaatttcatttagagtgctatcaaatgtctgaactaggcgtcagggaaaggtttcacaatagccctcaaacactattttaaagaaaaattattctaacaagggaaaaatgttgacccactcccacttaaagctgaaaattctgtttaattcattgcagttatagtaataaccttcataatattttcatgcgctttatataaaattacgttggttaaaaaagcttaaggcaaacagtacttcatatttacttcaaatgtctttttcatctgccaccttttttattaaggctttactgttctggtaaaaacacccagggttgcagttcttatttacagttaattttataaccagtttccttggaaatgtttttgtttatgattccctcgaatctgacagtatggaaggggcagtgtttcagaaaccatgaattcaataagtactctatttaaattatcaataagaagcctgggtgcaattctcagagctacgacgaacagtgcccatccttccctaggacaaatgtgcaggttgtaggtgtgggacagtagcgaacagaagctctagagagccctgggctgattcccacagccatgaggatatgctcgtcctaagccagtggtcctcaacctgtgggccaagagcactttgggggctgcatatcagctacttacattatgatttgtaacagggacagaattacagttatggaagagcaacaaaatgatgtcatggatgggggtcaccacagcacgaggactgtatcaaagggtcccagcattaggaaggttgagaactgctgccctaagccctgctagcctcactagggtggataggctgaggccagcaagagaaatctgcaactttctcccaagtaaaagtcttagattggattcatatctctttatactttttttttaagttgaagagaacttttatttctttgcagggatctaaatttgtatcttcaacttaaacgtatattactaaaaaccctttcactcttgacccctgtgggttatttgtaacctggtttcctgctaactgcccccatcccctgaaagctatgtgtgtacgaaacgcagaagctacaggaagggtaaagttgagtcccagcagtagaccctgtgtatcatgtctgtagttcaggtgctcaaatatacacaagccaaacttggactggacaagaagccatttgcaaaaatggagtggataggtttttcttttttagacaaaattttatttggagaactaagggatttttaaatacatcataagcaaaatgacttggtcagaatgtcagttatgaacccctagtctgtgtgcagcatgaaccacaggaagcaagcttgctgcttcagccacacaccaagcaatcttcagttagttacaggtgcagcagtctgggccttcctcttcgtctctcctcatcgggccccgttttccaggctgtagtcagtggactcccacagattcctcagtgaccaaatggaaagggttggtgtggaagcaagtgagacttcctaactgtacagcgtgggatgtcacatgcaggattcaggtggcagaagcaggacagtcacaagtcaaaggcaagcctgagctacatagggacacccctgtctcaaaaacaaaaataacaaaattaagactttaggctcagaaagcaaatttcttatgtagttaattttgtatttatttatttcagatgtatttatctgataaaagaaactttttttctctctccaataaatgagatcacggtactggtgtgtctccatcctctacgctggtgtatggtagattgtcttatactgtagcaactggaaatgtgcttgaaaatatgcttaccttctaaacgatcatggctatttgatatctaaatatttaaaacttaaccatgtcgtcactgtgcactgtgaatggactttgtattatttttaaaccttacactcgatgtaaatgttactacaacttatatttgcctgtgcttgacctaaggtcatttgtgtagatgggtaattaaaggatactgaagtgatattatgattctattattggagagtatcttttacattttatttgttttaatgagggagaaagaagcctttgtacctaaggtcatgttttggccccataatatagccaaatccattatctaataagctcccacagtggcttctctgagaaagcttggacttcacagttgaagcccatgcccagctggtgctttttctcctgtggtgatgttgctcaaagcacattggtattttcttccccaaactattaaaaaacaaaacaaaaaaaaaaccaaaaaaacaaaaaaaaaaaaaaaaaacacagctttctccctacactgtgctaccatggccattgtttctgttcatgatgccaaggtgttcagtcctaccacacagcactacctagcaggctgggtggaaactgtaaaggtcacttctgtccatcctgattaaaggctccca

SEQ ID NO: 24005 - DNA, 1153 bp, Mus musculus
taaaagccttttgctctcggtgtcaagtgggtccatgttccaaaaggcaaactggtgagcgtcaatggaacagtgggcgtttgtcctgccagtttgttcactttttaacgaattctgaatgtcaacaggatagtacattttaaaacgttaccatgaaaaagggcagtcaaaagtcttagtaattgtttttgtattgaatgcattgcttacatatctcatcaatcaaagccattgtctgtgaagtgtgggtgtgttaggtcctaggtaatccttgactcatgcccatctgcagctggaatagcaagttctgcacacagaccccaggctaacaaactctcaattatcgagaattacctgtggtacacctatataatggatacatattaatgaaataggctccacctacacacatacacacacacacacacacacacaccctcaaggccacaatcgtgcaaatgcaagacacaaatacccactaccccatccctgaaatgagaaacaaccacctatcgatcatatggcatagaaccttctaacctctaagacgtgacccccagtctgccatgtgggcctgacacttcctcagagccctctctatgctgtctgtccatttgtctagtattaatagctctactaataaatctcttacccaaaaggacagccctctttagtgtcccccttaagcccaaaggctgcagctatggaatcaggactcacactagccttcgtccttgttctaaaagcacaagcctgcctgaaggtaggctaggagagaggctgctgctgagcagagagaggcaatgccctctgcacatacagagttctgccttgtatgtccaaaacagaacaagaccagatcacaggagatgaagcgaggagcacctgttctgggacgctcaggagagccttcctcttccataccagaaatgaaaaagagcaggaactgatggctgtgaccaaacatctgtcaagaagccacttcagagaggaagggtttcttctgcctctagtttgagcagatccagtccgtcaaggcaaggaagagctggcagcaggagtgggaagtggctggtcacaggacatcttgggtcaggaagtagagaaatagaaaagctggtctgctgtgagatgtcgaggctcagtcttgatg

SEQ ID NO: 24006 - DNA, 1194 bp, Mus musculus
caggttatagtcctttgactcccttgtgttattctcttgtatcctagtgaccagataagggctaattatagttatttcaaaggccccaagggaaggaattgatgaactccagactgttgaatcagcagacttggaggagggctataggcctgagagtgttatgaacgaaccttgctccactaaggctatggtggttttgttggttttgttttgctaagtatgaaaaggagaaacatagattaaaactgaaagcaaaattcaagcccagttctactagcaaacccctttccctaccagggtcctattaatacaacactgtgaccaataccagacgttgaagccatgtcccactcacacctggatgcgcatgtaggcacacattcaggaaggaggcaagcctctattgtactatctctgagtaggtcatcagcatggactgggtacatgacaagatccctgacatggctgagaaatgaaccatcctttgctttcccagctagcacagccttggaatgcacacaggaagcccaggagtcttctactcacacatatggagggcatgggaacctgtctcggaaacctctgtgtgcttgtccatagacaagctactgacgtagatactgaagcaatagcttccaaatacatttgggtcaagtctctttctccaggtttcaagtgtcccttctttaaacgagtgttttatacttcctttgaatgtgtccttgtctagaatcccaaatttcagttaaaaaaataataaaataagagtaaaacaagacaaaagcccctagttttagtcctcttaactgcctgttttgtagttagctgaggctggctgtgaaatggttttgacattctgcttctgctgtccctggtgcttactagcaattgaaacttgaacccagggtcttatgtctgataaacgtgttcttctctgagctataacacaatataagacgtcatgagagccactctgtatgaatgcgcttttgtgtgcttctatatcgttgctgatgttgccagagctcttttctaagagaaggttcttgatttattgaatttgatagaaactttaaaaagtcagagtgtaagacatgcccctccccacactaatcattaccgaacagcacatttctccttctggcattctttaaagcaataccttatcgacccaccttagtgaccagaaacctc

SEQ ID NO: 24007 - DNA, 1157 bp, Mus musculus
ggccctggtccgcctgcctctgcctcctgagtactgggattaaaggtgtgtgctaccaactacccattgaacctcttagttatagaattctttcacctctgttctgaggaccaaatcaatattcattatcactaatgacagcagcaatagtacacacaaaaacatacaactacactggctgtaatgtgaaacattggtgagatgccataatttagttaggcaaagtacacaatgagattaaaaaaaaatcccctctgttttgacattgaatctggaggcattaatataacaagacactctaggcacagtgactacatttaaaaagcaggactgggtggatgagatcagagtagtttgctcggtcatatcaatgtttaaccctggctgtacattcacctgaaaaattctgacgcctagaccacactacaagctagttaaagcagaacccatgtgcatatatgtgctgtgtgtgtgtgagggtgtgtgtgtgctgcatgtgtgtttgtgtgcatgtgtgttgtgtgtatgtgtgtgttcatgagcacatgcgtgtgcgtgtagtggtgggctgagcagcagggtttattttaaaggtcctttaggagagtcttctgtgcagacattgatgagaccccagagtctaacagctgtccctcggggacaggggtgatggctactgtgctattcagtgacaaggtgatgactctgagtgtctagttaaagaaatacctacatgtcagaactggacaagattctagatgcgacggttcctttccaactagggaaactgaggctctgatgtcatataggaggagaaaggcaggatctgcccaagaaactgatgcctttcaccacacacctcttcccaaggctactgtgcaagtgaagacatcagagcgggtaggatgcattgccttcccggcattgagaacaaaactcaaacttttcccacgcatgaccctctcttcccaggaaatgggtatatgaccctgggtatacagataggcaaaccgcttactgataataaaccataagaaattgattttaaaacaattctttgcgatatgtataaatttttgccactgtttagagatggatagattttactcggagagttagatcttgatactacagggctgttagctcctttaatgctt

SEQ ID NO: 24008 - DNA, 1135 bp, Mus musculus
cttggccttctctcttagggttaatctttatgcactaaaacaatggctcccaacctgtgggtagagactgctctagggggtcagtcaaccctttcatggggttgcatatcagataccctacatatttacatgatgactcataactagcaaaattacagttatgaagtagcaatgaaataattttatggttaggagtgacctcaacacaaggatctgtattaaagggtcacagcgttgtaaggttgagaaccattgctgggacaggaagatggggagagagaatagttctgtccctggaatttgaatcttcagatgctaagtttttctctcagaaacatgactttaggggagagaacacacagagagagagaccttgcttgagctttgggctaataccacatttatccaagggatgggtaagacaaataatgatttcccaagttgctgagagatgatgcttgtgtgtgaactatatattttcctttgggatgctgaacttagagaacagttcaggaagagagtccagggagatggcacaactgtctgctatagtctccctcggaagatcttagaacgtgacatcggctttcccactgaggttccttgaaagaattctagaacttgttccctttctcagtggttagtcatctgccctgtgtggtctgtagcactgtagtcatagatcaaatctcacagaatggaagtgggttttcatggcgccagggaatggggtggagagactgcatcctgctctggggtccgcatggggggaagaggttcccgagaggtcacgggatggttcaggacaaagggagactcaggaccaaactttaatctctgtcatcccttcaacttctgtgggtgtggtggagactattttgggtccccttggggttgctcagtatgtggacattgtgtggagtatgaactgagtttttccttttgtgggactgaactgcaacagggccaatcttggctgctatcctagaaggcccatggaaaatgagctctctggaaacatgctggcgcatgccaagctggcctgacctcacaggagaggcctcttgatcaagtatgttgttagctcctggaggaggttgccaggcactgtgtgacttgcacaaatatccagctg

SEQ ID NO: 24009 - DNA, 1150 bp, Mus musculus
cctctcctcctcttcttcctcctctcttcctcttccttctctttctcctccttctcttttctcctccctcctcctcttcctcccctgtctctccagtaaggtctcttccttgtcaactgtcattgcccagggctcaacagttgtgggctctgacaggcattgtcaatcaagaagtggactgagctgcagaagaaaatcctgggaaagggatggaaggtggctgtagaaatgtccacagagaacgtctcttttctgcttccaagaccatagaaatgtctagtccttccttgtgtccaaagaggcaaagaggaagtcagggtttcttagctacttggagttaagtagcagagggagttcttagtaggaaccacaggggaacaaaggcttgaacccaagaaccagtcagccaagaatcacctgtagtcacaggatgatgtagggcagctgactgttagtgactttttcaaggggttctccattgctggctttttgggtgacttcctttttcacatggaaagctcccttcttgagcttggagaaaaccagttgttcattgctctccatctccaaggagcctgttctccttgaactcagtctctagacacttctccttcatggcatttgcaagagcaaggtaggtcaccccaaagctgctccatcatgattgggctccattgcctgattctacctctcctggatgggggcactgtggacacttgtcctggctccctaagtcatctctgccagctctgctccagggatgctcctgtgtgccagcctgcctgactccttacttcccttccttcctccctctcttcttccctccctccctcttttctctctgcctccccatcttctttctctctttccttcctccctttctttttctttctttctttctttctttctttctttctttctttctttctttctttctttctttctttcttccttccttccttccttccttccttccttccttccttcctttctttctttctttctttctttctttctttctttctttctttctttctttctccctccctgcctcccttccccccactcatatctcaggttggccttgaacttgctatgtagctaaggaaaagtttccacttctgattttcctgcctcgtcttctgagtcc

SEQ ID NO: 24010 - DNA, 3312 bp, Mus musculus
caacctctgtagacttaatgatgacaaggcctgctcacatggtgagatagttctctgctggcacagctgtgcctcaaagtattatagatgctgctttcttttttttcccctctcgcttctcctttttgtgccacggcttgactctgtctcttccagtgagaggtcccccttttgtttatctgctgctgaagacagactatattctctctccgagagggtttgaatcttttagctcactgcactggctttggagggtgttctgcaagacaggaagacatctgtgccatctgatccaaggcagtgttattgtcagcatctgctgtgccaagctcagcctttcagaggagcatgtttaaagcctcaagctttccttcaaagagcctggcccttgatggtatagaatcatgccaaatggctaagttctcaaaacacaaaaatcagctcactgaaagtggctgaagaatgtgacccgctgcctggggtccttgcacaccctgctgcctttgcctcttctgattttgtattgaagcatcacacacatacccgtgtgattggcatgataccaagaaatggtattgtagtgactccccactccaagcttgttctgggggactttctggggatgctggagagtttctagcttccccatggtctggggaaggattcttacaacctcccctacctctccatgggaaggaagcctttgcataggcccagctgttaggagtaaaagagatgtaggtgcagtcaggacaaaaagcagccacgctggccagaccagaagcatagaaacgacagtggcctgtgcaagcacttcttccctgacagtgagccccgtgttgctcattggcagcccctctactaatccttttatgggcattctaggcctgtatctgtttctaatttttgttccccacttggggggaagcaaaattgctaagagatgagatcttccagctgaacgaccaagtgtaatggaaaccaggaatcagtctatactgtggtcaaattctccatcagcattagtcagctgtagctagagtgcagcgtgtttacagacagcagatatcggggcacgctggaaggtcacacgagggtatggggtgctctgcagaactttctgcctggggtctggttgtgaactgagtggtttagtttagagttttctctttgggtgacagtcacactatatctgccttagctctgtttcctgctacaaactatttctgcacattaaacagttctgataagacaacacagctttctcaggacgactaatacaccaatccatgcagaagtaaaagcttcaaaataagcagacatggtgggtcatgtctttagtgagttcaagagtagcctgtctacagagcaagttccaggatggccagggctatgcagaaagaccctccctcaaaaacaacacaggaaacaaagaatttcaggtttctctgtaagtgagggaaagaccccagctaagcacagggatttgtgaagtgactctatctccaacctgaggtgacactcataaggcaaatcagaaacccctctgggtcttggcaatgtggaacttacactatgtccaggtccccgacagaatacttcataaggaacgcttgtgagaaccaacacactcgatggcccagggaagctgatgttggtcaaaagacatcatctttccaaggccaatctgggtcgtcaaagtgtttgtaaagtatctctagcaactggcacacacgaaccaaagttgtctccagccccagagtgagtgtgagcttggttctgctggctgtggcttgctggtaggtcctggggcgaagagaaggagctgggcctgctttacagcagatggaagcttgacacagtaccgtgctcccagaactatcaggcgctccttgtgagctatgcccatcctcagtgggctaaggatagagagaggtagcatccatagtatccagtgtcccctgccaatcataacctggaaacacaggctacatctgacattgaccatggcagtggtgtacctcactggctcaaaggctggcctgaggacagctgtcctctaatgacatgcccaggagctcccaggcagtgagcgaaggcacagttcctcaaaatcacattttctagtcagggagagagttggcagaacactgggtggagggtcctttccaataaggtaatccattttgctcagttcttgggctggaaaaagctctgtggtccctagaagtctgtgatagggtgcagagttcaatccactcgcctcatctgttcagtgctttctagactgccatcccagccttgtgcagagtggggagaacagttgactctagaaggctaataaaggccaaccagaactagcatggtaaagatgttcagggcctgggtgtccttcaaagctcttcccctaaccctcttggcaccttaggaaactagttccaccattatcttttgtgagtcttttctgcacagtgcccaacttacaatccctgtagaggcttcatgggctgtctagggctttcatcaggagactgtaggaaacagctcgcagtacagttacagctggcttcttggagcatctcacccacagccatacagtttccacaggcatcgagatggtggaatggaagtgtggaagccggttccagccttgggagagcatgaagaacagaatgataacatgagtcaggaagcaggccttgcatgtgtcctagacttagctataaactacttaaagatctgtccccagactccgaagtcagagccagatctggctgtggaagagaatctggctgttgatgattgcaggagggaagccattagtgttgtctgagagagtgtgcagcaggtaacttccatgtggagccccaccgagtcagggcccttctcctaaggagagattgttcttgcctcccactgtctttgctctgccttctagaacaatcatgcttgacttactagacagtctccgcaagtagtcccagttgcttggcagtgcatttagagatttctaggctcccagggttctgtagaatgtgagccctgctgggcaggtttaggggaatctgtcctttgctagatgcggcttgtaacagatttggtgtacaggatcaacaataaacggtatacaaagggcgagtgtgttctctgtggacgtcttggtgtgtgggtctcctgcctgtgcacctcacccttgtcgcctagattatgagcaacctggatggatggctcctcacagttgaatttgggtggagaacaggcctttgggggaaaatgtggctggtggggactttaagaataggtttggcagga

SEQ ID NO: 24011 - DNA, 2975 bp, Mus musculus
tagaaagaaaactccaaaagcaaagtacatgtacttagcacaggagctccgctttgatcctgagtggccgcctaaacctcagacaacgacggaagccaaagctgtagtaaaggagaatggatcatgtcagattatcaccatagcataacaaaggctgctctctgtgctagtagcagtgctcagcagcatgcactgttgagcttttctgacgctgtgtcagaatggcactagttcagtttatatccctctcataatatggcagttcattaaaatacaaagcagtaaaatgtcatttgctgtacgattattaactataaatctggctatttcttcatccagtaacctaaatatgatatatactttatattgggtatgagagatctgtgtttgggttttatagattttagcttttgacacgtttgcctctttaaatttacttttcataaatccccttattagaaagttcttttacatataggccccaaaattgtgattattaaaaatatagttaattgtgattagcctccagtgaaaataggttgaaagcctgttttgatccagtgttttctcccaaagaactctacgttaaacatacaccagttttcttttatgacctggagttaggagtgagtttgtgtgttgttgatagagcaactcaggtaatttccatttctggttttatattctctgtatctcctgcctgggtgtcactttctagacagtaaggcgctccactgcttgctgtctgagatatccttcatagtattccatggctcccatactgcagtctagttaagcaaagaactctcactagaaaggtttatttcagccgggtgtggtggtggtgcacgcctttaatcccagcattcgggagggaggcaggggcaggcggatttctaaattccaggacagcctgggctatacagagaaaccctgtcttgaaccccccccccccccgccacccccaaaaaaaggtttatttctgagcagccaggcatgataagtaaaggcccctagtcctgcacaggaggctgaggcaggagaattgtttagtcctggaatagatagtaaaagcctgtctcagaatacacaagcagagaaggatcggggttatgtctcttggcagtagatcccattcatacctcttcaaacctatttgttttttttcttttgggacttatatgattttaaatatttcatattctccctcccactcctactctccctccttccctctctccatcccttcctcctacctaaaggaatggaatgatgctgtttttgttttgagtttgaccttaaccttgctatgtctctcctttgaataatggggcttaaaagaataatgaacatggaatttgaattacttttacaaagcaatatgaacttgtagagcttgtcttgtgccattaggtggcaccagagatcatcacatacctattttgtaacaagtgagcttgagaaaattaagaaaatatatacatttatttagccaaaaggaatgaagaaagcatttacacatttgtgttttatctgattctgttcagttctcaaggaactttcacaatgctttcctaggtaggacctggcagtttggcagtgccttcagtttagcattgctataaaatgaaccctgaattagcgaaacagtgtaacattattctgtgttctttattagctaactacaagtgtatgctttccactctggttgatcattagttccctagtacatacttaaaagtttaccaaatgttaaccagatttttgaaacctccccccccccctatttatttattttttatgttggaaatacccgaatgatgtttggtaattgtagaaaaagtaaatgtgtctcaggatcactattactgctgttgccactagtgattcctaggaaatacataattgactttttccaacaaaatgtatattattacatgttagataataagaacaattgtcccgtgaatgattctatgaagctatgcatcttagacctcttgagctgtgaattagcactattttctatggttacttattatctattgttttatactttctatgttcatttcaaataatgttaatgttattcaatcattttctgaattgttaactcttattctttggtttaaatactgaaacatgattaattgctaactacagcttagaaacccaatatcagttgtacttaacatctttaagagcatgatcataaaggctattttgacagttcattttaacatttagagttgataagggtttatatctcatctgtccatattgtttgcaaaggaacaaggttttatgtaggtgagagaaagcatttgtacgaagttagatttgaacatagataagataggttattccagttgagaatattgttcgaagaatgtctgtgaatgcagacatgggtcctgcttagtgccataggtagactgagtcttctgtaagtcatcattacatagtaattttggttctgaattttacattaaattatttgaatatatacagacctaaattttaaaatctgtacatatattattttgatgtattaagattgataatattgctgatttaaattttatttatgcacatacttaaaggacagaaatgtctggtaaagtaattgttaaataatgatatgtagctttttaactttttaaataaataagattttttaatgtgggtctccctcagggttgtttaaagttgtttgttttcctcccttacatataaataaataatggtaaccggtttctatcttgtagcaccaactgctgtaagggaatgctgcagacagtgcttgggcgagtgtggcgccaacaagcctgagattcaaacgctttccatttaagcaaacctcttcttgtttttatacttcattttgtttcccatgttgatgaaagtactgcacagtttcaaaggcatggtaaataatgtgtttctttcatatatatttttttccaaaagcagca

SEQ ID NO: 24012 - DNA, 1182 bp, Mus musculus
actgttgaaggtgtcaactatttaccatccttgatgtcaggttatactacaaagctatattaacaacagctgaatgatagtgatgtacaacagacatgttggccagtgggtgatagtgcatgcctttaactcgggctatgaatttctcaaggggtattacagtgctaatgctgtatgtgcccttgtagattcttcctgtacagagaaacaagatgttagtttttactagtgttggtactagcatcaaaataaataataggcatatggcttcttcaattaataggaatttacaaatctgtccatactggaaataaatatctgggaaataagtaaaagctgttgaaagaacttgctagctaatatgaggactatttcatttgaccatgaagagatccaggtcttcttatttatattttaggaagataattctatgtggagaactatcctgtgcattgtaaggtacacagatgatccattgtttactgcatgtcttcaatactgtcaaaattccaactacttgaaatagagcccttgccatatctttcctggggtgttaaaattacctctgataagaattactgaattaaaaaaatggcttagtagactagtcaatgactaagcaaagtttatcaaaattttgtaacagttgatgatatcaaaagataaatttagaaatgttataatggaaaacttggtagatcccatgtgctatcagttggactaattttcctttgagttactgttgtgttcatagagcttcagacatgctagtatatcatttaactggggcttttttctctttcatctttatgttacattatgttatgacacaacattacatggttttgctggaattacaggtgtgcactactcccacacattgctttatagttactagttttactggtactaagattttccatgagtttcagtggaaaggtaaccgttactggaggcatttttgaaattagaattctgaaaattcgtttacttttatagattattttaaaatgtatgaaaattctcacttccaagagtatttaattatgtcttagtaagaaatttagatacaattttttgtcctttcctttcaaatatagtgagtttaaatcctgcctggaaagagcttgtggcacagagaccaccttcaggccttatatctggggcgctcctcttctccgt

SEQ ID NO: 24013 - DNA, 1819 bp, Mus musculus
acttctaacacaaactgtttctggaaaatatagtagtaaagaagaaactaaagcttttcagttatgttctttttgtttttatttcctgtaccacatgtggagccttggcttatgtgaattatctatgaatgtttcttctgctgtcatataagattcctgaggaatgagtgttagccttttttattgtggggatcacttacaatttttaacattgatgtagacatagaaaatggttatcaggtgttagaatcagatgaaaattttttcatttacatttcatttctgtactatgtatgtatgtatgcatgtatgtgtctttatatgtatgtgtggaagtcaaagactatctggcagtagtcaattcttttcctcccattccagtgccaagactcacaattccctctgaccatgttgtggaccctcgtcccaccatagcactacagtagaagcctagtgcttgttctatatgtccatgtttccctgctaaccttaatgtctttaaaataaaataaaataaaatgatgtctttaaaattaggagacaacatgttgacggctgtctctgtggccagagactgtgggatgattctacctcaggataaagttattattgctgaagcattacctccaaaggatggaaaagttgccaagatcaattggcattatacagactccctgtcacagtgtagtgaatcatcagccattgactcagaggtaatgtttatattgtctttttaagtttgctcatttgaatttagtctgggtggggggaaaagatgatacatgaaaacccagtgttaacaaaaactaaatgaaaatagaagccaggactatcattccagagactctcactcattattgtaagaatctgggtatttacattttgatacagattttccctttctttgaataaatgctaggtttttaatgacatcgtttatagtgtgaaataatcaatcttggcataaacagattgaatatagaactgcattttcttgtatgggtgcctgaatattgtttcaaatgtcttatatataggctattccaatcaaacttgcccatgatagtttagaggatcttgaggtgactcgctatcattttgcgatgaatggaaagtcattttcggtgatactggaacattttcaagatcttgttcctaaggtaagtaatgtgaatttttggatgtgttcatgagctcactgtgaacagcagcatgttaaaaaaaaacaatgtttgttttatagttgatgttgcatggtactgtgtttgctcgaatggcaccggatcagaagacacaattggtggaggcattgcagaacgtagagtaagtattgatgggcttttatggttcttttcttacgaattacaatttcactttcaaattctggatggtaactgatatttctttatatataagctaagtatccttaatccaaacacctgaaatatgaagtgctttaaaatctgaaactttttgagtgtcacagtagaaattgaagcaaatattttaaaatatgaaaaattccaaaaatctgaaacacttcaaatgaaaagtatttaaagtatgggcacatgcatgtgaatgtctgtgtgtaaagaattgttacctatcaagtatgtatttttaaaataaattcactgacatatttatctgggtaatgtatccacagttctttcttaaggttgtaccctcattaattggtgctctttttaattgaaatgtatgtacatgtatgttctttgttacaaacaaacctactccccgttccctgtggtcttccttccgcttctcctccacaatcagatttattctttcttcc

SEQ ID NO: 24014 - DNA, 1121 bp, Mus musculus
aaagaagtacatattttgcattatgaaagtttagatactagctagagatcagtgttttaaactatttttaaactaccatttattcaatttatatgagcagggaatcttttgaaatgatttgggtgtattctcattaatttgggaaatgacattgcagacagtgtcaggctactgagactttacacaggggaggtagagaggtcatagtaggtttacatatagctgtttatgaagaaagacttggaaaaggacctgaattggagcaacttccgtggtgcggtacagtgagaaaggctagaaatgatgcccagttggatgtagaaggtgttaaatagtggattctagggtgactggtaaatttcttgctttaaacaaatcattaaggggtagaatgaattgaaaagtttgaggggcaggatattttgaagaaaggttgaattttagctgtctgtgagaaaggatggaggtctcaatctgtgggtctgaagatgagagatgagtgctgaaaactgatgggtagttgttgctgtcacagacattccagtagtgctacactttgtccccagtgacatagttacaaaaacagcccaggggatattaacagttaagtgatagcaggaaacaggagcttggtaacctgtctacttgcctttctatttaggctagtataatgtaaactgcagttaagcagaattgtggtgggtagaaaggacatttgggggccatctttgaagtcctgttttttttttggttttttccttttcaggagtaaatgattcagctttatttgtagcaacaattggtttagtggatctttagaaaatagaaaataatcctgtgaaaaagtatgctaatgtcctttttaagaaacttgttggtaaagctttttaatgtagtttaatctcatgcttgcctttcttgtctttaaaaagatactatttaggcctggaattgtgcttgagaatctagtggtatattgcttgcctggtgtgggtgagaccttggggttcagccccaagcacctcaaataacaaaccataacttaacaatgacagtatcagttttgtagatgcccatgaaggtggtttctaggctaaataaccctgtacagattagtcttc

SEQ ID NO: 24015 - DNA, 1160 bp, Mus musculus
atacatggtagagcatgtgtaggttcatgtatacacacaaaaatagtttttttttttaaagaaaatgatttaagccgggtaatggtggttcacgcctttaacgggaggcagaggcaggcagattcgaggccagcctagtatacagagtgagttccaggacaaccagggctacacagagaaaccctgtctcgaaaaaccaagggggggggggggggagacagagacagagagagagagagattgatttaagcctggtagtaatgttgcttgcctttaatcccagcactcagacagatctctgagttcaaggccaccctggcctacagagttaagttccaggataaccaaggctacacagagaaactctgtctcaaaaaaacaaaacaactacaaaaaagaaagtgatttggggttggggtttgattcagctttaattgggaatctgtggtgctgatgagcccagctgttgtctgaggactggaaatgtctgtctttataggagtgttacgtgaaagagatcgatgctgccaaggagaacgtgatcctgataaacaaggcagacttgctgactgctgagcagcggtttgcctgggctgtgcactttgaaaaggaaggggtaaaggttatcttctggtcagctttggcagaaactgatcacctaaatggtgacttgaaggtaatgggctgggggcctttctcaaggtgggttttggggttgccttatttctgactaatgtgttttgtttatattggtgatttgtaaggattactttgtttggggattcccctccccccagttcagtgattacaggagagcctataaaaatatttaaaaatctgtaaccagaccacatggatactttgtgatttcatatactctttcatgccgtaccgtatactctttcgcatctgagaccttaacttttttaatcttcaggaagttgtctaagaagtttcatatttttttttaattattaatttgcttttaagagaaacttcacagtgcacagggtacaactgaagagtgtaggcaatttcttttatctttaaccaagttttactaaaacttaaagtctattaaaaaatcagtcctggtatctttgatatttagaagacacttagaagtgatattttcccctcttcttttatcttttggcttt

SEQ ID NO: 24016 - DNA, 1185 bp, Mus musculus
acgggcgctcttggatatttctataaagaagataacttgttatcgtaaaattttgaaacaaagtctccgtatgcagccaagtttggctcaggactgccttcctcgtgcctgtgcctggagagttctgggtttacaagccgtggccaccatgcttggatcttttaaactttccgattttagttgcccagagaatcgatcctctagagatggttccgttagaggcgatctctgctttgccttgttttgcccccttggggtttatcgtaagaaattgacattgtctctagaagcttagggaagatcgtggtagccttaaaaagtaaatgaagtatagaaattaatcccagcagagtatttgaggacattccgagtcctcactaaaatcctgtgctgaagttgtccctggtgcgtgtccgttacatcgtcccatttccaaactctgaggaagacacacatgcttctttctcagtgttcaagtctggacttttgatactactctcaatgtactggccttcgggaaatagtggagaggtttaattttaatctaaagaaattctaactcatatcctgatatttgttaatcctaagcttttaatccttaatttcgtttaaaaaaaaaaaaactatgtttgtatctgtagtaagcatataacttgggatggtatatatcaaactcagggttgttttggttttttgggtttttttgtttgttttttgttttgttttgtttttttttgcaagacagggtttctctgtgtagccctggctgtcctagaactcactctgtagaccaggctggcctcgaactcagaagtccgcctgactctgcctcccaagtgctgggattaaaggcgtgcgccaccaccgcctgtccaaactcagggttgtatgagaaatcaattagcaggtagctctttttttaatggtcattccaggcaagtcagtctcccagcccttgggatttggggcagaggagactaaggggagtggggaaacagatctctacacagttcacgatggcccttaaacttgtggtctctgagactcctgctcctttgatgacagcatgcaccaccacacttggctttaaaatattctctctcatagatccctatgaaatatttttaattggccagccgagtcaagacagtctgggttctagttcttcatcagtacttagtttgg

SEQ ID NO: 24017 - DNA, 1189 bp, Mus musculus
aatcaggggaattcagaatccttcttttggttcactttatgaaaatgagaagtcttgaggccagactggtttttcttaaaatggaagtgtgtctttagcacagtatttgacactactgttttctgttggggaggggggtgggtagcagaaaagaaaaagtgcttagaaggaagaagcccagattctagggcgagctggatcatcttggacttcacattctgatctccttcatcttgcttcctggccacctgggaggaaagcagatcacagaggggcagggctggaaggagagacaggagggaagcgttgagcacctgtccttgagctgagcaagtaggatgagtgatttccagatgccccagttgagggacaggtttgcttgcctgaggtgggaagtcctgagcgaaacaggacttccgagttcctgaagaagaaggagagttcctgtgaacttggaagtcttgtttccctcaggacttcccaccatatttgtccgagaattctccagttttcctgacctgaaaaaatttggtgtagacgaggagaagaaggaaggaaaccaccaggggccaactttgaagaccctgatgtctcccccacactaaccagtgagagttaaggacatgctaggtgcaggacaagatcacttctctaagctggcaagcaagcctgctgggtggggtgggggacagagatggggagcatctccttggggttccttcctgccagctggcctggtacccagtcatctcatcccagcccaccagagagctaccaataatgcaaatcttcaaagcaagcagtcagggttgctttccagctccttgacctctctgagtttgacagctccttcccagagatagggcagtgggctggggggagggagatacttgtgtttgctttggaaactctccaagtctgtgagcaatcccaggtttaacgcttaggcctaaggagaattccacgtttcactggggaagtctcatgagacacaagagatttgtgatgttcactggcaccagagcgtttgagacttgggacaagttttctaagacacgatatttattccaaagaatttgacctcagccttagctgtttatcccaagtgtaagaggcctcagaaaacaacagcaccaccttatcctcatgaggatgcgcagtggactcagagtgtgtgtgacccagccca

SEQ ID NO: 24018 - DNA, 1211 bp, Mus musculus
catgtgctattttgataggtgaatgcttaagagggcacgtgatacttagaaagaattaaatataaccccatagccagtgagatgatgttcttgcattggtttgccttgcaatgctttgctggtgttcgctgctagtcttcactgctggtcttcgctgatctccaattgttgtgactttgtagagataaacaccaaagactctctggtggtcgtccagctacttcttgccgcttctactgactcacgccaatttggcagggctttgtggtttcttctggatcaagctgctgctgctgatctgtgttcggtgacactattgaactggactgctgatatctgcagtgatgattggaatcgccccaaagatctacttctcaataggtgcacgacctctgttttctattaactttttcctttccctacctctggtaggtgggctagaggcatttaaagaatctttattaaagtagattttgaaaaatctaagcctacaatatcctgttgttgccatgtgtcacggagactttatagttttgaatctgtaggaccagcccgttcatgtgctccagcagttcatcaatggggtagatgttggagtgggccaattcaaagccctggatctagacctgagaggtatctgaactggtcagcctacaggctctcatacaatcatgcccttggggctagctcaccagcaaccctgcagttgcagagctggctctactgtgctgcccagggctctgtctcccaagtgttgcagcaggtaagggggagggccagctctcccttctctcatcaccccagggcaagggatgaggataggaaagggtatctctctctcaccattctgcctcacagcagacaagtcgtgggaccagctcttccatgctcacacccttggggctggctcacttgtatccccacccctagttccccatctcccccctgaaccctgctatcagggtcagctctactgagcagggttcgctctccagtgtgctacagcaggtgaggggcaggaccagctctcctgctctttacccagttggagccagctttcccacctggtgcctgtggcaaggacataaggcaggggaggggctatctctctctctctgatgctactgcataccaaacaagaggcagggccagctctcccatgctcatgctcttggggctggcttacctgcaacccccacattcagggccac

SEQ ID NO: 24019 - DNA, 1506 bp, Mus musculus
caatatccaaagaagcttagctgagccttgctgctgctcgagctgttttcctccagggcagcccgaaggactgacacgggtgtcttccaggaggtggtcgaagatacggaaggaaggagaattgcacccttgtccacacggaatcaaaacccttgtaaagaactggctttgctagaccaactaagcatttcaagcggcaggctctaatgcttggtgagagaagaggtgggtgctactgtggctcccagtgagcactgaatgcctagtcagggttttaacaagcagcccagggcttgagcctccaaaggaatgccacagtcccacatcctttcccaggaggctttgtacctcctccagatgttcatgttgcttggtgctggcttcaagagcagcacctcattagataaagactgaacacataaaaaaaacccttactatagtgtccagagctcttatccctcctctatcccagaaccccaccttctcttgtctgtctacctgctccaggtgacctgacttctactaaagaatcaaacccgtcatccaaggacagaggttggccatgccggggcatgcactagattcactccaaggaattcactccaagtctaaagtactgggtcacaagtacaattgggggggcttgggaaagggtggcctcctgctctcattgtagtctctggagaagaaagaaaaccaaactcgtaattgtccactgtgtcatgccagcccctaccccttcccagaagtgagtaccatttctctgtgtgcttgagacgggctttgtgagtcagctgcccacatgaagccccacaggccgtgtctgcacagtccagctcatgtcctcaggcaagaaatgggagattcttattgtatatagtcagtaccatgagcgacagacactagctgatgaatagactttgagaactcttgagtcacggtgtttgttctctggccagtgttcagggctctggatgggcagtaggatcagcatcaagcagaaggcctaagaggcccaaccggcaggcctgcacgtgggcgcagtgggtggtaggtactgccctgtttgcttccaggtgcagaactatctcgttctagctcttagcaggctcatcccctgccgggaacaagctcagaagtctctggctccttagcccagacctcccagttccattcatgctggtgagtggcacactccttcactggccctctgccgggcccagttcctctgttctccttgctacttgatttcctattcatagtgtctggttattagatgcctgcgtgcgccaggcatcgtcttcaggatttatatgtgccctagataatattcatgaaaacctcatccagttcactccagctctaaaactgatggatgaaaacagagacacggacaggttctctgctgtgctgtttactgaagctttttactgtgcaaaaatgttggaaacagcttaaaatgttggctagagaagcagataaataatgcatactgcaaccgtatgg

SEQ ID NO: 24020 - DNA, 1146 bp, Mus musculus
tatcttcatccctggcagagacttttctaggtctgcttccctccatgctatgacacaatacttgtcaggagcagtccagggaggaccagtattttggcttacactttcagaggggtttcacggtcatttcagaggaggcaagatagcagaggtaacgtcttctgtggtggcaggagtgttagtagcagcttgtttatgttgaggtgtttgggaagcagagaaaacaggctgaaacactggcaggtatgaccaaccctagtgcctgactgctgccagccagtccctacctgtgatggttcacagtcttcaaaatagtgtcacacacaagttgagggtcaaacattcaacccatgagcctacagaggacataatggttcctaatgacgtctgcccttttgtggcttgaatcagaatggtccccatagatccgtgtgtttgaatgcttggccatagggaatggcactatcaggaggtgtgaccttgttggaggaagtgtgtcactgcaggggaaaagcataaagtcttatgctcaagctaggcccaatgtggcacacagtctcctactactgcctgtggatcaagacatagaactctcagttccttcagcaccatgtctgtctgcatgctgccacactgataatggactaaacctctgaaactgtaagcgagctccaattaaatattttcttttataagagttgctggccatggtgtctcttcacagcaataaaaccctaagattacccattcagggtacaggtaccagatgaaggccacccatgacttagcaagagtgttccaatgatggcattagcctttaacaaacagcaaccccatctttctggtcccgtatctacgcaggaggaggcggcaacttttgtgctcttcctgtcacttaggagaagggtctgtgttgtacttggccctctcactccatgtgcaaactaaagtctgtgctctgcacctacacttctcaaagtgagtccaaggagccccagttacagatcatgctgtggggagaaaataggatttcctgatcaaataagcctgggaggctggggctatgtccagttaccaccatactatatacatgggcgctaaagcccatggctgtccaagtcccttacttatgcaaaatggcatccc

SEQ ID NO: 24021 - DNA, 1166 bp, Mus musculus
tcctgggactacagagatgttagtcaggtctgagccatactgtgtctttcccctgtgttcatgtgctgtcgtggtgcacgtctcctcagtactgggaaagctaaggcaggaagatggtgggtccatttttggcctaggctacaaagcaagtttgaggtgagcttggggtgtgtagacagaccctggtcaagccaaccaaacaacagacaaacaaaaggtaattattaaaaaggaacaaaatacatttttattacttatataaggattatgttgttggctttttgtttgtttaatctgtaaatttatcagtgggtaaatgaactttcctctttattttattttatttttttttttcttgagacagagtcttgagaaacccaggctagcctcaaaattgtaatccccctgcttcagcctctccagtgctgccattacagacatgcatagccaaacccagccaactcttgctctatccgttcttgtgagttaagtttgtgtccacagaacaatacactatgagcaccctgggccttgctcgttttcagaacaattctgactttattctggtgaacttttaacacatagagacctggcctgcacccttgtgttctggctagtccgtcggttaccacagggtgtcggcatgatgaatgaatgactgacagctggtcccgttccttttctgcacacttttgtctctcacagaggattcggaaatcagtcccaggcatcatgctgtccaatctgaaaatgtcgttttccgtctttttctttgtaagacttacctgctcgtgctggcttagagctgaacaattaagtgttccctgtggttcagtctgccagttcctcagctgatgtgagacatctcacttgctgcccttctgtgtccctgcattgctgtgtgtcaggatgctcacgtgactggtacttcttctgggaagcttcctgacacaccttctgtcagcctcccaccccttcccttagcatttgtttggttttttttgttttgttttgttttgttttttgttttgactgggtctctctatgtagaccaggctggccttgaactcagaaatccgcctgcctctgcctcccaagtgctgggattaaaggccaccacgcccgcttcccttagcatttgtaaactaggacatgtagataaaaga

SEQ ID NO: 24022 - DNA, 1169 bp, Mus musculus
cctctgcttccaaagcacttgtgtcctgaaaggatgcggcatggctgtgcgacagcagctttccctgtctttgacaagagacttcagatactctggagaacctcattgtggagtttaaaggaatagattggaatttgaaagcatcaaattgtagaaaaatctacatttttcttttgtagtatgaaacattaataaaaggaaaatcttagagaggtaaactcaccatttattaccctgtaatgttttctaatgaaacacaactatgaaaaggtgtctggcttccgcctggctgagtcctgccgcctcccagggggttgtcgtgggtagcttcttctgtttacatagagggggaccatgtggacaaagaaagatttaactaaatacaatttttcttcgtattgatcttctcactatcttattttctagatctatctcattccccaaccttatttggggtattaattaatttttaacagggaaagcttgctgtgttatcgagatttttagcaccattttacacgaaggctgaaggttagctcttggaaatgacaagttcctttaaaatatgtgtttactttgctctgtgacatttctggatcattccggtcatcaaggctgatcacgtgtactatttcctgctacctgtgaaaaggattgtaagaatgtataaccaacactccattgctttttattagtatgtagagaatttgtatctaattaatgaatgtagttttactgtagtttgtcattgtaaatggaacaaagtacattatctttatagttattctaaaatgtacattatgtaagaattgtaaatatacttggttactttgtatgctgaaaatttacaatattaagtcaataaaaatatctcacttctggcacagttgctgtaagtgctccagctccttttgaactcggttgggttcggtctaactctgctctagctgaggcccagtttggcttttccacccgtcaggttatggaggtccttgttgatcctatttgctgatcacttcacttcagaaatccatgttgatacttaaagtatcttctccctgattccagagatggtgcagcccctacatcgtgcactgaagaccacagattttgttttaagagactttggactctactgcctctcccattgctatgttcgttggagttcc

SEQ ID NO: 24023 - DNA, 1239 bp, Mus musculus
taaaactcttctgtgatttgtttctgaggaagtgcaaacctccacaggctgaaagcatgttgtctttgctgtctcccctcagacttgcaggtcatctggccttgtaggcatttaggtaaaggcaacggtctcatgtgtgatattttaattggtatgtactttgaaatgtgttgtcctaaaccatgatcaaagaagagaaccaggctaaagatagggaaggaagcccacctcctcccaggggctccttggctgctcctggagctcctgcctcctgtgggaaggtgcagatggggctctctggttctgctgcttggggcagttcctccagacctgctgcctccccgctgtggctgtcagcagtgtcttctgccctttaatgatgagagtggtttttgttttttgttttttaaaaaaaagccttaaagattctagtgaaatgccttaaagattatgatggtcctgaatatctttagaattcagagttagctacgtcacttagtgctgtgtagaggctggcagtacaacactacattgctgtggcttacttcattttctcaatgtactgacaaattggacgagggaaaggactggagtgtagcaaggcttttatgaatagtttcaaaggaggctggctcttggatgagttctgctgtgctcactgatagctttctgtggcatgtggcatgtggcagtattccggtccacgcattagagagatgaacacacagtgctggccagacactcaggctgcttgttctgactgccctgctgtctctccaggatggacgtgctgataatagtttcattctttattattcatctgttctttttcatgctctcactgatgaataagaatagaggcgctctgaagggttccttaagctcagctttaccgtggctatagataaaggtgacccagcagcagccgttcaccgggcttcattgcatcgcatgtttaagatttccaaaatttcaaatttatttttaacacagacctcaaagattaattccggcattacagtgtacctaactaattgacgctggtgttcgttgtagtttagtgaattctggcatttacttcccccaaagtaatacagcttgcaacttatacttcagtgcatcaaaggtgcatttggggggaaaatatatatgttcacattttacaaaacttaaatttgtggtcacgttagcagtatttaaaaataaaattgtctgcatattaggtatgattataagcca

SEQ ID NO: 24024 - DNA, 1344 bp, Mus musculus
tagtgcagtattctaaccaaacgttttagccagtgaaccgctcatgtacacactaagcaatgtatacctcatctttgtaaagtaagcctgtttgtgggatgtggaaattgactgtatatatgtatgtggatatgttcatgtacccagatctctgcttttagttttcttattttgtgttcttttcaaattgtttttatcattgtgtgtgtatgggggtttgcctacagtgtgtgtctgttcactgcttgtatgcaaaacctgtggaaaccaaaggaaggtgaccatcagatgccctgaagctagagttatagacagttgtgatctcccctctgggtaataggagttgaacgcaggtcctctggaagagcagccagagctttcacatgctgagccatccctccagcccctcctctgattgtatactcggaaagttccacctactctttatatatgtagaagtggcctattgtacagtggggaaaaagtaagacttaaatgtctgattcttcgtgttttctttaagttcgttcctaaaacttaaaatctcaagtaagacttttggtttcacaaagttgatacttacttcagaggaatgttctaggcctaatagcatgtcggtaggattttaggtagtcaaatgcaactaaataaaaagtatttcctccagggcattgggaagatggctctctcagttgagtgcttgctatgcaagcatgagggcctgagtgtggaatcctagtacccagaaaaccacatatggtcatacatgtctgtaattagagaggtagagaccgctagatccctggaccgtgctggccagccagccttgctgaatcagtgagaccctgtctcaaagtaggcctgagagtaattggaggggaaacagcatgcttctgtggactccccaagagcatgaagacagagcataaaatattttcaacagattgttctaattgaccttgtgccagactgctgaaaacaagatgggtttttttaaattgtaaccatggaggtgggtgctaaacctgtaaaatggctctagtgggtcaaaaggtttgctctccagaaacatggtgggaggagggaaccaactctacatgtactccatggcatgaagtctgtctgctggtgtgtgtgtgtgtgtgtgtgtgtgtgtgatgagtggttagtggatgtgcacttttgtaaatgttttttaaattttcccccctttggagaaagttatctattactggtctgttctagccacagtagatgaattcttactttcaacttttaaattacatcccctgcttaacactattatatcacttccatttactcattaacccatcacaaaatcag

SEQ ID NO: 24025 - DNA, 1122 bp, Mus musculus
ataaacagactgaattatttgttcctaatgatttctaaacagaaagtacctatttagcaaaacaaaatttctgaaaatgtagatttagctagaagtagaaagtcaatttaattacgtttttaaaatatttgttcttaaactggagatggctcagagtgaaagcagttctatcccttgatcccacacaaaggtggaacgagagaacagacttcttcagcttgtcctctgaccctacacgttagctccctgccattctagatacacgaagtaataataattagagatccaccagcctctgcctgcagagtattgggattaaagcttggctccagcacagaggcaattgaaactcattttctaagcccaattctctactatgctaagtgaaattttgctttagaatttttaacccaagattttagattttaaaatcttaaacatttttattttctccacatgcacacacactctcgagcgtgtgtgtgtgtgtgtgtgtgtgtgtgtgtttgtgtgtacttacacacgtattacatgtaatgttcttggaggccagaagaccgcattgaatcctctgagctggagttacagatggttgtgagccatccaccatgaggatgatggggactgaatttgggtcgtccttcacaaggacaagtgccatctcttcacagttacagagcctgttccctgccatacacattgtttgtgtttccatgctgttttgtaatttgtttcatggacatcattttagctgactcagcgattccatgagttctgttcctgaggctgattgttggatagtcttatcattgtaggactaggataacaaacagaaatctcttggtttttgtcccaaggttactattaatgtggtgtggtgtgtgcctgtaatcccagcactcaggagacagaggcaggtggatctctctgagtttaaggctagcctagtctacagagcaacttccaggacacagggctgttacatagaaaaaccaaaaaataaaatggtgtgatagaaggccataggtctgaggaaatgagtactgttaaatcaagttcttcgtacccaggcgaactcaattctaacccaattaatgagtattagtggcattttaatttggt

SEQ ID NO: 24026 - DNA, 1198 bp, Mus musculus
gacccattttcctggagccatctctgacaagatctacatacactgaagagctgaagaggtcccttcggtctccgccagggaacctggtgggagggagaaagatgaggggagggagtttaccttttgattagctgttgaggattacccactgtcttaggaagacctattttaaccttacgtgttcaatgtggtgaatggtttgggccttcacaaattagggggggggcgggcggagggcgcaggtgggtggccctaaacctcagggccaatatggtgcttctatctatctcgagttgattttatataaagatttgtggggaaatatctttatattaaaagcaggttattggaatagaatccaaaatcattttccagccaaaacatccattcgaaatctgtatcccatttgatccttatgtaagtctcatgagtaaacagaacagaatttttttttcttgtgtgcatgaaagaatttgcagatcgcagaggacatacgagacacctctttcattgtgtccacggagtcccgccagtgttacggcaaaggcaaatcacatttgtgtcccacagacacttgaacccatcagtccagtaaccctgtgaccaactctgtaccttctcctgagccagtcacaccaaaggtcactgtgtgctatgtctctgtgcgtccgtagctctgtgtgactggtggccagcagtcagtgactctctgctggctccaggtgggggaatccagagacttttcagctgagatcttgacattctcattaaagattcgagttaggtctgggtgaagatgctgtccggctaagagcgcagcttggttttgcctaggacaggattggtgctatgcttggtgctgcaaacagaccagtggtgccaaggctgggcactgagacacttgcccagcaatgggtctagatgcctgttgtcttgtgtgctcatgtggtgctcccacatgtgggtgcgtgtgtgcatgcactcacacacacacacacacatcacacacacacacacacatcacacacacacacacacacctgctccatagacttcagggtggtcacctcttctttgtattgggaacttctttttaattaaactgagacacagttagagagcctgtgttctcaatcaagggacttttgcatttgaaggctgcttgtccctgaagtttcctagggtctcagtatttgga

SEQ ID NO: 24027 - DNA, 1244 bp, Mus musculus
ttactggcttgcttcccatcggcttgctcaacttgctttcttatagaacccaggactcagggatggcaccacccacaatgggctggccctttcctcatcatcactaattaagaaaatgctcagcagctggctcttagggaggtgttttctcaattgagattccctccttccagataactctagtttgtgtgtgaattaagacaaaccagtacaaatgtattgaatttcatcaacattataagggaaagtagaaattatggcttagtacttgcatggcatgcatgaaacctcttaggtttgatcaccaacatagaagggaaagggttttagaaacatttctaagtgaaatactgatacctatacagccctaatttctttctttactgtctagacactcgctgaaggctcaagcaaatgaagagtgagaacatttaaataaaaaaatgttagatgtgattagtttggaaaatgtgtgaggatgactaggatcacatggtgttccctgtggtaaatgttcaagtaatgtttgaaattcatactcattcatggatggactctttcagagaagcgttgggatacatccatcaacttctggattatttttttagtggggaaaatgtctatgccaaacttgtgaagtctgttgttaaaactactgtttctgtagtaaatagcttgacagatgttagtctgaaaatgtacatagtttcaaacatactgacagacagttcagagcaatgtttggagatttaattgtttgagagaatctcaataggaaatccattcccctgttatccatccatccttgctgtgtttggatgggacacttggctaggtgattattaacttgatctcttgtttcagtcatatttgtggctgaaaagactttggaccacactgacccaaattcaaacaaatgcaaaaagacacttgtgtttaaccacaaattgaatgataacctggaaatcataaggttattttgctttatacaagatttgacttattgtacttatatactaaatcctgggtaggcaatctttttctgacaaaaatgtcatacaacatggtcttgcctcttttacttgcagtttttgcaaaacgtatttgacattgattagtttctgcaagcacttgtctgttttctctaaatctttgcagtgtaagtttctttgtcgtatttatttatttacagttggtaacaggtgtaaatcttgccaaatcctttttagttaaccttatgactt

SEQ ID NO: 24028 - DNA, 1116 bp, Mus musculus
cttcctgtattgaaactgcattaacataaaatctcccttctttgtctcaaaccttttttaaaaaataggttatttattctttttttcctatttgctcttctttttttttttttacaattcaaatgttacctcctttcccagtttcccctctgcaaaaccactattccatccctccttaccctgcttttatgagggtgttcccctaaccatctatccatccctgcccacttcatctccctagcattcctctacactggggcatcaagccttcacaggactaagggcctcccctcccattgatgctgggtaaggccctttcagctcctttaagtcctttccctaactcctccattggggtccctgtgctcagtaccatagttggctttgagaattcgcatctttattggtcagactctggcagagcctctcaggaaacagatgtatcaggcttctgtcagcaagcacttcttggcaacagcaatagtgtctgggtgtgagatagatccccaggtggggcagtctctggatggcctttccttcagtctctgttccactctttctccctgtatttcctttagacagaagcaattctgggttaaagttttggagatggatgggtggtctcatccctcaactggggggttatgcctaacctctggatatggtctcgacaggttctcctcccctttttgggtatttcagctaatgtcatccctgtggggtcctaagaggctcttgctttcctggcatctgggacttttctggttgctaccccaagttccccatcccccattgctacacacctctgttcaatttcctgaccctctgtacatctctgtctcttcccatacctgattcttaccctcttcccccctccctcttctcttccttccaagtccctcccaccctctacttcccttgattattttgttcccccttctaagtaggactgaagcacccactctttggtcttccttcctcttgaacttcatgtggtccttgagttgtattgtgggtattctatgttctttgcctaatgcccacttatcagtgagtacataccatgtatggtcttttgtgactgagctacctcactcaggatggcattttctagtt

SEQ ID NO: 24029 - DNA, 2625 bp, Mus musculus
gcatgtcagagaagtggcatgaagtgtgtcatctacatgacacttcagacttcggcagagtgcagacagactctgctggctttcctcagggtctatcttgccactgccacagaagtttggtgggaactctgtagttcccacaaaaggaaataaatattttgtattaaaataataaaactgagcagctgaggggcctaaatcagagatagagcatacagttagcctcctcagtcccccgcaccatcagaggggtgagtgagcgggcaagtgggagagctattcaagctcagtgatcagcgcactaaacaaaggatagcgacagtgcgcgtctcgcttgtggtccgctgtgtgttttgtacaaatagtaacactaactaaatgacagttgttgtaaacaagtagtgcactgccatcttccacctcagcagaaatgttgatggcaaaggaggacgactaatgtgctgtgcgctgtgctttctctccttacagctattgtccagggagacacgctggaggacatttacaaccaagtgaaacagatcatcgaagaacagtctgggccttacatctgggtcccagcgaaagaaaagctatgaagacggatgttgttctttcttttttccatggtctcatctcttgccctgttgtggagtctgtcttcggtgtcctccacactgacacagatcccctcctcatggtcggcagttgtgcccgttttttgacatctgtgtcccttcatgttgcatcatctgtactattctgtgttactcttggtttctggccacttttcagaatgaagatgaatggcctgaccagctatctagggtttggggagatgcaaaattgtaaaattccttaatgtttaagggaaagttaactttaagagattttcagaaaagctttatatacattcttttccaatttcagtacaaatgaaagaaaagtggttttaatcagtgatttagtggaccttgagcaactgtgcacgcttcactctaatagcatggtttggccagtgtattagctctcaagttctttcctcaattgacttctgctattaaagtaatgatttcattaaaaacaaataagaaaaatagggatttatttcaaaattaatgtctgagttaactcataatttcaggagttgtttgttattcgtggcaggtctttattgtgtgccctcccatgggacacgtgccaggactaaccatggaggtgtgcagctctgtgggaagtgagtggctctcgagccttgtccgtacactgtggttacggctctgtcgcggtcaaagaactcactttacacacagaactgcagacaagaaagggtttcggtggacttgtagcaatcatggcagtgggaaggagtccaattcatagcctaaaattttaatgtatgcttagggaggggtcagattttaatgactattttacccacaataactgcctattttgttataataaaatatatataaatatatataaaactttctttaactaaactctgtaactatgggaattattttctttacatagttgcacacacaaacatatatatatatatttaaaatatatttttcttttgccacctacttctaactttttgtttggtttttaaattaaatattaattgatgagacttaccgtccttaatcatgtgaactgaagacaagtgtccggtggcggtgaggagaaacctctaggagattaggttgtgagtaggcgccaagcctgttctcctctttcctacagaagttccagaaggttcctaggtttcctgtcagtgttgtgttcttgtcatggagtttgatttcggtcctctgcctttcctcctagttctcctcattttattaatagacagacaaactccatttttgcgactccccgagacacttcatcttgcgtagctgcgctgaactagaattgcacaggtgttaagtaaacgacttgagaaaggttagtgagaggcagatgccttcagaagtcactttctctagtccattattaatatcatttggcttccctttgctctttggaactgtttattcgatacgtgattttggcaactctttaaaatttcctaaatgagtactgggttgtaaagaattatccattccatttatgagaaagaggagaacagctaataaactttattgtaaaatccatatgttaaatgtgtcttgaattttggaagtttctgtttttaataagctgtcacttactggggtggttcgccgcattacataacaagttagatttgctatgtcatgagcagtgtatgtagttcttacactaaatgccgtaaattgctgaaaaacaaactcaggaagaaaaaggaaagaagttgtgatttccataaaccacctcacctgcagagggaagcccagcctagccactctgacatgtggccggtgccaagcactgagggagcgggaaaggtgccattcgcatacggaaagttgtgttggatttctttccagatatctttaagagatttttttaagaaaatatatctgtaatgttttctagattcttgcctgaatattaatagtgtaactactaattgctgtattatgttaggattttacaacaattttgaagaaagaaccaagcctcactacctaa

SEQ ID NO: 24030 - DNA, 1796 bp, Mus musculus
tcgtcagtttgtggttattcttttgtaaggaacttgtgcttgttagtgttgataaggtttggggttggggtctgggggcttcctgagataagatcttgccaggtagccaaactgacatcaaacttgagatcaaatcctcttgcctctgcctcctaaataatgaaattacagatgggtgcacaccaggccagcgataaggaaatctgagagttggaaataatcctgtacatttcattaagtagttgttactaaactcatggtaggggcctcccccctgcaacaatgcctagaacaaaagcaaaatgcactcaaatgaattttactctaatttttatgctctagtggtttgtggccacctgaaactggctagctgtgtctggcgtgagtgcagaggcagatctgtggcatcagcatcccacagtgctgtttctttgttctcaattaaggttcgggacgagtatcgggaggactacgatgctggaagaggcggctatgggaaactggcacaaaaacagtgagtggggtgagccccaagtacacaggtcacggtacatcaacacagtggtgatgctggagaacgttacccaaggtctcatcagtgtctctgctgtactggaagccacctctggttttcctctgaaatattaaaagacagaatccaaagaacgcctttaactctagtcttattaggatgattttctattattaggtcaaaaagctctacccaggcaacagacacaatctgtgctgattaaactgtcagctggataccagacttttagggagactggacaaacatcaggactggcttttataagtaggcaggtaatcttcatggggactgaggtgattttcttgtacgttttacgttttcctatttaccagtggggttttgctgtagcctgtgtaactctgctctgaggaacaggtgtttcccaactggattcgccttttctagtccagtagagttggcaccaatccagccttaaatggtcctggggatgccacctgcttctatgctttatgcatcaggatactctcaggacgtgagtgttcacaagacacgtttcccaaaaaatgcaaaggtttcactgaaaatttaaatcaaaacaaaacaaaaacaaagaccttgttacacagagagcctccgatatcctaagtagggaggacactgtcagtagggaacggaatgaaaactcaaatgttgcctgcagttgagcaaggaagctgaggttggaaccattaaactatttcttcccattttcaaaaggaccttagagtagagtgggctttagaaaagggcttcacccagctgcttgggaggctgaagcaagatgatcaaaaggtaaaggccagcccggggccttgtgaatctgcctcacaatcggaacttaaaggggcaggggaaggtgccaggcacagcagttaaggacttattatgtgagtgttttgcctttaatccttggggttcaacaataaaagagtctgaaaattgggagagaaaacctactctaggagcctctggttacacatattttaggctttttttccccctgaaattgtacttactgaggtccatgtattaataagaggtcagtctgtacaaaaatctaaagattttttcactttctttgtattattatatatgagtaacttttgataccagaataaatctttcgtgtttgtcactaaagcatcggagtctcgctagtttctcatggttgggtcacagcatccttgtcgctgtattaagtgcagttttcttggagccataacaactgttaatgcttaggaag

SEQ ID NO: 24031 - DNA, 2634 bp, Mus musculus
agtccgtagtgtaaagccgggtcagcagtccttgcgctgaccgaggtggaggcactttctgttgctgcagctggaggttgtatcgaccctggggaagatgtcttcattgcttctgtggtactggggatggaacgcagggcccatttctatgttaggcgagtgctctaccactgaggtacaaccttagccctctttataaaacatttttacattttgagacctggtcttatgatgttgccgtaggctggccttgaatttgctcagtggctgagcctgatcttctgtttaatactcctgtcacccaagtaactaggattactggccaggctgcttgaagatcttttagggaaggggtttggggaacagggtctcgtgtgtcagactagcctcaaaggtgctaggattataggtctctgtcaccatgcccagctaaggatgtagtcttaagactttcagacataattataccagcatgagcttcttcaaaatttatgtgcaagatgttactatgggattttgttggtgtgcctatactgaaatagccagtagtaagatgactgactcaaaggtcttaaggaagtatttcacttccccagtaagagacttcatgcagaagttacagttgtgttcctttgagattcttattgaaaaagggtctttgtttagcccaggctggcctcatacttgcagtcctcctgcctcagcctccctgatgtgtagattacatgggtgcgtcattatgtccaatgcctgggagaataatcataacgcccacctctgcagtctgagaagccgtcctgtcagctgtgagggatgcaggaatgaacactcagctatccaggtccagttactctttcctttctagtatgctaggacaccttcaggtggactcttcagcttgctttagcctacatgctgggtgtcttcagtatgttctacacctgtttcctgtttctgccattagtgagatctggtttcagcacacagttgttctttctcttctttattgtttttgtttgtttgtttgtttgtttgtttttcaagacagggtttctctgtagccctggctgtcctggaactcactctgcagaccaggctggcctcaaactcagaaatccacctgcctctgtctcccgagtgctgggattaaaggcgtgcaccaccaggcctgtcgttctttttcttcttgtaattacatgtaaacctctgtttagcacaatcttttgatgtttgcagtaatgctttactgtcactggcttggcactgaattttgatacccataaagtactggcagactttatgtcactgggatgaatgtaagccttgcacaaacttagagctattcatatatgatgagcctttagcaagctgcccggtcctcatgggcaaacttacccggctgtagttgcttttttccagtagtagttccttttgttaaacctctagcaatcaataaagatttaattcatcttttagttttcttaagaattatggagacttaactttcagttggcctctcaaggaagagaaaagaagttgctgccaataacttcacagcacacttttggctttgcactgtattctgtttaccattgaatatgaataaatggtcatcgtgagcttatggttggaatataccagtgcagagctaactagggacacagccagtacttgtctagtgtgacttgtccctttcctctgcagttggggctcactgcttcttccctgccttaggagccattgggggtctgagtgggtcagagacagtgagtgaataatgtcaatgaaatacactgatgtatctgctgtgcttcattatgttaagagaccaaggtaatcaacaattataaagtacatcattttgctatgtgctaggtaggctctgcctcctggccagtagatgtctaagatctggggaatagcatccaagaaatgctattgtatttggggattacaaaagcagacctagacaagttgttcacttgaatgatacctgttggtcagattttattaaaagattatgatcatgtaaaattagtcagtactcagcccttctagcaaaatatttttttgaaaaataaactaaatacctttataaacatgtgttctgttgtgtttaataatgtgtattgtgttgtggatagtgcatttcttagtgtcattccagtggtgacaaggctcactgtgtagccctacctagccccacccacagagcagccctgcagcaacagctctttcttgggcctgctttaccttatcctctacacagctcttgccatgtgcagctactgagtatggaaaatgtgcttaacgtgacgaaaatctcaagcttcattttactttttattgccagatggtaacacacacctttaatcattcgtgtatttgttttgtcttttgttctggtggccttggagccttagaccctcctgcctctgcctcccattgacccctagtaggaccaaaagtgtgcaccaccaatgcttacttattagtgttctgcatgtaagtgtaccatggtgcatgcagtactcagagagggctagagtcacagacagttgtagctaccacttgagtgctgggaagtgaacccagtcctctgcaggcagcaagtaccaagacattgctccagcc

SEQ ID NO: 24032 - DNA, 1179 bp, Mus musculus
ccagcatagctctgtctgcacgcattgagttcccttcaacagacagctgtctgtccagtgaccaccagtcctaaatgtgctatgccgaaatatctcttcatgggctcatgtgtatgcactgtgttcttgcctgcatgctttataccttatcagaccatggttagaattagaaggtaggtgttgaaacaggctgcatccagttttgaatatgaaaatcttagaagcatactgagatctgcaatcactaaactgtcagaatgtatgggccccgtgagcattgggcaggggcagtgtctgcttatcctagccactagatcaggagaaggaattccttctcgttggcatctgacctcagcagacactccccccgcctgctcccacacggttatcatagataatacaatgttttctttcttttctgagacagtcttgctgtataggcctggttagcttagatgagtctagcctggaacccacagctatctacctgcctctgctgcccagtagtggaataatggcatgcaccactgtgtcctgtttaaacttttttctaatgtcgtttcaggctatatagttaatgggtccaggagtgtagctcagtggtgagtcacatgcctatcatgcacaaagccccaagcttgaacccgtgctccactaaaaacagtatctaggccactacttgacagtattgtataatttcaaattttaaaaaaattgctaaaatcttgttaaatgtttccttttggttttctaacaatcgcactgacaggacagattgctctgtcagcgctgttctgtgatgcgtatgtgtgatgttctgtgaagtggcttttctgaagctgcgtgtaggaaacatccccacacattccctctcttatcagtacatccgctgaccactctggcagagatgctgtgtttgatattagagttacgaacagattcaagcattggcctggtcttgaaagaactcaagtctttctcattcactaccctatgctaaaaacagataaccttgtcaaacatgctatttctgcgtcaagaaaaacaattagttgaagttcaaagaaaggagtcacttttttatgtatttattttttggtttgctttccttgttttggtaggtagaaattgagttgggtaaaaagcctatttctattttgttttcagattttatattgc

SEQ ID NO: 24033 - DNA, 2827 bp, Mus musculus
tgagtttccatccctagcacccacataagaagctaagtgtggctatatatgtttataaaccctcgtgctgagggaatagacagacccccggggcttgtttggtcagcctaatcaggaaatacggggaagagtgacagaggagagtgtcagaggagagctcctggcgacctctggtctccacagatgcacacagataagatgagagcatacagccacaaacaagctcattcaccacacacaaaccacccctcctggggctgtaaaagtgatgtgccgcgtgtgagggctttagtttgttaaatgatccagaggtaatttgggggctagagtttctaaatgagaaacacctctaagctttctctctcccttccatttggcagcatcctttcctgaaactggccaaaccattgtctagcttgacgccactgatcctggcagctaaagaagcaatgaagagtaaccgctaacatcgtcaccgaggcctcctattcccttatccattttttaaaagaagtcttttaatacatgaaattgttactctgaggggtgtaaagagacagtctgcatcacatggaggaaaaaaaaaactattattttctaaagatgaccaagagaaaattgcagtaagagagctatgactttgaaatgagcccctgctttagggtccaagaggaacggtggactgcatcactagccttacatgtcccgcagaccgcgcttgacgttcgcatactgtgtgatgacttttagtatggcagatcctgttcctgtctcccctgggggatttcccatacttgaatgtcagattcaagtttttctgagtatttcatctgctgatcttctctccttcgtgaccttcccttcctctaaccctttccttttaagttgtcgttcggagtttttcttatgcctaaatgcaaggcagatgtgataaaatgattgatgtagctctttacattgggaaaggagcttgacatgcttagcttcctatagaagtcaggaccggctggtgtgcggagtgtttcagttcagagcctaaactgaaagggggaaagtatgtgatttttaccttttttaacaaatgtgaaagagtcagctttagaaattttgtggtagtaagtttgacatttgttacatgtatagaaagaggactaataatctatatttataactaaatcattgatacagagaagaaaaatcccactgactgtatattctcaccattttgtagtctttctctgcctgtttctcctcatatttggctttaggaaccaaagtgatctgcgcttgttgacgcgggctgtgtgactttggtgccactcccttcctgtgtttccttggaaataagtgtctgtatatgttgtgattttaggtgtccgttttgaatcaacccttatttcacatacaccccctccaccctctagggcaagtaataaccattgaattttcagaatttaaaagttaaaagatttttcctatttaaaaggaaaaatatttgggactagcagaaaccaagtgagatttgaaccttggtgagttctaggctagttgtaataatgaaatgtcaatattgtagaggtgaagtttctgacagtaaactgtaaagactcatctaatctacagtgttcctgacccattatcaatgttttactgtttatgacagatgaaatagtgcagtacttgatggatcatttgaggtgttgggtactttagtgtttgtttttccaaatgagtagggtattcattgtaaaaaaacaaaaacaaaaaacaaactggagaaaggaaactgcagtgttcgtattgttagtaatacttttattttaaagatttaataaaaggtctgtgacctgtagtagtagctgttagctgccctctccccactcctgcctttcctcttctctgcttctctgtattgctttgttgttttgcctgtgaggaggtattgctgtctatcctatggtcctgcaaccataggaaagaaaatccctgtggttggttcaggtttgtccccaccatcccctttcaaagaacgtgacacatactcgccctgccattctgcagagtacaaatcataaatgagtaagtttgctctttgggttgggggaaggggcagggtttcatttcctggtgttcccattagaatacaggataagaagagatcactaggggctttcagcaaaagtcaacatctagagcacttactggcctgttttccatgcgagctccttttcctctggactgtattttcctacagctttcactaaattacaggaataaagtggtttctttgtggtgggaagctaggctgcctcttgagttctggctgtgagtgttgtttgtgagccgctgtctggatagattgtgatgacagtgctgccagcatagaagaaagccagctacatggtggcactgcttaagaaggtgctccatcctcaatcctcgagagcaccggggacacaggctgctgcccctccttaggctgtgactccacaccggcttgtccacacagaagcagtctggggtttgtccttagaatttcttggatggttatttacatgtccattgctggcgacggactctgtcattcaaacctgactccaaggttaagggagctgcactgtgctttattctctcctgacctggacaaactaacctggaatagttaatcgtaatggttaattttgagatgtgtcatttttaaacagaataatctttaaagcaatatagaattgtgatttattagttaattttaaattaaaattttgagatcctgttgaaagacaattgtatgaattgagattcttttttttttttttttttaaagact

SEQ ID NO: 24034 - DNA, 1525 bp, Mus musculus
tggtccttactcgctgcatcttcagggtattacagttcctcaagttctcatgagtttgactcagaacttctgtttttgtcttgttgttggtaaatgttcatttgcaacaagtttttgaaggtggtgactggaaaacaaaatcacatggttattcattcctcattgaacttagagtcggataattgtctaacaatttaacaccaacccactctttctgtgtcttgttttgattttggtttttttaaaagctgaactcacagcgatctccctgcgtcaacctccccaaaactgggattagagggaatgctaccattcccagaacaacaagccattttagctcaacgatttgagtgttcctagtcaggacaggcctctagagaacagagaaccttcatttatagcctgatctatttactagaaatcttgttagtgagataagtagtggctgcccagatcattaaggtaaactgctgagtgttaaaggaggtcgtgctcttggtggtgcgtaaagagcacatggaagacacagttgtacctgagctgagtatgagtcacctgagtcagtgctgttcaaacatggccagatctcagagtggcttaaaagtactgtggatgggtccgtatcctgatcctggtgtcagaactgggatatgttccgaccataaggatttaaaaatgccctggtttcagaatgctaccaaaggttgagagcagttgtgtcgaatttgacctagaagtttctcacctacaaagtaggaagttcttgccccactcattgcctcacggggatgcagagggcgcaagagaacactgggagtggtggcggtatggatgaacaatggtgcagaagtgtagcatctgtcacattccagctgcagccaccgtgaccagggaaacgtgtcgttgaatttgttgttgctgtaggaatctcttacgtcatgcataaggaagcatgcaggggtggaacaaaatgttaattaatattactcttattcactatggccttctgtcctacttgagacaggcggttatattacctaagttttcataggaaagaagaaatattaaggcttaattctgtaatgttcattggctcataattcattaaaaacttcatacaaggaactctgtggtagtccatgtcatttcatagttgccattttttctcattgttgacttcggaatgtcaagccatttcgttcatctctcatttttactctccagcttacatccagatggaacagagcatgtgcaatggctccgtgctcaggtagtccctgcatgactgggaagcatgaaaaacagccaagacccaaactttacagaagttagttaacttcatagtttatatatctttgaatcaagaaataacaattggatgagacagaaattaaggagttttcaaaagtattagtattaaaatgattccataagccaaggctaccacaattgaggtgttgatgattgttggaacagtccgtgtccaaaccaaatgcctgccctcagacacccttccccctccaga

SEQ ID NO: 24035 - DNA, 1210 bp, Mus musculus
cctgcgtgcccgtgtttctttttgttttgtttgtttgtttgttttcagtactgaggattgaatacatgctagctacacccccagcctggaggaatatctatgaatctgatcactgtagttgtaaaactgtatctggtaaatattatgaatgagagttgcatgctagtctgagagtcagtaggggaggttttaactaggtgcggagggcaggaagagacttcctcataagacatggtgcgtaagctcagtgacacctcaaagtgttcctccaagaggagcaagaagagcctctgaggagggagtctggcttgtgtgagaaacaagaagactgtcagcagctgcagagtgtacaggccatctggtttgagtaaggtgaaaggactgggacacgcacactccagtgaagcttttccaattggaagccagaacaaaggccttggggagtggtggcatgaccagtttgtgggttagttttgactccactatggagaacaggttggagtttgattttagaaatgtggtagatccattagagaggatgtagtgaaggagatggagaaaaatggacaagcttagggaatagaagctgcagaatttgatgactgttcctcctattgcctttagatatggcactaggattttaggtcatcataaattaaaattgattttttttcactcagagaatattaagatactgggattatctatgtattctctgaaatttgcgggatcaaacagtttttggggtttttgttttaaagactagaatttggcagtagttttgaactagagctgaggagggaggagctaagggtgacttgtagatagtatttggcttacataatctaagtatcacttgagggagagtttgaaggaaaatgacagcaagttcacttgtggaagagcagaattcatagtgcttttgagatattcaccatatttcagataggcagcttctggtagccaaggattagaggcagtctaggctcaagataggaatttctagttggattgaatgaagggaaatacgattgcaaaggtgtccgggaactagctatattatggaagaaggccttttgaaagtctttgatatattctttgggctttattctgcaattggaaaagccatacaagtttgaccagaagaacagtgaagtaaaactgtgctttaaaaagattaggccatgagagacagagggcacgtagagga

SEQ ID NO: 24036 - DNA, 1210 bp, Mus musculus
atgtcagagaaggtccatagcacgtacaggtcaacacactctggaccagaagcttgtaaggtgaaagaggccatgtcctgatgccagctattggccatatgttaaacataattaaagctactgtaggtttccatgtcagtgaaatgacttgtcctgatcttacttggcacaccaggtaaaaaaaataaagttaagaaagaattatggctgggcaatggtggcgcacacctttaatcccagcactccggaggcagaggcaggcggatttctgagtttgaggccagcctggtctacaaagtgagttccaggacagccagggctatacagagaaaccctgtctcaaaaaacaaaaaacaaaaacaaaaaaaaaaaagaaaaggtgggtacagtggtgatgagaatccctcattagtaatatgtgatcgtgtctagtgaccattcatctaagagatgagtgtagctggcttatacgttttctctatatatactcaggagttttgttttctacaggaaactgataggagtgacacgaagagccctgtgttgcaagacacagaaattgaaaaaaatataccaacactttctcctcagacctgcctggaaactcaagaacaaggttcggagtcttctgcagggatacccgggccacagttatgtgtaggagacactaaagagtcccttgagggaaaagttgaaacagtatcaaccagtcctgatgatttatgtattgtaaatgatgatggacctagagccacagttttttactctaatgaagctgcagttaactcttctagtaaaatagaaaatgaagaatactctgtgacaggtgtgccccagttaactgggggcaacagagttccaacagagagtagagtgtatcacttactagttgaagaagagatttccgacagagaaaaccaggaatctgtatttgaagaagtcatggatccatgtttttctgcaaaaagaaggaaaatattcatcgaatcctcctcagatcaagaagaaacagaagtgaattttacacaaaaactgatagatttggaacatatgctttttgagagacataagcaagaagagcaggacagattgttagcattacaacttcagaaagaggtagataaagagcaaatggtgccaaaccggcagaaaggatccccagatcagtaccagctacgcacaccctcacccccagacaggctgctgaata

SEQ ID NO: 24037 - DNA, 1409 bp, Mus musculus
ttaatcccagcactcgggaggcagaggcaggcagatttctgagttcgaggccagcctggtctacagagtgagttccaggacagccagggctatacagagaaaccctgcctcaaaaaaaaagaaaagaaaagaaaaaaaaaagattttattattatacataagtacactgtagctgacttcagacagaccagaagagggtattagatctcattacgagtggttgtgagccaccgtgtggttgctgggatttgaacttaggaccttcagcagcactcttacctgctgagccatctctacagccccactgctagattgttaatgcaagggtttaagagtggcatgggctgagtggtggattggtaggtagggaatccctggaactgaatgggtaatcagaaactgggtccaacatggacttcaggcttcttgtagcagaacattctctttaatccctttaagtggcagaaaatatttagagtttacagcttttccctccatggcatcttggtgtgagagggcgaattggtatatttttactgatcttgtctagaaacaaataaattattgtaagaaaatgatactacgctctgctgtcgaacacctggctttaccatcctcgctgcttactggctcagacacatgcttgtatgtgcgcacagatggaaaatggtgtgggtttgtcttgcattaccctgggatccagacgaatcttgtcaagttgagcttctatcttttgttaagacaacttagcaagctgtagtttcagtagattctcttctggtgtcttggctccatttatttcctgtgaacataataaactgtcctaatgcagtgtttggctttttccacatttttgtcatttgaattttttcttccgagttttaaaactttttttatgtttatcttggcaatttttttttcctctaaaagcaatttaacttaatgctttaggaagatagtgatgggacttcaaattagatattatcacattcaatctttgtgaaatagttcatgaccaaaaagggactaagaagaacattcctgtatggtatagtgagagtttatatatttaccaccagtttgtccgtgggcaatcatcctgattgaagttgttttcaggtttttagtttctctgttagctctctgttattcttactgttgatacctttgtgttagcattagattttttaaattggtcattagtgaactgctttttcctcatttttgttggaaaatattagagtattaaagctgtgcagatttgaaaaaaagatgcctggcatgatggcacagcctaattccagcatgtcagaggcaagggcatctcagttcttaaaaaaaaaaattaaaagaatgattaataaaaattggctctcatgttcattttactacactttaataaaaaaatg

SEQ ID NO: 24038 - DNA, 2122 bp, Mus musculus
gaagaccttcaaatttggttcatacgacaacagttattaagagagatttctagtaatcttcagatgtgaggttttttttctgccaacaaaagtcacattcaaattgtatttggtgaaagcttttttcagtattacttagaagaggccacctgaatctgtatagtcctattcatcagcttcactgtatgctcagttctttccttgagctttaagtagagttctctagcagggcaggtagtgatttggtgggaaaaccaaaacttgataaactgcttataaaaccatttctacagaatgacctatcttgtcagttggagatttttcagtgatccttgaacctgtacacaatctaaattgtgatgactcagaaacctttggatgcctgtgtacgtgcagatctctctcggcaactagggggttaaaaagataagcttaagagacgtgctagtatgcaattatagaatgtggttgttaatggctggattttgagggacctccctaaagaatgagttatgtatctccacaaggaaatcatggaaaattttgttatttttcagtgagtccttttgaattaatgtttttacatttttttctaagtctgtgtaagtgcttatgtataagtatataattgtataaatatttataaatatatttatataattacaatttcatttataccttgagtcaaagttctctcttttgattggtgactgaacaataccactttggtgtttttcatagtgcttgagacttaaccaacagtttggatttatttagcaagcatgttaattcctcagttgtatctctgaacttgagtaaaatctggctgtctgaggaatagagtcttacaggcttaaaaaaccagtagtcaaggtcagcagtcttatgcttcaggagccacagggtaaaacgtgagagagtacccagcttcgccacttgggcaccatctcctctgctggcacaggtccagctaaagcccaagtccatcagaaatatgaagtcaagaattttcccttagaggactctgctgcaccctcttatcctgttaaattaggttctctatatacagtaaaacctatcttgagaacctgaggcaggatgttcagaagtgagagggtgtatagttctttacgtgcttagcactggcaaatccatttatgagaaaccaaagtaagataagcaagtatatatgtgagttaagagaagaacatggtgttatgcacctatagagcttagtcaggatgctcagctgtaggggactttatttaattttgacaaggcgtatgattatcaaggctggcccatgggaggaagggttatggattatacatgagagaagtaagtggggatatttccttgcttgagaatttaatctgcataaggagtttgccttagttcctctgcaagttattttgctttcaagggagagctttcactggacagtcaggtgaggtctgtgaggttagttaaatgtagtgactccctatatgtagtagaaacagctcaaaagttgtttttaagtaaggaagaaagggacaagatagacttgagtgacatatagaaggtatggaaacttgtagggaaagtgaaaggagagctttgtgtactggggggagaacagtgccaggggaagggagcagctagcatgtgtggtgtgtactctgtgtgtgtttcctccttcagtcttcataccgtccctacacagtatatatgccttctactcatttataaatgtggaagaaaactagaatttatacagcgtgttcagtacgtcgtgctagtaagggccaaattaaaattagagcccagagtctgtccttgccttgtgtgctgtgttgttccttgtcagttggagtccatgtactctaaggtcaccttattattattactctaaggtcatcttactattatttagatttataaattaagggtctttgtttatttaaagatggaagtagtatttggggccaagattatggatttgcactaccctataaaaatcttaattatgccattttaaagagaagatacaattattttttctggtagattatccacaatagattattaaacaactctttgcttttataccaggttttatcttgtatccaaatgtactgta

SEQ ID NO: 24039 - DNA, 2520 bp, Mus musculus
agagcctgcctggtgggtcagtgcccccactgtcggaaacagcttttcttcctctgagtcttggtttttttgttttttttgtttttgtttttgttttttttgtttttttttttttgaaaactggaattgaactagattattagttctttgtcttttcaagtcataggactttggatgtttgaagttttgacctgaatagggagtgctagggccaactactaacagagtcaatttcatggaggaagtgtaaatgtgcacctggagtcacagccctacaaagaactatgtccaccccaaagttttaagcatctagttatttaatgacatcctcagactaattaaaagtatacaaactatacttgctaagtttttccctggattcaaggatcttttgtccaatcttttacagacctcattgtaatgactgaaatccctcagtacagtagttacagaactagtgatctttaaacagccagttatctattttttaaaacttaatactgtaagcttaatgaattttaaaaatgtcttaaatgtaatgaatgcagaacagataatgtctccaatactggagctgtatttgtgtgctttaagataaggactggcagttacaaagctgaattgtgtgagttgtgaagttcagaattggtttgggcagatgtgaccttttcaagattttcatcaagttgatatttaaaaatagttcttgtcccatggaatggatcttcatctcaccttttagagctccttcatttatgtacttgatagtaagtttcagagtacaaaattatgagtaatgccttgtgtaaaactaaaacttgaaaagtaatgagggtaggaagagccagccctgtgagggctcacacttccccggcagcttaaaccgtcaggagtaggctgcttctaggcaatcactctgcctcccgagttactcccagcccctgaacagacacctaaaggccctgtgagcagggagccaattccagcgccactggtttgccttacagaacatttcggttctttactgtgaaacttaagagtccctagtccacattagagtggggcaaaaatgttcttcagagctcagaataaccaaagagtaccattctaatatattgatttcttgtataacacagagatttaaatgcttcagtggtgatcatttggattttaaactcacctttgcgtcagttctcataatgagacagcttagaattaaaggtatttggcttatttaagaacagaggttatcatagctttggtcaagttttgtttgttttgtttttagagacagggtttctctatgtaataaccctggctgtcctgggctcgctttgtggaccaggcaggctgacctcaaactcatagagatctgcctgccaagtgctgtgactagaggtctgtgccaccacacctggctggttagtttctttattaaggaactcaggtggctagattattggatatgatgaaacctgaagtagaacatcagtttaatcctttatccatttgggggtgggagtgtcttttattttgttttcaaacgttcttacatagttcaggctaacctctcctctcttttttttttttttttctttgagataagttttctttatctagtcctggttgtcctggatcaggctgacctcttcagtgactgtgtagttagttgaacataaccttgaacctctgggtcctccttgggttaaagtgagccacatgcctgtctcttcttcattctttacttaattcctctaaaattggtcatgaaatttaagacacttagctatgcttttaaaattatatttctaagccttaatgtatatttctcatttttataaattaatatagaagagaatattttgaggcaaacaccgtttttacaactcatttcttcctaaggagaattcttgttccaagtaagagaatggctggctctgtgataaacctctaaggtagttggtttggttggttggttacaggttgccctaactaaatctcaccattttcataaacattttgttttttaaaaacacaactcctgaaccagtacttagtttcaagcacattcattagcccagactggcctggagctcactagccctaggttggccttgagctcttctgggattaagccactacacctggtttaacctgattaattttgaccatgtttttaatatggcctgtatgccatataattccaaaataaacttgggtgatccatataaattactttattaagcataatgaagaagttattaaaatttgcttgtgggattggagagatagctgttagcttagcaggtaagaccacttgttcttgcagaagtcctaggtttgagtcccagcaaccatatagctgcccacaactgtctataactccagttccaagcaatgcaactgttctgagtctgaggccaccaggcacgcacacaggaaggaagctgaggcaagaggattgctagttccatgtcaacctgaagttacataccaaaaccttaactcaaaatcctcttt

SEQ ID NO: 24040 - DNA, 2660 bp, Mus musculus
attttgcttatgcttggtttcataagaagccagcgggtgagatggctcagcagttaagagcacttgctgctcttgtagaggccctgggtgggtttagttctcagtcctcacacagtgggccaccaccatccataactccagctccaggggatccagtgctgtcttctgacctctgaagacttctataccactagacatgcaggcaaaacagtcatatgtacaaaataaatggaaacaaaacatgtgtttaaagacttgctcgtatattagggatgtgaatccaatggtagtattctacctaagaacagtcacattgctctataggtatgggaagtaaattgctgcacttaattctttggcagtaagcagcagacctttaatgtgtaatggtacgtctagcaactaagatcttatatgccttatgaggtcacttaggtttttaaatgagaaagagaagagtcaagctaaactagaataataggacatacctaatgagctgtcttcaccagacgagaagctatgggctggtgtgtagctcaggacccttgtttggatccccagggttactaagaagaaaagtttttaatctaactgggacagtgagagtcctgtattggccatcaaaaattgggaactgttttaaatgagataagttctgacctaaaattgaattttccttttctcaaaattttttatatttactcttattcatggtctcatctgggaatcttaactaatagggagccattcactaactccttggtttctttcctgcatcaagataactgatggtatagtatgtgtcaccagaatgattttcaggctaatgacattagaatatttatattcagctggaaatcttgttttcaacagaatgagtttatggtatgcttttctcaaagctgctatgttctcaatgaaaaataatcaataaatactaagtcatatgactcaaaatacaaataggctcatgaaactaatcttatgctctaagttgtgctgacgctctgcctgcctctagaatccccatgttagcagctaattaaagtctcatgggacctctagcctcagatgtcacagtgagtgctacctgatggtgatgtgccgaatgaagactttggaggcttctgtccaagttttggcatgaatattttagacactagtttttcacccctgagaatttttttttcagacaatttttctgttggtttttaaagaaattctaagcatctaggtgtcttttttccccccttctctttaactgttaagaaagttgtctttccggtgttgttctatgtaaacttcaggagtatttgtgggttttgcatgttttgtatgagttcagtttaaacaatgcatttaaatcacctgggatgtccgattctggcacgtcttcactgtttgtgttttaaacatgtttcatgtgtttccaaacctcacttggtatcttacttgagatcattgaagttgatttgggatatttgctttacaagtgttttttcaagcagttcttaacacagtgtttagatgtttcctgggctgtttatatgctcagtttgccctgaacaaagtggtggtcttactaagatttaaattcttaatataaaacaagttctacgtttaatctatagttcagcttgttgctgaatccaagacaatgctaatgctaattcttgtggtgtgttcctgaccagtgccctctagtatgcttgtgagtttccaggtttcttcccacagtgctaggagatcatttactgttacaaaacttttccaaatcggaatgaaggctgtgagagaagcaaggtggggaaatcacaccatccactgcagtttctgttcaaggtgcgtgaaagaccctcccaaatatctagtgattgtaaaggtgctagggggagcctgaatccaaaggaacacacaggcaggagagctaggtctcctggctaagactccctggactccactgcaccctctgtacctagggtacgttagacacctccctattatgtttccatggacacacataggctattataggcacgtgctttctgaagtgaggatctcgctgttgaagatttatttcctagtttgggctgtaccaaattgtgaatactcgctgtgttgtacccagttgctttatattaatactgcaacttgaattggggtgggtgggtggggcagcagggtgtgggagggagggtaatggaataaagtcttttgaagacatcagctcacactgtgctgagagagggaccaaactcaaggaaacctctgatctataaattcaactgctgcattttttataaatacatgtaaatgtcctgttgtaatatttgatcttggaaataaaaaaaaaacttttcagtattatgttttgagtcattgtttttgttaccagtgggtatatcctttcatgtaattccaattacaaaagcttgtccttacagccttgtgttagagtttttttgaaacttggtttcccagaactttttttttttttaaagatttatttattactatatgtaagtacactgtaactgtcttcagacataccagaagagggagtcagatcttgttacggatggttgtaagccaccatgtggttgccgggatttgaactctggaccttcggaagagcagttgggtgctcttacccactgagc

SEQ ID NO: 24041 - DNA, 1221 bp, Mus musculus
gtacactggaagagtcttcacatttccaaacagaaagactagtgttacagaagtgcctgacttatctcagtcctaaagaattagattgtcctcagtgtcttaaagtttcgcacaaaactctgaatgaattttatacttggcaaattttatttttttattttttttgtttttggtttttttcgagacagggtttctctgtgtagccttggctgtcctggaactcactttgtagaccaggctggcctcgaactcagaaatccgcctgcctctgcctcccgagtgctgggattaaaggcgtgtgccaccatgcccggctacttggcaaattttaatgctggacaatgtgcagtcagttcatagtcctggtccaggccttgagtgtattgtctcatgagcttcctgatggcgtgaccatcctagctccctgtgtatactacgcagatcccatagaagcatggggcaaaggattggtggcaccaactgaggtgacattagaggtctttgagtgacccagctcaacttctctgccaatgtcagcttgatttagatctcactgaatcaggctgcttctgtcctgtgtccctgtgaatctgctcttggctggctttctctgatgttgcttccttgcttgcttgcttcgttgctttggaaggctatccaagatgtgtaaacaattctttagtaaataaattgctattaacccaaacaaacaaaaacactgcaaagaggatgggtaaaggtgagcaacaggggagtggctaggatagatggctggggctacatgaactggggattctttacgaaatatctgttagactttgtgatcaaatgatgtgatataagaattgtataaagggaataactgtctgatactgatctgtttgagaagtattgagaagcttctcaatttaaatatttaaactttctaagctgatgcccccttggctgtgtatagcaaactgtttttatccacagttgtgccttattgtctcattaaaattgtattcctcaattcatcaataaatcggttgtcgttaaaacaacaacaacaacaacaacaaaaaagacagagaagctgggacttgcagatgataatgaactttctaatcccaaacacacagctaggtgaccctctaacttctttttcattcttgtttttctttttgttttttttttaaagacagggtttctctgtgtagccctgactgtcctagaactggt

SEQ ID NO: 24042 - DNA, 1197 bp, Mus musculus
gacatttctacgtaagccgaacaatgataaagtgtcttctaataacatgtgtacatgcttacagtgttatagattaccgttagtagccagctatggtggtgcatacctttgatcccagcactctggaggcaaaggcaggaggtatcttgagttcaaggccagcctgcttcacagagtgagttccagaacagccagggctacacagagaaaccctgcctggaaaaaccaaaccaaaccaaaccaaaccaaaccaaaccaaaccaaaaacacaaaacaaaaccaaggaaaggttgcagatgccttccagttcaggctgcagagtctgctcttgtgagggaggcctggcagcaggagctttatagctgtggccgtgggaagttgcccgtgttcagggccggtctttcctcctcagttaaacctctccaggtagactcccacagacttgctgagcagtgtgtctgaggtgaatctaaaccttgtcaagttgacagtgaagattaaccatcataaccacccccataaatcactatgttccaaaatccagtcctgacagtccttgtaagagtaataattaacattagtttagaactatctgttcattggaacatatcacatttcactgagctacctaagaatctggataaagattctataaacaaaactttcaataataaaatcatctatttatcttaaagtcacttctcaaaactaaagaaaaatacaagcaatcataaaatggaagtagccaggcgtggtggtgcacacctttaatcccagcgctagggaggcacaggcaggtggatttctgagttcgaggtcagcctggtctacaaagtgagttccaggtcagccagggctacacagagaaaccgtttcgaaaaaccaaacaaacaaacaaacaaaaaacaaacaaaaacaaacaaacaaaaaaaggaagtaaagtaactggagacacagagctccttgtgcctggctgcttacaggtgccaatgagcagagacaggaattgaatctgtgtagtttattcagacaaccggagatctttcaaaggttgttacatctcctctccaggcagcagctacagggagaaacagggctgggaaggagaccaagaagtcctttctggagcttagtcgtacctgtctagttaagtgctcagccttatttggaggcctgtgacatctgtgtctttcatta

SEQ ID NO: 24043 - DNA, 1601 bp, Mus musculus
agtactgactctcaacacttactattgagcaggagctggtgcttgcagtcccctggcaccccgtgtcactacatggcccagcacgttcatcaccatccattatcctgtagctggatttagggcaaagttgtttatgtccaggacctactagttgtcactcataaataccccttgtgggggtggagctttcttgttttcaacaaagaaaaccacattttctttttccttgtacctcctcactggtccatgctgggactatgagcatttacagtcctccctggacactttctggtggaagctgtgctactgcctaagggtctgaggctaacaccacacagcgcctgcacagcagaactacctaggctcctaaactatttcccaggcaaagctgagcagagaagaggggcaaagaggccccactcgtgttccagtggcccatggaaacgccattgctaactaactcctcatgaagggctgctttcactcagatctgacccatatggccttggcctggaatcctttctctgaacctgttgaaattagtcttttctcacattatgtactgctgtgtggctcactttaacttttctactttagtcttctcttcggggatccgtttctctctgccttattctcccaggtatacagaggtggtgatgtcactgctggcactcacctacttgttctctcagtgcatgtcacccaggtgtaccctgtggaaatgcaaagggagccgctcatgtgcgattttcccccatgtagtcattcaagtctactgtctgggtcccaaacatgagagcgtctatgctgacaagatatgtaacccagctaggactagcctatgctcatattcaacctttactatctcctaacactctgactctcagatagtttagacataagcaaaaatgctgtgggtgtggctgcatgctaggtacttgagggtcagtgtgctcctcggtgctagaaaaaggtgctgctgacatagcgcaccgtcggctacgtgtatctagttaaatgtgggtaagctgtataacgctgttgctgtgactgtagtccacacctcttgtgcaacctgggctatagagctgtttccccaagtctacacgaaagcaagcagcatggaagggccaggagagccgtaagttgtttggcctcatagcctctgtgccttaggaggaggcttgaagacaggagccctggagctggtattgaggaggagccagtgtgacagttaaccttggcatggacgggaggctgaaaatagaggttgccacttagagactgtagaaatggagcaccagtgccatggcagccactcctgggagctaagcctgagaccctaaagtgaggaaggggtggagttgaggtcgagaatcctgacaagaaaaatactgagagaacctttctggtcacttttctcagcagcaccttagttattcttaaggccgctcatctgaccagctgtctaggatgtccctccacagtggctcttctaagtgctttgtcactgtctccagcccacgttcgcttgtgtaactcacgttctggagcctgttgtctttgaaatctgttctttatcaaccttttactcctttcca

SEQ ID NO: 24044 - DNA, 1172 bp, Mus musculus
gactgaagaggagctaggcagcaccacgcttaagatatggcgcatgcgtgctgaggagttcagagactataaaatagagtgggctggatggggagaggaagagacagaagacgacagtttggcaatcacagatatccccaagctccaagaatcatggaaatggcttcttcgaaactgttctggtgatccgacatacctgtgccacagacttaaaaactgagcaagatttactcagtaataaggaggcctgtgccaagctgagctggcgcgaacagcaagccttataggtccgctatggtcagaagacgatcttacatcgtgtgttggaactcacaagttaagcaggtttcctgagaaccttttaaggtcatgctctgttgcttggaaaggaggggaacttggggctttttttatttggcagttagaatcaaaggaaaagtcgctaaaaggtaagcttgggtccatcaaggcaggaggtacatgttggcacttttggattgatgtcagcagacttaggaacatgctatttttactaatgccatcaggttttctttttttttagaacttaataaataaacatgggctgagttcaaaacaaaaacaaaaacaaaacaaaaagccggggcctggcaaacacagaagtggatgctcacagtctgttattggatggaacacagggcccccaatggaggagctagagaaagtacccaaggagctgaaggggtctgcaaacctataggtggaacatcaatatgaaataatcaatacccctggagctcgtgtctctagctgcatatgtagcagaagatggcctagttggccatcattgggaagagaggccccttggtcttgcaaactttatatgcctcagtacaggggaatgccagggccaagaagtgggagtgggtgggtaggggagtggggggggtatgggagacttttgggatagcatttgaaatgtaaatgaagaaaatacctaaaacaaaacaaaacaaaacacctccttcctccacacaacagcagtcctgaacggccaggagaacagaatggatgtcctcggatttaatttcagtgctgctgtttataaaatcaaagggtccttgcgaatctcttgtccagccacacctttacttccctatagtttcccacatccttagatccattagcaccgg

SEQ ID NO: 24045 - DNA, 1169 bp, Mus musculus
aaaatgccgacaataacatgaaggctagtgtcagaaaacccaagaggtttaatggaagactctgctttgcagctattgcactagtcattttcttcttgattggtaagaatgagtggccattcagaaggatttcttatgactaactagttcttagactagctagttcttagactagctagttcttgtttcttttggatgaggagatgctttgtactttaaatggcactggggctccctacctgccggcagattaggtcctgcaagatgggaaacgtttacattatggatgttttattagagatatgcaggacatttggaatagtactaagaaaggcttccagtaagacaaggtgtgcacccatgtcttaaacaggtcactgtaaaatatgacttagttgtggtaatttaaattccattaaactcaggttcataattttctattagattctcatagtttaattaaaagttttcagggataagttaaaaatgagttctgtgagtttagctctaaaacttcctgtttttaggattcatgagtggctacctgggctattgtaagcgtgtagaacaaaaagaggagtgtgtgaaactggctgaaacggaggagacagacaagtcagaaaccatggaaacagaggatgttcctacatcatctcgcttatattgggcagacctcaaaacactgttgtcagagaagttgaactccatagagtttgctgacaccatcaagtaagctcaacttcccaagttcagtcctgatggaaacgtttttgttgggggggtagggagacttgaaaggctttcagagggtcctcctgacaatgtggaactatgctgacaggaaattaggacttacctggagagcctcatagcctcctttttcttcagaatcgttttatcagttgtagtttagtgtgggatgtcagattttcttctgttctaatattccttttaaaaattttttaaaattaaaattactttttatgtattatgagtatagcctgcatatatgaatgaatgtgcattactaattacacttatctcctagtgcctacataagccttatagatggttgtgagccagcatgtgggtgctggaatccaaaatggttcttgcaagaccaaatatgttacatcccagagccattacaatcctctagctctctttaa

SEQ ID NO: 24046 - DNA, 1262 bp, Mus musculus
agatggttgtgagccaccatgtggttgctgggatttgaattcaggacctatggaagagcagtcagcattcttaactgctaagccatctcgccagcccctcataggtttgggtttttttgtttgtttgtttgtttttggttttttttttttttaattaatatatgtaagtacactgtagctgtcttcagacactccagaagagggagtcagatgttgttgcagatggttgtgagccaccatgtggttgctgggattagaactctggaccttccgaagagcagtcgggtgctcttacccactgagccatctcaccagccccaggtttttttaaactatagtgtgtaggtacatgtttggcctggtatatgtggaggtttgaggataactggcagtgagttcttcccaccatgcttgttgccttgatggtaaacccaaaaggtaaggctcctgctctaaatccacactagtataacagcctttctttgtcttctaggatgcagactatccttatttgggcactagattggatacctatgaggcattgactcagaaagttcctcagctcaaccaaatggttcgtacagcagcggaagtggctggtcagctcattattaaacttacccatgacgttgaattgaacctggactatgagatgtataacagcaaactactgtcatttatgaaggatctgaaccagttcaaaacagatatcagggtaagcacctaaattttcttttatttagatctcttatacttttaaaccttcctagttaccttctggtaactgtcatttcttctctcaacttgtatgaaattatgggtgtgggtgtgggtgggtgtgtgttttgtgagttctgaggcagagatttaatgttaatcagactggccttgaacttggaacaataatctgcctcagccttcagatcttggaattacagttgtctgccaccagatccagcttccccctctcgtgtgcactgtattacaacaacacttggctagatcagccttttgtatggcacatgaatgagatcatgtagcaggtgtatccaacctgtggcccagcaccacatttatttggtcaaggatttctatgactgcagcccaacacaatgataaaccttaacttgttatgtctgcactttaagttcacctatgtcatcttgagcatgaactttgtagatgcaacatcatttcccaatgtcaaaaatcggacatattgagaatggttgttgtgtgtgtgcaatcctagtacttggaat

SEQ ID NO: 24047 - DNA, 1213 bp, Mus musculus
cctgtcgccctatgtatctccaagagagtctcctttccgacatatcttctggggctctggctctcacactctctcagctttagtggagaacttgaagcttcgtcaaaaaaatattactgcttttaatgaaaccctcttcagaaaccagttggccctggctacttggactattcagggagtcgcaaatgccctctctggtgacatttggaatattgacaatgagttttaaatgtaacatgcataattaaataagagcagggtagtctgtttctagacttgtgttggttgtgctaaattttcattagagctctaaaatctaatgttaaaattctacccaatcatctaatgtcttaggcagcagcttttagtgcggggttggacctacacttcaagtacaatggataacactttccatgtttgtgatatcttctcagattatctttaaaatttttgagtcctttgtaataacttcctctttgcttcatggtcatgaaaatgtcagaaccagttgtaagaacaatgctatatgtcctgagggcattaactagtgtcttttgaggtaggagaaagagtgtgcttgtggagggtcaacgtggtagttgggtagttggagattgccccgtctccatctgatcttccattgagctgtatgcccttaaggatgtagctggtttgcatttccctaaattagacagtaactttcagaagagatggaacttgttttcttgccagcaaggttgaaaataggtccttagctggaccaatttgtctgtttacaggaataagtaaggccttactggttaaccttggtgttctttatgatgagaccagaagccaaagacctcaagttttctctcctcttggcatctgccctatagtctttagttctttgtttttattttgtttttctttttttcccaacattttctgaaaaagaacaagttttagactcaatttgtcagacttgaaaagaacacactgccaagttttggccaaagtgttagtcttcaggaaagctttctatcattttggcactgagatatttattgtttatttatcagtgacagagttcactataaatagtgttgttttttttttatatatagaagataattatcggaagcagtgccttccataattatgacagttatactgtcgttttcttttaataaaagcagcatctgctaatgagacccacagatactggaagttt

SEQ ID NO: 24048 - DNA, 1774 bp, Mus musculus
tacttacatctacaaaattttacagctcaatttattcaagatgtaactcaaaatcaattttgcaaaatttccagtacctttgtcacaaacttaactcacattatcgggagcagtgtcttccataatgcataaagaacaaggtagtttttgcctaccacagtgtctatatcggagacagtgatctccatatgttacactaagggtgtacgtaattatcgggaacagtgtttcccataattttcttcatgcaatgacatcttcagagcttgaagatcgttagtatctaacatgaattcctaacttcctgtagctccttagttttagttgcaaaaaacatttgtggtcattgagcatttggtgggtaaaatcaactgctgtaaaatcattacttccaagatccttttttaaaatgtgggtattttgttatctctggtttatggaataaaagcatacgtttataatgtttgctggtgacaaaggaatttaactatctccctttatttgcatgttacatgttatttcctaaatgtagttcttagaagtttgaattcatttttggtttttgggagggtagaaagtagagaataatgggtgttgggaagacaaagcttgcaaaaggatctttatgtacctgctcatcactatggtggctatgaattatgtaggtaatgagcaagatcacattaacaaagactagttaaccatcattacgcatctaatcagttttgccatggggtcagttcaaagctgccacctgagaatgtcactaggctctcagggtcttggcaccactcgcccaagttatatccaccagattattttgagcctcactgagttgttttgctactcagtcccttcagtcttcacagtgtttctcttgtaccagtatgagtatcaccgtgcataatgggattccaagtcttgaatgaaggcatgcattttacatagacgtctctgtgaaataacctttgttgtaagtggtgtttccagtcaaagcagtaagttggtaaggtttagtcttgggtgaaatgtggatctgagtaataagtagcttctgctacttatcaggttattgttggttaaaatgtagattttgaagataaaaatagatcttttgtcatgactcactgctagaatttgcatgacctttactgtgttagcttttgaatgccttttggtttggacttgccaacctatactgtctttgctgaaatgcccttataaatgtatacagctggtatgtaacaatgtgaagattccttacctgacttaataaaatacttcgataatactgacttgtcggactcatttcatagcaaaactagctatagagttcttatatcctcctccactatcaacctcaccagagtagtagttacgcagacacactgatctcttgatagagattctaatctagcttcttgtccttagtatatttacatagattctacagcaacaaaaattggtcttattttgagcctcactgagttctaaaaattgggcctgaaaagatggtattaactggtcttgcagagggcctagcttcttagcacatatttggtttacaagtgcttataactccagctacaggatctgtttgttaccctcttctgggatccacaggtactgaatgcatgaggtgcgatggcaggcaaatatgcatacaaaaatgcccattgcattgagtctcattcccaaagtgttttttctttcgtgtctttcttactctatcattgtggcaatccatcatgacagggaagagagacatgataca

SEQ ID NO: 24049 - DNA, 1620 bp, Mus musculus
agaaggggggaggcggccccgcagtgcaggagcgcggcgaggcccgtgccggggtgcaggagcgcggggagggcagcccacgcaggcttctgcggcagccagaggagctgcccgagttggctcacggcccctgcccgcgcacggaggagctcgaaagttcggacgagcgcagctgggagagctgcaggcatctgggcggggaggcggtggtccttggagcatccctagcgagtggggacagactcgagctgctggggagagccaggcctgtagggccccgagggcctgaaggagaggggcgcctgggggtgcaggaagcaaattggctgcccggggtgcaagagggccaggtagtgtgggctgttcaggagacgtatctgaacggtaaagggtcctcagggggagagggattccaagagggacacaggacccgcaggcgcagacggcgaaggaggtggtaatcggcaagctgccttccttgctggcatcagggttgctctagtgccaagagtaatgcaggaagatgtaggggattggggagcagaagagcgctgtgaacctgacctttggaagatattgctggagggtaggcactggcctgcaagatcctttctgctacctcaagtctgagcatcctcgaagcagtgtctgcctggggacagctggaaactcaggtacggatggccaatattgttatcggagttgatatgattagaagcatcggagaatgggttccaaacatcccttgtcctctctagttgaccaacctgggcatcacccctcacgaacacacacatacacacacgtacgcacgcacgcgcacacacacacgcaagcacccaccacatataattgtaagtagcagctgctgtagtggagtagtcaccgctttcaagtctagactggatgtggaaccatttgagtggctgcctggtataggcagagggaagagaaggcaggatagccccagggactaagtcatccccttcacctatctgctggtggaggtaggtgtgtctctgtgcaagctgttgtgcaacctgcatcaccggcctcaagtcctcccgaaagggaaaatggatagtgttgcattagccgctgtgccttatcttgtagtcctgttgatcacgtgagtgtggcagccagtagtgacttgggcacgagcctggcctgcgccttgccacacggttttgtcacggttgattatgctgtgggcccaaagccaaggatgggtagaactgcagagagcaactggtgaggtcttcatttctgaatggaatgggaagggaggttgtaccagcggctgctacccatgccttgacctcactctagaagctggcaaatagagaagcctgtggtatcctattaagacctcctcacctccccgcgaccgtggctccttcttggcgccgcctagaggtggagcctgcaggccaatgggtagatttgatttcttgttggcatatgaacccacctctttcctggttcaggtggtcttggttgacagcttacagcctctgtctttatttccctagccgtgtcaaaagttcttgcacttccagcccacctgtgggatggatccagagttactgtctcagagccttcaccaggaatatctct

SEQ ID NO: 24050 - DNA, 1078 bp, Mus musculus
aaacagttttatttttcctttctaacctctgtctgcaatctgtttccttttcttgtctgttcattacagctacatcatctgtcataggagaatggatacctcagtgttgatccctgagggaaacactttaagtccttcactgtcaagcatgctgtagcttgtaggtatttcatgtacaaatgcatcggctggaaaactctcctcatctgcctgttgatgagaggtgtttgtttgttctttgttttctgtgacagggtttctctgtgtagccctgctgtcctggaagtcgatttgtagaccagattggcttcaaactcagagatctacctacctctgcctcctgagtactggggttaatcagtatatggttggttgttggacttgaggctttgtgtcggtcagtggaatttctgttttgatctgttaacatgaattacataatagtatataaatatgtaccacttgtaagtaatttgttaacttttgtttttgtttttgtttttgtttttgttttgaggttgggcatctacaacccagactggccttgaacttgctaaatagcttaggctagtcttggaatctgcatagcctcctgcctcagcccctgcttccctagtgctgggattataggtctgcactccacgcctgggttgctaagctcttttgtggagtcaggcatagtgttgcatgttggtagccctggcactcagaatggaggcaagagggctgggcactcagagtgtgcatcttttactttctgtagtttactgtcaagtgatgttagagtaagaacctgaaatgatatgccatcatttctcctctctttgaaccagttatattacaaaacccataccacactggcactggttcgtttaaataagaaccttaacttctaagctacaatgagtaataataaaaataataatctcaatagttactgctgagagcgagcaagcactctcctggagtggtaagtgctcagcaccattttcttcctaccccctgggtggtccttccccagtcttgtcagtttcttcacgtgctgagagccatgctcagcagattcctgaggggacct

SEQ ID NO: 24051 - DNA, 1170 bp, Mus musculus
ggctgaggaggcagaatctcccctctgaagttgaaggggattcaccgtgaaaaggcttccattcttatgacgcttctattcctgcttctgtaccccactcttcccctggcactctattctcccttccccagttcctcaggaagtctgggatgcctcatagatacaggcgtccatctggtcgacccatgtggcagtctgagcccaaatctggttccctgtagtccagtaagaaagctgttttatgccgggcggtggtggcgcaggcctttaatcccagcacttgggaggcagagacaggcggatctctgagttcgaggccagcctggtctacaaagtgagttccaggacagccaggactatacggagaaaccctgtctcaaaaaaaaaaaaaaaaaaaagaaagaaagaaagctgttttacactctgcctgtgttgtccttgggtagggcgaaagtaattgaaatgattgacagcccctctttccataaaggaattgtcttctttggattgaaaatagtgaggagcaacagggcctggtggtacacacttttaatctcagtatttggaaagtcaagacagtcagagtttgaggccagcaagggctgcgtcatggtagggggaagatgatctgacttgttcctggtgtccactgggcagccaagtggcagcagctcctggggaaggaggctacctttctgtctacgctgtacctacgctgtctgtcacaaaggctgaagtccttctaagctctctttattatatatatctcttgctggattctggctatttacaaggcaccaaccacattagaattctgtgctaatggttatcacaatagaattatgcaattacccaaagagttacacaaataataactctttaaggactggaatatactattttttaaatttatttatgtgttatgggcgttttcacttgaatgtctgtctatgcacaatgcaccacaccagtgcagtgcccacagagcccgaaagagggagtgataatccctgggactggagttctagacactgttgtaagtaagctcatgtaagtgctaggaattgaaccttcgtcttttggaagagcagccagtacttttaaccactgagccatctttccagccccgagatgaataatttctaaaaatacttttggctcttccatgca

SEQ ID NO: 24052 - DNA, 1099 bp, Mus musculus
gacgtggtggggtgcatatgagaggtggataatcccgtgttgtagcttggggaggagctgtgacctccacttctttgccgagatgttattcctcctgtggttaccagaggagggaagcttgcttgttaggttgccatatattcctaagaatatggtaggttgttttggaggggaaaaaatcgtcttggctggaagtggcttgtcacatctacttctctgtgggaatttgtgacttcgctgttgctgttggagagagagagcaaggtgggctggcgccttttagctacatggtatggagagatagaggagagattgacgcacagtgcaggtgcttgtgtggactgggtccccagacctcagaggcagtttgggttctgtggatttcatggcagtatagtgttggaggtgagctggagaaagcagggagggggaatggttttgaaccttcgttcagcccgccagggcaaaacaggatgggcgagtcacactcagcctgctctcgcatcaacccgccagccttggatccttgtagctgttctgaagactaatgtctgtcatcgccatggcgagataccaaggcttccgtacagattagaacccaggacctggcagagccctctccctgccacagtggctccgagatgggcggtgtgaagaggaagcctgctgggaactcagtaccctcccagaaaccctgtcctttgccttgggataatggcaggagtttctagacattttttttctctgccctgtcccaggaagggggagtgcttagagctcagctgagctctaaatactagttggaaggagtcagaggatgcctcagatgccataggaatgagaaggtgcatggggtgcgcgcgcacacacacaacacacacacacacatgttaccttagggccctgagggttggcgggagagaaaagcctctgcaatggcacttgctgactggccgtaacctcaccccaggactcactgatgcaatctttcccagcatgtgttgaagtgacctctccagcagtctaggctctccagttctgaggttggccgagctctctcagtcccaggctcaatgctgttttgagaggaaaggtccag

SEQ ID NO: 24053 - DNA, 1323 bp, Mus musculus
agtggggaagggctattgctgggaggccccctcccccaattagaataggaaatggttgtctttccaagtagagagttcaaactctggaagagatcctggaaataagagtctgggatgctgactccccaaaactttcaacctcagctgcctccctcgtgagccagctgtgtctccctgagctggcagccagctggatggggacagacaagaaagcagtatacaagaaacaggggctccttaggcatggctgggtgtggggagctgggacctggggagcagaaaagaacttcctgcagctgtcaggtgtatgtgtgagctgtaacaagagggtgtagagcagctggcacttgtgaggggcatagggaccatttgtcagctgtaagaatatgggggcacacaggagcttgacggagtgcctccagatcccttaagctgaggctgttgtgtgttttgggtgctgtacaagatacatatccaacagcctgattcctatagctttgaggtagaactatcccagtagagggcttaggacatgtttgtttatttagagggagttttggatctttgccagctaatctggggagtaagcaccctggttgtcgtgggcattacacaaggcaatcccaggggaggggtggagattctcatcatcctccccccaagctcttggctggattgtcccactctggcaggctgcctgcctcctatttccgtcgggcaccagggtaacagggccacattagcgtctgagccaggagacatccagccaaggttgggatgtgtgtgggggagggtctctgagggatctgtctacagaatctgggaaagactcccatagacccagaaaagcctttagggggcttgtagcccccttttatatgtgctgtttgattcacagccacactgagatcccaggggttctctgcacctacgagggagacagggagccttgtgtagggggagtcagagggaccagtgctgggaagaagagtgcccccccatccctgcccccccattcctgctgtcctcttggctgagattcagaaaggtcttttttcagccagtgtcagagccgctcagctggggagggagggaaggaggacaggcgggcaagcaggcggtgggggaagcctgggagtaggaccagaactgtgagcactgcactggagacaggacagaggacccagcctgcgaccagctgtggaaacccagccgggcttgcaggggagcaaagccaccactccattcttccatgtttccttcttctgtgtgggatctgggggatttctaggacaggttcccccccacccccaccctctgggc

SEQ ID NO: 24054 - DNA, 1201 bp, Mus musculus
agccagaggccatggacgacttcatccgggaggtcaatgccatgcattcactagaccaccgaaacctcattcgcttgtatggtgtggtgctcacactacccatgaagatggtgagtggctgggtgggagggaaggccagagggctacctgcagtctgggctcccagacgcactcttcctcctgcctgctccagtttcccgccacaagtggcaaaggggtttaccagggtactgcctagtgctgtcatctctggattttctactgctcactggcaagatgtgcccataggaatggctggcccttgacatgagttatctttggagtttttagcctgggcctctttggaatgctttattctggggtttagattcttgggggtgactgaagggacaggtcagaaacgaacatggagttcgttcattggagctatggtcgacctccagaaagagactgggaactttgcctttgagagagtggcatcgatctaccggatttatcctgtctgtcttctgtgtggcctcaggtgacagagctggcacctctgggatctttgttggaccgcctacgtaaacaccaaggtcatttcctcttggggacgctgagtcgctacgctgtgcaggtggctgagggtatggcctacctggagtccaagcgcttcattcaccgggatctggctgctcgaaacctgcttttggctacccgggacctggtcaagattggggacttcggactgatgcgagctctgccccagaatgatgaccactatgtcatgcaagaacaccgcaaggtgccctttgcctggtgaggggcaagtgttgctggcttgtagggcccaagctccactccagtctcagcagatccacacctccaacttctggggcctctgttacctaccacaggactgtctgcctcggcctgtccttctcatttctgggcctgggtgcctttcttgaagacttacatgtttgcacatccacccaaggaattctccaggaatactggaaggcacaagcaatctaaagggcatgtacttggtgggggattaaaaggcttcctggaggacttgctgttaagtttaaaacatatggcaagcagccaggccaggatggtcagtaggcttatctgtgtagagctggcggcaggcgggaatagattgcaccgtatcttgtaggcagtgactaactagtgacctccacgttgc

SEQ ID NO: 24055 - DNA, 1140 bp, Mus musculus
aagtttatgtatgtgcacacttacaaaataaagcatacagattaatattaattgaaacatttatcaaacccagaagtggtgaggcaggcagggttgaggtcaggatcctctcaggaagcaagcgtggcccttggggggtgggggtgggggtccgccagcctgtgctgcaagcttgggcactagtcagaagcaaacatagtgtggccctcagcaagcagcgacaccctttactaagctgtagtgccctctgctggtggttgtccctaatttatatcctgagaaacttcctgaccttagatactccagcacacaatagtcatagtttatcaaaaaagatactttagaaagttctggaattaccgcctaaaactatttttttaatactttgcgtgatgtctaaaggcagtaactccctctggtgaccttggatttctggttagctgtttaactagctcccgttctcttgttgatggatgagcttttgggttatttcctgtctttcagacgctgatggttgactggagagcagtggtctgccctaaaagaacctcttgaacctgtctgtgggacaagggtgggggagctgccctgcctcaggcccgaaggacccacaactgcctgcggctcccaggggacagtgagacccaggcagcaggaggctgggagcctcaccttgcccacctcgctcacccacccagcgctgttctgcacaccttggttcagccctcagtgccccaagaggtgggacgttcccagccttgtgaaggcaagacaggaagctgcctggcaggctctgtgtggcctgcctctggctccagatcaaggctgggctggtggctagagtgtgccccaggctttcctctgggggattagactgacaggaagccaggcttgacatggacaagaaggatgtgttggccacacagcagggcgagccagcaaccaacaggccctcctcagggctaggccccttcccagggaacccctgtaggagtgtggagtgttggacagaatgtgacctgtagcttcactgtgaacttgtgggcttggctggtcttaggaacttgtacctataaacagcctgaagtggctcagaaacagaaaaggtgccaggatcttctctggcagggaccagggccc

SEQ ID NO: 24056 - DNA, 2864 bp, Mus musculus
atagacagggatgactttgaatgaacgatttgggatactgaaagagcaaagagccaacctcacgttcagcaaaggaggaagccgctttgtgactgtgggatagatccgtgtccaaggaactttaagtgttgactgtttgaaaagttgatttgcttgaagagttcatcggagaagttcaagaaactttccttcagaatattcacaagcctaaataactttatttttgaaggttattttgttttggtttggtttttttaatgtataaataatgccctgaaagaatagcagggaatatacctatctgttcttaaagatttcatggttggcccatacaaagcaattctctgttgacttctttgactcctcctgaagcagaaggaagacagaaagacagacattgattatttttatgagcgtgggatttaggatctcatcacttttatccagtttttaggatttgccatggtaaatcttaaacttgagaaataagagtacacctctgtgttgtcacttacccatttatgtatgtgttggcgtgacaaggacagctgcctttctgtcattactggtgttttctaaactgtaggagaattttggttttgacttttgaggcttatggaaatatttagaacttggttcatttttcagttattgttagcttaaactccctaagttctaagaacttagtattaaacttttaataaaaaaaaaaatgtggctctcaggattagtctcaggccaaaatgtgttagggctgtaaatgcttatttacaaagttatctgctaggtccttggaggagacgcctggtgtggaacctgatggtctgtgttcagtataaatggagaagacatgaaaggcattggccaacggacagattggacatgggaacaataaagcctgagtcatagctctgccatctgggttgacttctgtcctgagtctagtgtctgtagattcttctataaatgatgcttacaagaattacaatttttaaaatgagttgaatcttgggtattttgacaatatacttactagatatataaagtcctatgtttcatattcaaaagttttttttgtaaagctcttaaactcagtaagttcaataatttataactccccaaacaaaaatctacttatatatgtcacaaaggagagaaaaaaaagtaaattataatgaagttacatttaactatacacactcactccgtttcttctattgctcaaagttcaggcattataggaaaaagggtttttttgttttgttttgttttttcttacactggaggacggtctgctgtgccgagatagtgctgagattgctcagtcataggtcataaattacaatgagatgccaaaatgcagcggcgtgtcccagctacagattatcagtgctgagagtgctcacatggtcataggtcataaattacagtgagatgccaaaatgcagcggcgtgtcccagctacagattaccaagtgtggtcattttgaaacctgaccttttgttttgctgtgatttcaagtttgagtgggtgtttaagtctctgctgttgatttctcctgtaaagacagagcattatactcctgcccgccttcattgtgtcctagacttcattgtctttgatgttcttcaagttcttactggcttgtgctagttgtgggaaaaacagcaacaatgtcatgcttataccaaagatctaaatctttcctcagcatctgttaatctgccaggacttggacttgagaggggtttagaggctaatcacagaatttgaaagtaagctccagttctccttagctgtaatgcttttcattgaggccaaggactcataaaacatttttgccaatatgaatatttatatttggttcagaaacaaaacattttagagtggtttgctggtagcttattttaaagcaaaggaaaaacaattgagcatgaacactatctttggaacaatttttaaaatatgatataaaagtttttgtttcttgttgttttaaatattactatacagaggtattagtaattccatttttggaaaatcttaaaaatcgcccaaatgttgacactaagtacattgaaaaacagtgtctttggtatagtaaatgtttgttcttcattcatctgtaacttaatatttgttcaaattttgcctttgatacaactaagttaaaactcttgagtgctgacctgttgtatatacacaaaacaatctgctttgttggagaaaaattccctctcttggaatgtgattgtagtcatccttgttcagttcttgaagccccccccccctttttttttaattttatttaaacagggtgcaacgtaaaatttcctttgcatcaaggtgtatgcagaacattgatgcagtgcatcacgacgtgagcgtttgtatttaacgaggaggtgctttacactgtactttttggtgttttttggaaaagttacattagatttgttctgaagctgttcatttttgacaaataaaatgtaacaggtttcacatgagttattctgagctataaagattgagttgtggttttttagattgttgtgtgttacaaagcatcttatagtggttttatatatgatttctgggatttgaagttgctgatcagctaaatctccactcttggtgttcctctgacttttgaccatttcatgcatgggtgacctgaggttccaacatgaggccaccaaggcgaattaaagatagtcacattgttataacgcagagcacagaagtagatgagcctttagagatgatctgcgtcagcccctcctcttacatcgtagttaagtgacacccgacattttctaagacgtacatggaacatgggtcatgttttgagcctcatgtctta

SEQ ID NO: 24057 - DNA, 1100 bp, Mus musculus
aggaagtcagtactcagaaccacccgtctgactgatgggtgcatgtggtcctgtgtgtcagcatcctggggtgtgtccttcatgcgatgctctcctgtgtgtgtcccgtggagtgcgtcacttgtgtacactgcttctttttgacattgcttattttcttcaccttcctagtgttccttcccatccagaaggtcccagcacactgatgacagtgccttgctagtggtaagagaatgcagaatagagtttacatgtttgtagagtaactgttgtgctttactcagaattgatgtaaataccataaaacaagatgggcaggcaccataactaaattctctataaataaccagaccgctctctctgtaactacaatctaggcaggcttctagagtttgactcttacatctgtctaatgcattgagaacccttctggccttatctgtgatgagatatatgtaataattagttttttaaatgtcttttctaattttcagttaatcattaatttggctcatgagtcactcctgtatgttaaatggagtcccacactccatgacactaattatatgtgacaacctattttatcatgtatttggtttctgttgttttcatttttacagaatgttctcccaccccttgcaaatacaagctgcgtcacacacagacactggcttgtcacacatgcatgctgccactggttgcagaagtagtgacaaagacttcacttacaaaagtgaagttcaggttctcacagttgaagttcttccatggtcacctttacctcagaagatcatggcctgcagtgctgcctcctgacagttgggaacccaaagaccatgaagggctttatttaaatttaatcattcttggaagagaattcaaccatttataaaattacttttcccatcatgttttatgctactttctttttttttttttttttttatgcaaaagtgttgtcggtagtcacttctgccttaagtgttagacactgccttcacatgtgctgagagcaacagtgctttagaggctcctacaatataacctgcactgggctcaggattctgtgcattctactgccttccttcccactaagatgg

SEQ ID NO: 24058 - DNA, 1294 bp, Mus musculus
taggtcagcagagcaggagaatacaagttgtttttatagttaacacctttaattctagcacttgtgagtcaaaggcaggtaaatctatgagttcaagcttggaccagccaaggctgcatagcgagaccttgtatcaaaaacaaacataaaaaggcacagcaaacaaatataaagtgttgggcgagtgagaaggtgcaaaaggtagagtttgccatacaaggttgatttctggaacccacacacaggggaagggacgaaccaactccacagagtgccacagcacatatacccccacgcccccacgccatgtgaatacacacgatagtagtaaaatatatagatagtaaaatatatatagtagtatatatgtatgtatgtatgtatgtatgcatacacatgtatatctttaagctggtcatgctaggtcacacctgtaatccaagcacttaagagtttgaaacaggaagatcaggagctcaagggcatcctagatggatatatatatatcaagtttgaagtcagcctgtgctatgtgacaccctgctttaaaaaatgataaagttttcactgcctgaaaaaaagtttggtctacggccataccaccctgaacgtgcctgatctcgtctgatctcggaagctaagcaaggtcaggcctggttagtacttggatgggagaccgcctgggaataccgggtgctgtaggctttttggaccaaaaaaaaaaaagtttgaatcattttaaatatttaattttttatctcttgatcttttcaaattcagtgtagactctatattatagaaataaaagagactagacttttctgccaaaaatcatatatcatgccatttgaaattctgggaaaacttttggcgatagtggattcctgtaagctttgctacttaagatggaggagtgagtgatgggagactacggcctgtgtcccgctgatgaacgagcccttctattgatgttcccacaagaggtggaaagtgtggggtgtgtgggcttcttggacaacagggcttccatgcactagctaaactgaagaatggatacacaagttgtatcagcatataacaggaggttgtatcccagttgtgaaacactggcctgcattcctggaatgtagtaaatgctgagggagaggggggactggggagacagtctctcctcttccctcatcaattagaaatgtgtcctgtggggaatatctcaggaaatctcccgttctaccccacacttgtatgtttccagttgcttctgctggttctcatgtgatagcaatgtgtactg

SEQ ID NO: 24059 - DNA, 1804 bp, Mus musculus
ttccataactcacttgattattatggggtgggggtggaaggacctgtgttcttcagttctgtgatgttcatcctgttttctttttgtttgtttgttttatgtcacattgtcccctttcaggagcaattgtgcttgcctctgcacattttagaagagaaagggttgggccaggttgcagtgacagtccaggccctcctggagcttgccccacccaagcagccgccaccgcagcagccgcagcagcagcagccacagctctctgctgtctgaggactcccagggccctgcatgttggcaccatgatggcacagccaaaacaaggagcaggaagacttgattgctggcactgcctgctcagggcgagcccggtgtgttcctagaagcactgtcttcatgattcctgccaggaatattgtgttccttttctccattttaggggagattaaacccgtttccactatttttcgtttttaatgaagacacagtttttttaagtggaacttggattactgaagacctatcatggaagactaagctggctgtgctttcttcatagggagcaggctcgctttccatgccagagccagtattttcatagttggatggtaagctctcttagaggacagacatattatctctgccagttcccaggtgtctacagctcaatggtttccacaactggacttcattctctggagcatttgtgaaatccagatttgcatcaaaggttgggatgtggccggagaacctgcatttctacagacattgtttttctcaggcagtggagaccactgtttgaaggcacacagttctgtggtttgagggcaccacccctactgcattttcaaccacatttcaatcaaaagctgtattatgatgacttggacttttctgtcaaagagagcaaaaccatggagaagccctaggttctgctcagtataacaggtaactaaggccagtacccaggcccttccccaggcttgcccaccaccaccccatctttttctagacagtggttccttgctcaccctgctgtttcctgaacagacacactccacacacagttgtaagctctgaagtgtagcatgcactgcccagcaatgtttgcatttgccttggtgaaccctgcgttctgatcccaggctcctggaccaggcacagcagactcggctcctgctcctgggactgaacacaaagctgagaggactgaaggaaagacggttcttacagtccatgcaggtaacagccagtttccatagctacaagaaagcaccgagaacagcttcctgtctttcacctgtcccctccctaagaccctccactgtgagcagagaacagaaggtccaagggctccagcacagcggaggagccttcatttaaacacagcacagagccttctctgccccagagtttggactctttagttgttgtatctttggtgtttgctgcagttagaacccaaatacagtaattacataaagctgtttgttctatagggttttccctatagttgttaacttttgtgggtttcttcccaaggcttgcatttcagaatagtattaccctgcacagcacctaaaagtaactttaagactggaccagggttccatccccagcatcacctgaaaaaaggttcagagagacgcgtggcctgggattcccaacatcccaaaagtggaagctggaggatcaggatttgaagcccacaccaggcgatgcaagccaccgcccactgggctgtattagactttggctggagagctggctcagtaggtaagagcacttactgctctggcaggtcagg

SEQ ID NO: 24060 - DNA, 1158 bp, Mus musculus
cctgggtgagtacgtatgtacataaaaattcagatctcccctctgagagaattcatgcacctgcacacgaatgcacacacacaggtatacacacaaagaaataattcaaataataatgaatcgtataatgaaaaataatgaaaaaggcatcatgaagagggctcctacctattatgccagaaaattttgtaggtgaaagatcactattataaaccagaataaaactgtgacgaagttttattcctccaactgtgggtcccaggagtcagactcaggtcattaagcttggcatgaaccttgtgccaggtgacagaggccatgagctacagactgcttgcacgcttaaactcactgagccatcttgccagcctgatctggaattttctatgtagagcaggctgtcctcaaagtcactgaaatcttgtctctgcattcccagtgctaatattacagacatgagctcaaaaatgcccagaagtcaacattgaaaatataatgacgggctggagagatggctcagccgttaaaggctaggctcacaaccaaaaatataagagttcggttcccagcacccacggctgtctctccagccaccttttttatcagccgggcgtggtggcgcacgcctttaatcccagcacttgggaggcagaggcaggcggatttctgagttcgaggccagcctggtctacagagcgagttccaggacagccaggactacacagagaaaccctgtctcaaaaaaaaaaaaaaaaaaaaagaaaatataatgacacagtaaggtttctaaatattcacaaaagtaggctgcaacatattcaacaacaaaaacagtttttattaaacctgtagtgggttagtctgatgtattcaaatattaaattttgtaccccaaggtcttgttccaagatgagcagatcctcacgtataccaacttttgttgtataaaccttgccccccccccaagttatccatgattgcttagtaaagatgcctacagcctgtagctgggcagaagagagggagaggtaggtggggcttcagttcccaggcttgatgtctgaggctgggaccatgaggggaagggcagagaggaggagcaagggaggacttgccctgggataggcagatggtgagcatgtggccatgaatgacagc

SEQ ID NO: 24061 - DNA, 1199 bp, Mus musculus
tttggaaaagtgttccttgctgggttgtgagtggtctccaaaggagtaataaagagcaactaggttagctcactagattcctatgtacttaatattggaaactactttttaggggtgtcagtcttggatttattataatctaaattgttttccccaaaagctacttgtgtgtcagttatgtggtcagcagtgaccactggaaaggttaggtgtctgaaaggagcggcacaggggtcttaggtactccgctgggattttttttttttttttcttcgagacagggtttctctgtatagccctggctgtcctggaactcactctgtagaccaggctggccttgaactcagaaatccacctacctcagcctcccgagtgctgagattaaaggcgtgcgccaccacgcccggcgggatttttttttttaaaagatttatatgtaagtacactgccacgcccggcgggattttttttttttaaaagatttatatgtaagtacactgtagtctttagatacagaagagggtgtcagatctatcttgacaaatcaccataaactgaggtggggtttgcaattttgagaactgaaattgaatggacaataagtgctgctttaaacaatttctagaattccatctttaaagtagttaggaagcccagcagtggtgacacgcctttaatcccagcaattgggaggcagaggcaggcaaatttctgagttcgagaccaacctggtctacaagagtgagttccaggacagccagggatacacagagaaacccagtaacaacaacaaaaaagaggcgggatgggctttggaagctgaatagttatgtttacaaagttgagccaatgttgggaattaagtatttgcggtaagcagagaaaggttgagactcctttaaggtataaggaatgacttacacatgctatggcaagtgacctttgcgcagacttcaaccttgtagctcggggctctctaactttccctgtgtagtgggtagacaagctgtcacatatgtaccataaccctagttggctgtccaaatagctttggtagttacgtgatggtgctggagtggactgaagggtctggttcacaggaccagctgtgggccgagcgcttagctgctacggaatgaagtggcagcagcagcttctgaatgcgccgctccgcacgcccgaccgctttgcactaatcc

SEQ ID NO: 24062 - DNA, 1161 bp, Mus musculus
ccaagtgtttataaaaactgactacctcggtgttcagttcaaacccgtcattgtaagtgttttaaggccctaggtgtcaaacatagcaagtgaattgtctcaggtttttgcagaatttacaggaaggaagcaaagccatgtgaggagccctgagcagggtcaggagggggcggggcagcctttggtggtctgtgtcgacccctccgattctctactgcagaacgtccttcccggaatacttacttttttcctataggattcttatatttttaagaccaaatggggattctaaaaatgttctaaattatgcctagcattagtttttagcctaagttggcttagagtttattgaaatttaaagatatatcataattgtatgggttgtaaatagttttaggaagatgcataagtaagtgtatcagagtatttctcacgaaatgttatcagcatcctctttcatattggatttatagattcagccaggcatggtagtcatgcctgtagtcccagcacttgggagatggaggcagtaggattatgatttaagaccagcctgggcgcacgcacgagaaagagagagagagagagagagagagagagagagagagagagagagagagagagagagaatatgagactcaatcctaccctaccctgccaaataaggggggggacgtaccatttgtggccatgtataaagcagctaggtggtggtctgaaattttacgctgtaaagccctgtgactaacacttggcaaggcctaagttgcagctggccctgctcagcgtcccggagtctccagcctgcacagtgttctatgcctggccagctatgtacctagaagctgggtgaacagaggagagccagtctctgaagacagctgagttgtcccagcgtgaggtggacatcctcacagcctcacagctggctggcttcatggtgagcactagttctccctggcatggccttttgcctccagcccaggaggactggcgtgctgtgttcaatccaggttgctccttctgagggcagcgctgaactggaaagatttttttccctttttaaattatgttgggacatgggagggaatgcttttatgtttacattaagtaaaatagattttaaaattgttctttatttatggtggtgaactttaagtg

SEQ ID NO: 24063 - DNA, 1195 bp, Mus musculus
cttcgtggctcagaagatgtacagattttccatggttcttcccgttgtctttgagacagaaaagttgcagatggagcaacagcagcaactgcagcagcggcagatacttttagggcctaacacagggctgacaggaggaatgccaggagctctacctccacttcctggaaagatctagattcttccttcggtatttgtccttgtgggagaactttgaaattcatttatgtttgaactgattgtttgaactttttattcttttttttaaccttggcacattgatctatttgaacatagtgggaactttctccgtttctcatggagagaccccaggtatacctgtgccctacataatgaagtccctcacttacttcttcctgttctcactctgacactggagtacagccatgtggaaggttagcctactctctaataaattgctcctaaggaaggtcttacgtgctcattgtgggaaagaagtaagtacccctgaccataaggacttttttttaaaatgtctaggacatgtaagcaccgtggcactgacaaaatccattatacccgtagtacagaagtcaccaggaatccctgtgtgtgccagagagaagggaggctggctgtagctttagccagagggggactgggcagagcaggcactcatttcctctgcagagtttggctcttagacctgtgtatgtataaaaaagaagtcagcactcactttttgtatttaaatattaaaagaactcgaactgaaaaaaaaagaaaaagaaaaaaaaaaggtcagaggtggctccccgaggccaagaaagaaaaaaaaaatccttaatttctacaccagctttagggggtgccagaaatgaataagcccttccattttttcatggatgagaaatctgggatagccaaaggcgtattgactcagacttgaaccctggcgctgacctacctgacaaagacattagacctggttgccagaggctggccctcctgtttgcagcatcatcacaaccatggacctcctagttaaggatgctgacaaactcactgggccaaagtctgaccatcactacacctcaagctattgaatgggtatccaaacagcctccacttccaatcaatggctcaccaatgccagaatggctcattacactctctccacttaaatcctcctaggatgacctttcagacccca

SEQ ID NO: 24064 - DNA, 1188 bp, Mus musculus
gcatgaacctacagaagtgagaagagtagctaactttgtaattggcaatggggattgaagtcaagtcagtgtaactctccccctttgtgatttttttcattttatttttttatgggtgtgaatgtttgcctgcatgtatgtatgtatgtatgtatgtttgcatatgtgtgcactggctctattgaatctagaagaaggcatcagatcctctggacctggactcatcatggagctgccacatgggttctgggaaccaaacccaggtcctctggaagagcagctagtgttcttaactgctgagccatctctccagcccctctcaatttatgtgttaagatgaaccataagaaaattcttttttgtggggatattttgatatcattcaaggaagtaaggaaaagttcaagataaccagaggtcagtcttatagtagcaattctgaaaaccactctaaattaaagtgaaaaatgaagtagaattagagcaaatattaggtgctcaaaactcatggtctcgccgggaggtggtggcgaacgcctttaaccccagcactcgggaggcagaggtaggtggatttctgagttccaggccagcctggtctacagagtgagttccaggacagccagggctatacagagaaaccctgtctcgaaacccccccccaaaaaaaacagaccaaaaaacaaaacaactcgtggtctccttttcttggcttctcccccaggtttagagtctaaagatgtttaaaacaaaataataacaattacaaaaagtgacctaatcctttactgcttctcaaacaactcaggccatttgctctgtccctactaaggaacaatgagtacttttacgtctttcttccacctgagttccctgtaagtacacatgcttttagaattctttcttgagttctctgagaaagccagccctttcatccctgggccacagctgcactggcaccccactttcttgacttcctgacagaactttctctttgtttgtcctcagtgtctcggtggtggttggcttttctctcctttagttgcctaggttggcttttccccttttcaaggctgtcttacttgtgttgtggactctatctctttctcctttctgacctcagctaatggagtccgagtcaggaaatctttcaggaactcaagagccaggtttttaactacctgtctg

SEQ ID NO: 24065 - DNA, 1394 bp, Mus musculus
ttcagccgctgtgcctgaagtcagtgttcacacatcactgggctgttgtaccaaggcctctctcctctggaggccatgcctgtgtctgaggaaggccgtcagtgctctgttggaactctcttttaaaagtgtatttataattagaattgtaaccatggaggaatttttttcttctgaacattttaatatacttgaaaacaacattgacttgaaaaatttcagaacatttttcaatacctagttttattaaatattatacttaagagacaattttttaaaatgtgttcatgtcaatatgagattttgggctttctcaagaactaaggcatttaaaaaaatagaaaatattaagaagaaaactgttacttttccttacctattttcacttgtaggttcatattcagtattatgtgctatcctgagcaagtttgctttatctgacctctgttcactcaaaagttaaaacttcaacctgttcatgtctgtcagtaattcaattatgtctgtggctgagtacacgtaacatatggttttattttatttttcaaggaaatgtaaacactgaagaaagagtatgaactaaaaagcagcaatctgcattcaggtaaaaattggttttttataggtattttattggggttgaagaattgctggcgatgaacagaatcgtgctaattatggttttcatttattcaagtatttgctgagcacccactcgtggtgctgactcttgttactgcaagctaccttactgtccagagtggtgccttaccctgctcctgcccacgtggtcttccagtcagtgtgcaaatgcacctggcgctcgctcgtaggccgtgccaggcggctgcggctgcgctctgagaaaccgttctcttagtagggttcatagggtgaaaacagcgacaatgatttttcagcaaattgtaaattaaaagaattggtctgtgttcaaccattttaatgattccgttttcatttttgctgtgaagtgcactgaaaaataaatttcaaaatgagctgtcattcatgtgttgggaaaattgaaaaacaataaaaatagagaccagcagtgttggcgtctctttcataaatggagaaaagagtttgtattggtgacacacacctcaacccaaaagctgtctccaactgacagccactcgcaagtgaaaaattaattctctcctagggaattacacatgggaactaaacacttgtgaacccaaatggccaacacaggatactcagtggtatcttccggtttgtatttttatgtgattcctgaacaaccgtgtgtctcagtatctatatgttccaattggtgttggcttacggtctcagagcttcagtcctttatcaccacggtgggaagcttacagagtaaatgtagactc

SEQ ID NO: 24066 - DNA, 1239 bp, Mus musculus
tcgggtgccctcgttctcctcaccgaccgcggcctccagcacagcgccagggccacccagcggctccaggggtccaggctgcaagagcttctcggggtccggaggtgcctgctccatagctgtagtttggcaccgcgagtccagtgcgcctgcgcggggccttgactccagccgccccgccctctgcttgtggtagctccgccctgcgctctcggtagtcccgcccctgcccacagaaactcctcctaggcagcggagaccccagaacgctggaccaccagccaagacctgcgaccgagggaggtaggggaaagctagggcgactacagagggttggctacaaaactggtaatctgggagagccggtaaagacataaagaaactaaagtgaagtgaactcaagaagtgcagaagccactcagattggcgatcccctcaagtaattgtgtcattaaaaagaaagggagattgtcttgtgaccatcgcccttaccttgcattcacaattccgtttcccctcgcaaagaccagagcagcatcaattattaacttttagagagttgagtaacgcattcagcaaaagataacgcctaaagatttgagaggtaagatggctgaagcaggctggagagcgccattgttaagtaagtgtttaaactttagacgctaaagcaatttaattttctacaagtctcttgtaatttcctgaacctaccccttggcaagattccctgtggtgacctgaagagaaatgttcactgactgtagcctaaatatgggacctttgggttggtatttttgtacaaaacctggtctcggaccaaaactgattcttgccaaacatccttttccgggttgtgaagcacaatttcttcctcctggagttttctccctggcttggtggcaaagttccattcatgctcaaagcactttctcttgttattttacaataatttgttctaaatccagcttcctccagctagactctagacttctttaatgcagggaccccttctcctatcctttccctgttccttccttacagagcctggactatttatgtatttaggtattttattgttcgccagggattagttaggtccggcaaacccccagaaaacatgtttttaaatcagaagactttttttttttttttccgagacagggtttctctgtgtagccctggctgtcctggagctcactctgtagatcaccaggctggcctcgaactcagaaatct

SEQ ID NO: 24067 - DNA, 1783 bp, Mus musculus
cctgggagggggacatgtgcatgtgggtcctggtgagacacctcacctctcttcattttcttctcttaggagagggcctcacagtgctagcccaggtagagccttcctgtctttcaaacacagggtcatatcatctacaaccagggataattggacttccctgatcccatttgagttcctcttatttctcttaagatcaaggaccatattcaacaagagtatgagaccctgcagtcttccgacgttagagggatgtgtacagatgcccagccattgtgatgttggctgtgggtctgtctgctgtgtagaatcacattgtaaagtttcttttgttctcagggaattcaggtttggaccaatgctaaagaatgcttcagcaagatgtaaccccatgaagtgacttttctctgcaatcaaagccccaaaacgaagcacaagtaaaagaaaatctattgctaccttatacatagaagcatactgtacatggaacaaatcagctttctttaagcatagttgtgttcatatagcacaaatgatacattttaatgaagaataaatattataatttgaagttttggggactggtgctgattccaaaaaagttaatttaataagataaccaacagattgttagtcaggctcctgatccagtgcctccgtcaggatgtgagttaatctccatgtgcacctctcagtgcccactgtccagatctcttcacgggcagttcttcccagaccagacgcccagatttactttgtaggacccacttctgctatacagttattttatcttgccttagagttgagctgtttggtttgacaaagctcagcagaaacttgttgtgaagtctaaggttttcttctgtgttcctagatcctgtaccatctgcaacactagaaaatgccttcagtttgtgtctcaccaaaattttgatactggtcagaaattttatactgccaacaacgaagtctcagcttctcagatttgcagtggaatagatacattattataatctagaaattgctatatagagagtattaatttaacattattattctcagataagaagtgttaacttcggcagcagcctccatttcttctgctcggctctgtgctcatggcgtttcagggtacgaggtgtagcatctccatgtgtgagacactcgtagtgagcacatgtgagcggtaccgtcaccattaatgtgcgtttctgttgcctggctgtgatttttgtaaagataaatgatgttgttgtgctttagtgtgtgtttcatggcacatgttcagaagccaagcacactctctgccagcttgcagactcctcctaaccgtgcactcattatttctaatgttttaaaactatactcagtactgtttgacatttgacttttttacatgtttaaaatgttgctggatttttgtgctgtttgccaaacttatataataaaggaagtgttgtgtttatttccagaagatttgtattattttaagatgatccatgtatgtaaatacctgattttttgtgagaaaataatgcatgccatattatgttttaaagtggcctgatgttggtgttttgagaaacaagatactaaaattagaaaagatttaaatttttttgttatggttttgctctggtttgattctttttgagacagggtttcatgtagcctgggggcccagtcctggaagtagttttatagataaggctagacacaaaaacctatctctgcctcaaaagaacacctatctctgccacccaagtgagtgctgggattaaag

SEQ ID NO: 24068 - DNA, 1172 bp, Mus musculus
gtctcatattttggtgagagttttacctatatccataagtgatatgacttgtcttttcttgtggcatctttgtcttgtttcaatttcagtagcactaaactgtgtttgttttgtttgtttgtttgtttgtttggatattttcaccagggactctcaatgtagctctggctttcctggagctctatgtagacagactggcctcgaactcactgaatctttccctctttgttttgctaaaaataagtgaaaatttggtttcaattccttagttaactattaggtagaagtaactagtgaatccattttagtttggcatttctttgaggagaggctcctcatgagtccaattttctttaatggttgtataatcactttcctcttgattgagttttggtagcattcttagagcctagggtcaaatttaagagcataaaattgtttgcaatattcccttatcttttaaattcagggcctgtattgataatgtcattttattcttgatattgtttgtaaactccctttctgttagttttatagagagttgagggctgtgtgtgtgtgtgtgcgtgtgcgtcgttctgtctgtctgtataacaggtttaaaggtagccaaggctaatcttgaactcttttggggccttaatctgcctttaggccttcaactagctgaggatgacaaacatctgaccctctgcctccatctctgtggtgttggggttgcaggtgtgtgctcccacatctggtttgtggggtgctgaggatggaacattgggctttgtacatgctaggtcagccctctagggctgtctggcttataaatagatattttcttttctatttcatttatttctgctctacttgtttaaagttcattttacctttatagttatgtgagtgtgagcgcacatgtttgtatgtgtacgtgcgtgtacagaaccagaggtcaccattgggtatcttattctaatctaaaaatctttattatttttgtttttttctaagatttaaaaaacatttatgtatactttatctgcatatatacctgcataccagaagagagcatcagaacctattttatagatggttgtaagccaccatgtggttggttgctgggaattgaactctggaataccagccagtgctcgtagctgctgagctatctttgcagctcc

SEQ ID NO: 24069 - DNA, 1169 bp, Mus musculus
ctcacagagatcactgcctctgcgcccctagtgctggggggttagtactgtttgtgctttaagtgggcactgttatccttgttgttttgtgccattgtaaacatgtcagatctgttcgtaaatccagtgcaaactgtgcatggacctcatagggtagaaagttttataacatcattcatttgtttgacaactttgctaataagaacttgaccatgtagaggtcagagctcaacttgcaggaatcggttccccactgcctccatgtggttcccaggaatcaaactcaagtcatcaggtttagcagcatgtctgttgagcctcgtgtcttccctggcactgttgggttttctcagtcagtgccctctctctctcccgcaggcacagctccctagtttgcatgcatcactgtagtactcagacagcttgcgcacagtgtccctgcatgttctccctcagggagcgggacaggtttcacttatcctctctgtgttctcctgtaggcattggatggcacaagtgactgagaggatcccgagagtttccggggcctgtgaaaggtagaaactcaaccatgatttctttctcaactcaacagcattcccttccttgaagtcttcgtttttacttcagcctcaggtaactttatgtctcataatgttgaaagagtacattttacttatttaattttaggctgtattttaattgagtcatgaataaaaacagcacacatttgaggtagccctttagctgtgaaggtcactgatgattgtatagtgttgggttaggaaagtgattgcagtggcttcagctatgctgaagttaattttttcatatattaaacttttttttgttggatgatagatttcattattgggtttatttaatagtttcagtttggatttttatatgtggaagaaatatgtatttatttatttaattgtttgtttgcttgtttagtttttttttccgtgtagtcttggctgtcctggaacttaccctgaagaccgtgctggcctcgaacttagaaacctgcatgcccctgcctcctgggtgctaggattaaagttttatgtcacagtgcttagcttcttaagaggtttttgagatgaatggttaatatattgtgtaataataagtagtaggttttcttttcattaatctccttaacc

SEQ ID NO: 24070 - DNA, 1420 bp, Mus musculus
gagggttagattcgctctgcgggatttcaagttctttgagcaacactgcctgtttgacactgctgtggtttgctgaaccgagggtttcttgtgtatggtagccaagcgctgttgtaaccgagcagctctatcacagcccttcttagggtttatgagggtcttcctttgcatcgggggtttgcctgggagtattctctgtccgttatgttttactggttcatccttttacactgtaaatgtaatgtaatatgttcagatttgaaagttcttgaactaaagttataaatacgtcctttaatctgttttgtgtaaagttcactttcagtaatgaaagataatgggattatgccttaatttcaaaatgaaaacttgttttgcttttctagcctctggaagtcaatcttggtaattatatggattagatgaataaaaattttctatttgaatgtatatcttttataatttgaaataaaaatctaccaaacaggacataaactaatttttttatgctttgttgccaaacttggtctttctaggcagttatacttaagcatgaacattgacgacaaactggaaggattgtttcttaaatgtggcggcatagacgaaatgcagtcttccagggcaatggttgtaatgggtggagtgtctggccagtccgccgtgtctggagaactgcaggagtcagtacttcaagatcgaagtttgcctcaccaggagatccttgctgcagacgaagtgttacaagagagtgaaatgagacaacaggatatgatatcccatgatgaactcatggtccacgaggagacagtgaaaaatgacgaagagcagatggacacccacgagcggcttccccaaggactgcagtatgcactcaatgtccctgtaagtactaaactagaaatggtccacggtcccgggagtcaccaaaaaattacaacagttagaggctaatcagtttttgttgttgttatcgttttgtttgtttatgttttaattgagtgactaagctgtggacagctatcatattcgaaaggcagaattaagtttttacatgttattgtttttgaactctattttccaacatttatttggtcatggttatgtgtataccggatgttaagcgcttgcttttgaaagacaccatgtttagcatttctttttgatttttggaggtggtttctctgtgtagttcttgctgtcttggaacttgatctatttgtggcaggctgtcagtatatagcccaagttggcctagaatttgctacgtgggccaggtcatcctttgttgcgggaaatattaaaatcaaaccagcacattgctgcgcttatgcctgctcctctctcagctagggggtctggctggcctgttcttatcctgtggagaccctctggcctggagctcccgaaactaccccac

SEQ ID NO: 24071 - DNA, 1200 bp, Mus musculus
atatcaagtgacttcttttgtgattgggtaacctcactcaggatgatgctctccaggtctatccatttgcccaagaatttcataaattcattgtttttaatagctgagtagtactccattgtgtaaatgtaccacattttctgtatccattcaggtacatctgagttctttccagcttctggctattatgaataaggctgctatgaacatagtggagcatgtgtccatattaccagttggaacatcttctgggtatttgcccaggagaggtattgcgggatcctccggtagtactatgtccgattttccaaggagccagtgatatattttcttattttaggagagaagaactggatcacagttaaattcagatcaaagcaaaactaaaactgaactgtgtaaatggttaatgtttgacatctgggactcactcatgatcatctggatcccaaagggcttgagtattccacttctccagctctgctgtccttggcacgctagcttcttgggtaggctcggccttgttccactccatacatggtgctcttgcagtcagttatcccgtggttctacatcttcagtctgtagggatctccttctggactcttttaccagtgacttctcttggcatttcttctggccatgccacatgatggcagtcgtcagcttctccatgatcccttcaggactgtagctttcatgcagccagaaccggttctgtatgtgatactctgctctagtcccatatggaccacagcttctctatttgacctcaaggaacacttcccagaagagtttgcttcaatgaggctgtctcagtaatcacagctgactcttgagctccacctagccagcatccattgtcccagggagagcaggttccatgttgatgatgagactgcattgctggatctgctctcttctgattcttcagccctattaaccaaaaaccaggttctttgggtttggtttttttgttttttgttttcttttcttttcctttttggtttttcaaggcagggtttttctgtgtatcctctcactctgtaggtcaggctggccttgaactcaacaaagatatgcctgcctctgcctcccaagtgctagggttaaaggcatgttctaccactgcctggaagaaaccaggttttttattcaaaatccgacacaaatggcctgataacctttgccccttctaac

SEQ ID NO: 24072 - DNA, 2986 bp, Mus musculus
aacctggtttaattcttctctttctggactcttgatagattggataattaaacagtatcccaagaaactaaagaaatgggcattttaattgcttacttacgttacatttaagtgaatactgctcacgacagttttaccaagcgaaagagcttactgattccagtaactgcaatttctttttcagctagatgagtgatgggaaattttttgttgcatttcaaaatctaaataaactacagactttatccttataccacgaatgttttttttatatatgtatactttgtcttaaaataatacagcatgatataataaatagtgcttttatatatatatatatatacacacttttatgaagaatgatggtttgagttacacattgaacagttttaatttttggagactaacatcggctctacatctcttttatttgttctacttttttgggttttgtactttccatttccgccatctttatcgcagtgccccagtggtgacctgaaaccagtacccttgggagatgacgctttgttaacttccattttgactttgctgttgaccctgtagatgcgtgctttgtttcagtgttgagtattttatccatttaaattatttttcttttatttaatgttatcccaagactgttctcataaagaagggaacaaagaaatatcctcccccagtgtccttcacttacactcatttattttttaaaatgttggtatttttatgacaaggaatataagttatgtttatgtggtttcctctacactttgttatgaaactgcttgaaatcatagttttcccatttgacagctttgctgtcagatcttcaagaactttagacttctttgaagtgactattttaagttctgccattatcgatctgaagactgatgtgtgtctgtggcgcatcacataaccacaggaacgcttcatcagatgaggtgtgatggaccgtgtgcaccctagatgggtgcttgtatttttctcatagtacttttgacaagagcagacatttatctcctaagttgaacctgattaaaaacacagtgtggttccactgagcacttgatgcatttcttgtacagtgtaagggtctgtttttaacatcaccagcacagttttaagaatgtgacggttgctgagcggttcaggtcagcttaggaagaaaaagcctttgaaaatggaagttctgtaaacagaatttcaggtgttgcattcctgtcttaaacacatttctttaaatccacacaacggcagacttttctaccaggtaataagcattcgagataactgatagccagcataacttactgacttaccagttaagtatagtcatcacttactgtgaaattccagatgcctgccaggctcagcttgtatcttcatccttcgagaagcatctcaacaggctgggtttccctgtgttggtttagaaagctttcctgcctgggcattaaagaaagaaagtggccttgtgtgctgctctggacagatccctggaggatatgagataccctgtcagttcacacttctcatttcttctccaagcatagctctagcacccttcagcttctgctcaccgttagcctgtcagtctgggcccactagacaaggcaggagctctccagcatccgaaagcattgctgctgtttgcgcttcagttcttactgcacatgtatctcattggctttggaatagctgagtagctcctgtggtttttatttttgtggatctacagtgtacatgtgctacctagtcaggtaggagtccaccatcttagctctgactcagggtgccagcaatgggtcatttctgtctcttaggaggtagaagaggccttgtgctcagggcaagctttcattcccacaggtgagggacacttgcaaagtgccagcaaggctagatgttttgccacttctttgatttttattaatttgggcttttaaagggctgtttaaaaaaaaaaaaaaaaaagcggccgggaacctctgagtaggtgtgctgcgtccggagctccctcgaacctaagctagaggtcatcttttacagtgtacttacttgaagaagctctattctaatcaatgagaatctatttgagtctgcaatttaagttaaaaccttttccgtttcaaattgctttatttcagggaaataattttccagttgtttttgctatattctgcaaataaaaagtgtgtgtttccttttttccacctaaactttggtaggaaacagactaaagcagacaaacatttcttgttgtgtttgttgctttctttaatccaatggataaaaaaagtaaaaccctgtaaacattattttatttttttatgcaataccatgctgtaaatagggttcatcgagtaaggatgcgcctacctatgactgaacctttgattctgcacagttagagtttatatataaacgtgtcttgacaatcaaggacttgatgtgagtcttcctttatgatgtttattaatgttatgcattccatttgtttgaagtgagtaccaatgtgctaatttgtattgtctgaaagtatgtaatgtttttacagcttgtttttaagactctgtaaatatgtacaaaccagtcacagtaccgctttatgttagaaggcgtgtgatgttgtactgtatgtaagcaataatacatagcagtgctaactttacaagtagcatcaggaacgttctagagaaacatttcagagttatccttattagttacccttgtttcacttaataatgattacctttaatcagtttttataagcaaattccattgttcctcctgttggaacgtaacactgtttacacagcataactgacgttgcaggggggacaggctagatgtggcttcgcctgtgctcactctcactaagcattgaatggccttaccactcttgtgcaaagatggaggaagaccgctgaacttagtgcccatcacactgaaggaagggatgtgttttgttttgttttgt

SEQ ID NO: 24073 - DNA, 1186 bp, Mus musculus
taatctctctgtatgttaattcccacccctcgtcctgcaacccgaggtggctcagtggtcctgctgaagtggtgagggtcagccccccacccccgcctctcagcatgcccgggccgcattctggaagctccatttcctgccagttcggtgtcacctgactgaaccaccgcccttcggacagggggtgctcagggcctgggtctctagtccagatgctcgagtccggacgctggggcggggtcgcccgagatgcagggcaggtggccaggagcgcttgcggccacgtggcaggaccgggtggggcgggcgtggcctccggagcctgagtaggagcaggtgagggtgcgggcactgctctgtggaggggaagagtggctggggtcgcaaggacctgactctggtgcccagagcctcatcccgcagccctcagatctttttagggtgatgtgtcccaaaggaatcttgccctattcctctccccacgagtctcctgcaggatggggagcacggccagttgcctcagcccttctccctccctctcttttttctttcaaatgtcatggggcaaggtccctggcctcaggaaagccagatcaactcctctggtgggccagaactgtacttttctgacatctttttcttacctgccctattctggccagggtccaggggcctctcaagacagccgccagccctctggctctgcctccagtacactctgcctgcactcaccaccagacacgggttccagcaagaccccaaatgtccttgctctgaacaaagggttcccaaggcactggggaaaagagtgtaggactatgtctttaagggctaggcagctgagcagtcagcctagaccattccccaatattcaggagttcagggagtagggagtgaactataggagttcctgtgaccccaggacaacgggaaatgatcaggcgggctctgaaccataaatgaggttctgaagagagcagtggggaggagtccccagatggggccaacaaggtttctacttcacccacgacctttctcagtgcagaggaagctggacaggcaagaagcagcaagggagggagggagggcctggcctgacagagtgatgtttgctttccagagtggtctccctatctagataaaagtatcagaacctcacttcctggagaatggcccagaggtctcc

SEQ ID NO: 24074 - DNA, 1099 bp, Mus musculus
tctaactacctctctcctggtcacatatagatgcagcaacccctgctactaagagaaaatagggatccctttatagagtcattcctcacctctaggtgtgtgtgtgcgtagtggggagagcacacactggagacagagtctctctgagctgaaactgtcctggctctgctacctagtcaatgagttcccggcatctccctgtctcagccccacgaggctggggtttcagcatggcaaccacacacagctttccctgagcgctggggatttgacctcaagtcctcatgactgcgtagcaaatactctgaccagctgaaccatcttcccagtcccaaggtggaaggttttatccttgtttttctgtttgttcgtttgctgttttgatttctaagttcagtctcttctcttttcctgctcctcttccctcctcctgttggctgcacatctgacttcatgatgttctttgcagggcatcctggcccagccccagccctggtggaagatccagctgttcatgtgggagccggtgctgtttgggacctgggatggtgtgttcacatcctgcatgatcaacatttttggcgttgtccttttcttgaggaccggctggctggtggtgagtgagctggtgaccctggagcttctggtgggcctgtgacagggtgaagcttcttggatactacagtttagggaacagattccccaagcacagactctgacacaaagcaggaagtacagggcagagctggcactgcttttagaatgggaaatcggggagcctgggcttcagaggttcccagtgtgagccttgggatggatctgactatatgggggtcagtggtcatcatgggtgggactagagttaggtcaaggatcagacagatggggacttttactctagtttgtgacccttctggacttcctagtatgtcaccgcactctgtggccctctgaagtaccagctccccgtatacatagttgctctctcacacactgttcttggccttgtttgtagggctgcatggttggagatacaaactcctgcctcccgggattcattgcccagggcagactctcttgtactagatcctgatggata

SEQ ID NO: 24075 - DNA, 1157 bp, Mus musculus
gtacacgttggcatacacttccaggaaggtgtacttatttggccagaaagtatttagtgaggactaagtccaatggggtgtaagcccagtgagcatgaaggggagtcgaaaacgagtcccctcttagagctcacacgcagggatcagggctgacctgggaagagactctgtaaatagatacttagctggagattggggctgaccttggcaaatagacacttaggaagtatggagatagataagcactaggcttcgagtactgtagagctcagaggaagggtgccagtgccagccaccagagaaacaaatcctgaagacagagtcgttttcaaggccactttggagttagcctggcaatccatagaataagtagaaaaggctttctaggctatctacacctagactggtgtaggtaagaggacgagagagagagagagagagagagagagagagagagagagagagagagaaagagagagagagagagaatgagagagaacatatcaacatatcctttcatgctaggccaaggttacctgtatggtgggtttgcaagcttctggtgactcactctcttaatctctctctctctctctctctctctctcaagatttatttatttattatatgtgattacactgtagctgtcttcagacactccagaagagggcgtcagatcttgttacggatggttgtaagccaccatgtggttgctgggatttgaactcaggaccttcggaagagcagtcggtactcttacctgctgagccatctcaccagccccgattctctcttttttaattttacttttgtgtataggagtgtttgcctacataaatgggtaccatttgtatgactggtgcctgagaggtcaggaaagggcatcaaatcccctggaactggaattagagatggttacgtggtcgctgagaactgtaccctgatcatctgcaagagcaaaaagtgctcttaagtgtggagccagctcatctcttggtcctgctggtgactctcttgagccgccttcactttatcgacatgtggtatgaagttgtaagagtttgaagggcgggctttccacctgaaaccttgggtgggcctcagctctcccggtactgtccgcttcttttctcatcgcccctcatagtgcccctctg

SEQ ID NO: 24076 - DNA, 1203 bp, Mus musculus
gcactcacacactcattcacacatacacatactcacacacacatacacactcgcatacacccacactcacatatacacacactcattcccacatacgtctatacatgcactctcgttaaaagtattggcgtttaaatgtttgtgggagtgtgcttcggtggctctgaggacagagccctgtgtgcactggtttcttgtaaacatttagttcttgaatagtgcaggcagagaaggccaaatcctgacccaacatcccataatcattatgccctgtttaccactgacagctctcaacccagggctcattcctctcttgttcaagatgtggatgtgaaatggggccttagtcaggtccccctgtggaagagcaggttagacctgatgcttcctcccagacagtggaggtatcacctgctcactcctcccacagtgctggtgcgtgcgcgcgcgtgtgtgtgtgtgtgtgtgtgtgtgtgtgtgtgtccgtgagcaggcgggtctgctgctgatgcctctctgttgctggctctccccaccggggattgcccggcagtgtgttgcaggtgctatgtacatcaccggctttgcggagtccatctcagatctgctgggacttggggacatctgggcagtgcgtggaatttcagttgctgtgcttctggctttgctgggcatcaacctggcaggtgtcaagtggattatccgcctccagctgctgctgctgctcctgctggctgtctcgaccctggactttgtggtgggctctttcacccacctggacccaggtaagcccctggagtgtagtgctttgtagctatggataggtgtgatttcagggcaacctccctctcctgcaggctgtacctctgactagggtgggctggtcctaatcatgtgagcaagtccatcagcttgtgtgcagctccctgggaccagaagatcctccattcacacaagcacccctgaacacacaaatgtccccccacagacaacccccacattcacacacaaacacaaaaatacatacagagacacatacactcacacagacacatacagacacacacttttacttcatgtatttcccatgattctgtttcagtttttttctattaaaataaatgtaaataacacaacttcggccaatcaaaagtacaagcaggtgaacagagaccaactccatagcactgactgggaccctga

SEQ ID NO: 24077 - DNA, 1120 bp, Mus musculus
caccaagctacaacctagctggtatcagtgtcttcctcttgctgaatgtgtgggcagggacattttgatcaccagaattgattgacagtgaaagcaagcaatctttcttcttcttcttcttcttcttcttcttcttcttcttcttcttcttcttcttcttcttcttcttcttcttcttcttcttcttcttctcctcctcctcctcctcctcctcctcctcctcctcctcttcctcctcttcttcttcttcttcttcttcctcccccttcccttccccttcccttcctccttctcctttcccccttctcctcctcctccctccccttcttcctcctcctcttcctcccactcccccttcctccttctcctttcctccttcctcctcctccccctcctcttttattaaatatgctaaccttagttcacaacaggcctgggtgacaagcacttctgtcaatccttagccctcatgtagcatttggatcagggttacccctgcttccactttccaactgtgacaatggagtgcagagtttcaggccctaccctgatggctgcctgcttttgcctgtttctccacccagtactttggcaatccacggtccatcacctctcggtgtgacctgaaggcaaacctcatccggaatggctgtgaaggtgagattgagagtccagccagcagcacccacgtcctccggaacctacctctcagcagcaagggttccagtgccacgggctctgacgtcatccagatgacgccgcaggagattgcagtgagcctccggccaggtgagtgttcttcgggatgggttgggcaccataggcttagaaaggcccatgggtgtgatacgctaatgtggaagatgggcttgattgagctcagagcctggagatggccgaaaggctcagaccaggaagcagaggataaggttgctggaggtgagtctgggtggagtggcttggctatatattttttatgtattgtagtagaggctgtgccttcatgaaggaggcatgccctgggcatccgtttctgcaacaaacataatgaacacacaaacctcgactgaacgatgattaaaaacccagtattgtaggatatttataacattgcaatttc

SEQ ID NO: 24078 - DNA, 1142 bp, Mus musculus
ctctccactaggccttgcccagagcaggtggtagttgttaattgatgtttttccaaggtacttagtgaaggccaggacagttgattaatatttagagatgggaccatcgagatggttcagtgagaagatcatttgagtttgattcccagaacccacatgatagaagagagctgatctctgcaagttgttctctcatgtgtgtgtgtgtctgtgtgtccccatgtgcgtgtttgtgtacatacatgcacactaaaatataatgtaattaaaaattgaaaaggtaggggctgtaaggatggctcaatggttaagattgactgctcttccagaggtcctgagttgaattctctgcacttacatggtggctcacaaccatctgtaatgggatctgatgtcctcttctgatgtgactgaagacagctacagtgtgtaatcatataaataaaataaataaatggatctcttaagagattgaaaaggcttacagatgatgatggaaaatccacccttctctccttcctctctagttacaagttattccccaactgcgtcccctccttcgggttccggcatctgctgcctctcacagacagagtcgacagcttcaacgaggaagtgaggaagcagagggtgtcccggaaccgagatgcccccgagggggggtttgatgcggtcctccaggctgctgtctgcaaggtaagaacacccaagcacgtggctcccattcactgttacatcagaggctgagctcagccgcaccatggcggaatctctagcaatcaagtcagctagacttgggaagagttgagcttgtgttgggtgtggctctgtgcgataggctggtgtccttgccagacagatggctgttctgtgtttatgcatcagcttttttttttttttttttttttggcttgtcattttaaccttaaagattgccttactggggaatccagctgaaatagaatcaccgaagtctttggctgcatgcctatgtttgttttgtttttcctgttcctctgagatgtgtgaatccagagggagggcagagatttcaaccagaagggaactttgactttgagaggttctcaacttggggcaatacatgaatgcaatacagatatcgaattagtgatagaataagt

SEQ ID NO: 24079 - DNA, 1326 bp, Mus musculus
taggagaattacacacctggaagactcgaggggcgtgcagatcctggtgcatgttgggactgctgagggtgaagcgccagaggcaggctcagtggggagttggacagacacagagacggaacccaagaaaaaagctcgagctctcaggcctggttggatggtcacatgagcaagccctctgccccgggcacacgcaggctcagaacagagctcaggggaagtacccctgactccccagagttaagagtctgtctgttcaggttccaggggacttctggggctttctgcctaagccctgtattccacagatgaaaagtaagagctcagagaaggaaagggattcccccagagcacagaacaagtcagaagcaggcatccctgcaggtgctggacgggcctgaggctgaactaacacgtgtgctctcctctcttgtgctcgcaggcctcaaaccccctgtacagaaagcccatctccacacacactgtcgatttcgccttcaacaagttcaacaaatcctacaatggctcagtggactgaggctcctggatggctggagggggactaaggatgaagactctggcgtgccttggacttcctggaccatttgctcacgctagctaggcacgcacggataatggagatgccctccattgagccctaagggacctggtagccacacagcgggccacaggcacttggggccacttccctccaagccagggaaagcaaggagactctggtgttctcagcttcccctctgccgcctccagcttgctgtctccatgaacctctgaaggcctggctgccctcttccctgctgggccagacaagaaggtatccggaagagtctgtgtgtacaaagctagcgcgcagcctggctttttccagttgatcgtttttttttctatgaaataaaaaggtcacgcatttatggtgtagatctgattactggttccctgagggctgtctgcctggcatctgtgggtgttggtagaattggggagttgcctgttgaaagtacatgccttgcaaatgttaggttttgccctccggtctgtgtttgtttagtgcttttgtaatgaaaaggaaagactgggaatgaaaaagtaaggatggaaaccaagcaactttgtgttggctttgtacattcgggcatgcgcctccttttctgagcggtcttgagtagccccagtagagactggcatgtccatacactttatcagggacaggacttgaaccagaccaatactctggagctgggctccctgatgtgcgtgggtaattacggtgctgagcaggtaccattgggcctccctggttttgct

SEQ ID NO: 24080 - DNA, 1663 bp, Mus musculus
aggccggggaatacttgcagcggctaaccgcctagaagcagctgagatgtacaggaaggctgcctgggaggcatatctgagtaggcttgctgttcagtgagacagaagacactgaaaatgggtggtatcccaaaagccgctggcttcagagaccagtgctcagggccctgcacagggtctgtgaagagagactctgcagcattgtatcatggtctaacttgtaatcactgcattggtactgtaatgagcagcccttttgaaagctttctcaagactggtatttgtttggcagctgccacctttcagattccttgggctatactgcttaattcttttagttccagtgtgacttagtcacacacatctaatgttagccgcttacctccttcagtgccatgaagctggatcctttcgtggagcaggagttctagttcattctactcagcagtcagtgtagaaagtcaggcacagcttcctcttgccgcctctgtatccaagagagaacggcagtaccagttccccactgtcattgtgtgtttgctaataacctgggggctcatagtgaatggctcagtggttaagagcactgttcctcttatgtaggatcagcatgtggttcccagcacccacattgtgtctcaaaaccatctgtaactccaattccaggggatccagtttcctcttatagcttccaggggctacatgcatgtgatacaatgcacctttactttacaaagacagtctttgccagtgctaagagggaaaattttagtacagaaatatttgctcacagactgagaaattgggtgcctcctacagtgtgatctgaccgctctttaacacatagaacttagccgtgtccattgcaagtggaattcacagcccccgtaaacttgaaccagttgcccctgtggtccgcatgcttactgagcaaagcaccaccaccctagtttctgccctccacacatcatcagtggtaccttaagtcttattcctgccaaaaggaaagatcctttagcactcacagacagctgtatgtaaatagtctagacttgagataactggtgagcgccagacagaatggtctgagagtatgtagcctgctaacttccttagcactgagtcagtacagcacccggtctacacatctataagattagcaactgcatacactcagcaagtaatggtgcatcctgtagtaaagtggaatcaaagtagcaatagcacgtgcttgaaggagtccgactgcagcatggtcccatcgagtaaaagcataacaaggcatgagcctcaggtgggtttgagctaatgtctgagaaaagctgtcaggagctaatggaacttcccttctaggctttagcttagtcatagtctccaacagctatgtggttccaggagtccaaggtccaggagttgtaagatgcagacctaaactgagaccctgaagttaagtgcacacacacgctctttagagcaggcttttaggaaccaaaaggaaaaatgcattaagttctacactgttaactcagatcagtatttggggaaataggaaacaaagtcctcttgaggacgacttactattccacccattaaaactaacaacagtacccttggccaaatcagttcatcaaaaataatgttaaatgctgtctgcttttccaga

SEQ ID NO: 24081 - DNA, 1166 bp, Mus musculus
tttattgatgatactggcctattctgtctttcattattgtataagtgatgtgatttttaaaaaaactccacattgctcagaaaaaaatgagttgttacacagtgaaataatttgttttactctaactattctgtatataattgataatttggagatacagaggatagcgaacaaatagttgcggtgcattgattaacagaaagtagcttcaaagtaaatgaccacaactaagatttacatagtcgcggctctttagagggtcctagcaagtgtagactcggtacatcttgtgctagctgaactgtcttacatagtgtttcaacagaagcttttcttctctaggtaccaagcgccttgtagaaggagagattaatccgggccagacctgtctggtcattgaggacgtcgtcaccagcggagccagtgttttggagactgtggaagttcttcagaaggagggtctaaaggtaactgatgccatagtgctgttggaccgggagcagggaggcaaggacaagctgcaggcccaggggatccgcctccacgccgtgtgcacgctctcccaaatgctggagattctccagcagcaggaaaagatcgacgctgacatggtcgggagagtgaagaggttcattcaggagaacgttttctcagcagctaatcataacggtctcccccctcctgagaagaaagcgtgcaaagaactcagctttggtgctcgagctgagctgcctggaacccacccgcttgcctcaaagctgctccggctcatgcagaagaaggagaccaatctgtgtctgtctgccgatgtgtcggaggccagggagctgctgcagctcgcagacgccttgggacccagcatctgcatgctcaaaactcatgtcgacattctgaatgattttactctggatgtgatggaggagttgacagccctggcaaaacgccacgagttcttaatatttgaagacaggaaattcgctgatattggaaacacagttaaaaagcagtatgaaagtaagtgtgctcagaaacagactggctgaagggaaggtgtgttggctcacaggagtcagcagaagacagagctgtcaggccctgagctggccttgtttctctccatatctccgctgtgttctccagtctgctttctttgttgatttgtttcc

SEQ ID NO: 24082 - DNA, 1148 bp, Mus musculus
gtatggaacctcactcggggtctaagttcctgccggaaagtttacagaggactggaaagagatccgtcagaggcagcccagcagagcaggtgggcctttggcatcaatgacatctcccagtgcaccccacactgtgatggacagagtcctgagccaaatcagagactcccatagccagtcagcccgctgtcactgtgggatcttacacttcacttccccatctcattcaggagatggggatcggcaatcctgcctccatgtttctctggggcttcagaggatctaaggaaggtgtttgtgagtagtgtataccaatcagataatgctgcccagatccatgctggtatcacggtcagcaacacctgctctcctcgctgggtcagccaaatggcaaagaaatgaagatggctggtttccctgggtctttccaggtgaagaacctacagttgagcctctcctcagcatcttcactaaacctacaccctcagtaggaacgttcatttcttaagcagtgtgcgtttgatagcatacactctccagctagggttctgtgatggggaagaggagtaggaaacgttctctctgcagccatctgggatgtgtcctcccaggcttttgaagcctcacttcaattcttcctaccaagacctgaggatgtaactcagtgctggggtgcttacccagcacggacacgtcctgggttcagtgcctggcacctcaagtgtatatgaaatatgttaacttgccactcgctcccttgtcttccctgtgagactcctggtgggggctccatatccttctctctggggaatctccagcgtggtgggacatagaggccactgaacagttctcggcatcctcaggttctttctccactagagtcccgatggggtaggggaatgggatgttgcagaggctaaagctctgctgtctgttgaggagtgctccatatcacggcaaattttgttttatgttgttgttttttccgagacagggtttctctgtgtagccctggctgtcctggaactcactttgtagaccaggctggccttgaactcagaaatccacctgcctctgcttcccaagtgctaggattaaaggtgtgtgccaccactgctatggtaaacttataacacaaatgtcatcct

SEQ ID NO: 24083 - DNA, 1184 bp, Mus musculus
tggctgaactggaaaaatgtatccaagagcaagacagattggcccagctcttcattaaacacgtgagtgtcaccccagctgtccccatctccctgggtgccaacacactcattttaaagtcctcctgtcttcagctcttctcgagtttgccctctctgaacactctggttttgttttttagcacatttgaccatttgtccgccctgttctttcctttatacggctcattccttgtctttaactgcccttgactctgtggggttgggggtgggggtggggatgggggtgggggtgggggcgggggaggtgagccggaagccaaggtgtgtgattgtcacattttctcccgtaccaggagcggaagctgcacatctacgtgtggtactgccagaacaagccgcgttccgagtacatcgtggctgagtacgatgcctattttgaggtgagcggctccctaggctcccaggctaagacagctgcaatgagacacacccgggttctccacccgcaggtgtccctgccagtggtcttcatggcgggaaaccagcctccgcagagctggtagcttcttaattccatccgcatgtgcgcctttgcttgaggaggagctgaggtggctctgtctacccactgttgagaagtcttcatttatgggaagactgtcccagactgtcggtggaagctcttgatctcatgtgaccactgagcactgactgtccaacactcttcccccaccttcccctaggaacattactaagtccttgcccctggttaaagggtttacagccacttcacagttggccgtgttctcagcctctagctggtctctcacgcctttgaactgatccatccacagcaccccacaccttgggatcctttctttctaatataattcccgtgtctagcacctccaagtgtgtagatgccccagcctggcttcttccaagggcaaagaggcaacactacccctcccccgaccaccttagcgagagccctgagtgtttagagaacagagttcaggatccagccttgtaggcctgttgtgtctgaggggaagtcatctcctaattctttcctggagtcgtagagagagcacagtacctgtttcagcttttctcccaggactaaggtgggggacagtggtgggacagtgccaaggagccaagcaaggtctttggggctgg

SEQ ID NO: 24084 - DNA, 1143 bp, Mus musculus
tggagaaaaacatccaacctttctgtgtccatctcatcttaaaaacaatgaaacaatggctgaaccactaacctccaagctctctcccagctttccctatacacactactacatctagatttgagttttcaccctgacaggaggactgagcaaccccagcaactggtcacagccgagtagggcttgactagcccctctgctcagggtcagaggtcaccctgcctcttttttccttcgatgcactcagtgtattagtccaggtcctctagagtaacagaacttatagaatgaatatatatgatatacatttatacataataaatcctacatatataaaggggatttattagaataagttacagggtgtggtccagctaacccaacaatggctggccatgaacagaaagtccaagaattcagtagttcttcagtccacaaggctggacgtctcagctggtcttcagtgtgcgctggggtcctgaagaagttggctctaaggccggtgaaggaatgaaccttctagcaaggctagaaaaagcaggctaagagtgaagcttccttcctccgtggcttatgtagacttctggcagatgtgaacctgattagagatgggttttcccatctcaaaagatctggattaaaggtgtgtctttccacctccaagatccagattagaagtgagtcttcctacttcagatcaggcatataatctctcacaggggcgccctccatttggaggttttagttaattccaaatgtagtcaatttgacaatcaagaatagccactgatcgccgttatccaggcctggtctgttttccgtgtgcctcttatttactggtgccagggagactaactgtagtggctctccaaaaaagctctccaccatagcagctcctgtgtgcctgttagcagcagggccgctcaggccccatctacctgctccgtgagtgactctacaccagctagttcttcaggtggctggttcacagtggagtctgagaacactgtcttccaaaaccactgtggcctcaaactcatgcatcttccgttgaagacactgaggcccagaaaatgacagagaaccaaatcttagtctagatctgagttgtgtaaatggtcagatattagcatggggattcca

SEQ ID NO: 24085 - DNA, 1192 bp, Mus musculus
tctctgactttgaaagaggcaaatattactttttcatattttggacaatttcagacgtgtacacaatggattgtgattacactcacccctcactattctgtccctcctcccacccctgctgagtccccaccgatccccctcctacttgtataattttgcatcttacagatgtatgcaggtaggcacaactcctctgtgatcatgatcagagtggcctagtagaaatgtcagaagatgacatttcatagcactccgtatttctggttcctattgtctttctccccctttctgcagtgttccctgggtcttgggaggagatgttatacacgtgccatttgtggctgactgcacagcagtcatccgttttcagcacttggaccagttatgggtctctgaattaatgattgctgccgaatgcttctttgacacactggggagagcagcattggcctgtaggtataaacataaacgtgtagaaggcagcattactacacatccatctctcaaagcatcagtggtgcattccccctagagcctgtgccatccccagccgtaagtctcttgtccagctttatggtagtaggttggggtgttctccctctcatggaccaggcctctgatgtaatcagtcaggaagccgttagtgcctccccagcagttatgccactattacaccacctgttgggtagtgttgtagcatccagggtcctcagctgggtaggaacactttaacttttcttccctaacagcctacaagagcagctttagccaggaagcaagtagcatctatttagagatgcccagctacccaagccccactttaaagaatgggacgaggcagggctaagaatgacatggtgtcctgctcacccgtcctggcaggaaggggaagtcaggccacagctcttcagaagctttagtgtccaccagtcactaagcatctgctgtacggggatgtcttcatcttgcctgctgcctccctgaggagctggtgctgggggctatgacggggagtctgaatgacagagtaattaccaagctgggagaaagtccgttgtttctgaaggtgtctttgggaagacacacatggaccgacaagatcaatgagctgtaaatggattactggtctgccagtgtgcagtaaaagggagcaggccattcactctgcagcacgggagcagatttctgtgaa

SEQ ID NO: 24086 - DNA, 1159 bp, Mus musculus
ggtacccagcacccatatgacagtgcataaccatcggtaactccagctctaggggtctgacatcctcctttgtcctcactggcaccaggcacacatgtggtgcacagacatgcaggcaaaacacccatacacataaaataaaaattaatttaaaaactagcttgtcaaggatgatacatattttagagcttggatattactaagctgtcatccacatggttacagcagactcccactgactgcgaaaatgcccctcatgaagagctattgccttatattttttatatttgtatgtgtgtgtgtgtgtgtgttatatgtaagtgtgtctgagtacatgtggaagctaatggtcaatgttgtgccactatacccagctttcatgtaagcactaggattccagactcaggccctctattttctgtggcaaaccatcccccaatcccaagctaagcattttctaaaagcttataaatcacttagctttcttacaggaattgcttgttatatttttttccaggccttcaattctaaaacaagctataaaattgtgatgtgtttaaactttatattctttacttgatggttgttagattttaagtccttcttagggatttcttttgtacttaaaagattatttatatttcctcataaaacttgtgttgttgaatttatgttttgttggtatattttgtgttcttaactctttaatctatccagaattaatacttgtgaatggcgtatggcaagttattatcattttagattcaattactaaatcaaatacatttgtatagaaagtttccaattctggaaagataggaaatgccagtacctagttacatattcttgtttgtgaagtgggtgcacactgtgaagacagggttgatgttaacattcccatgaggccattaccttctccatctaacaatgaaattactagaaacacagatttatgtctcccaactttgtcaatgaatcacaaacatgaaataacatagatagatagatagatagatagatagatagatagatagatagatagtagttggcacccacaggcattctggttgacagaaatggcaattattttaaaggtaaactacagtagtaaggttattgtataagtatacatacacacacattattttgaaagaggaga

SEQ ID NO: 24087 - DNA, 1174 bp, Mus musculus
ccgtgctcccacctccaccccaagacagactggctaaacagttaagcccaggacctgatcctccccagttctccgtgaggccctagaggtgtgttgtttaccctctctgggcctataattcctcctctgaaataggagtaactccatcagaagtctctctctggttgttctgaaattacccagaataaatgtgaagataagcagagtgccagcagggtgggtaccatgctcagtggtggaaactctgttctcaatatccagcacaaacgataacatctttatttggtggcctgtgtcccttgactgttatgacagtgaagatagtgtctgccattgcattactcagctgaagggagcaatgtgcccctccctctcctgttgtgttgctcccattggtcactggatgagagagaaagcagtcaggatcaggaccgcgcgcttggagcaaacggaacttccagaggccggctaacccactgttctttcttgtcttccagtgttcccccagttgtacttccacatgatacaccagagaagaaaggtcctttctcacaccgaagaacataagaagtttgagtagcgctccacaccaccccaaaccagacttttcaatgatcaaaatatgctgcagactttttgagttcccagtaagaactatttttaaaatattaaatataaaacaaaataaaaaaccaaaatccagtgtcacacaggcctgggattttataaaaaataaaaataaaaagattaaaaatgcaaaagtctgttacataaagcatcctagctggtcctttcagcatgctctgaccagaagttgccagttcctatgatggcgctagaagggggttggcctttatcttctgtgtgtcctccattcatctggcagtacagaatgtacacccagtgccaagagctgccgtctgaggggcaaccgtgctccaactgacttcgcggcttgcagcagaagctgggttgcagtctgcggtgtggctaactttccccttctcagagtgcttgagtgcatgctggaaactgctcaggaatgctctgaagttctggctaggacttagcccctcatatctagtgaatgcgttacaaaacgtatatggctgtgaagctttggggagtgcctgtaaccagaaaaccactaaaagcctttcatttgtttttgatt

SEQ ID NO: 24088 - DNA, 1227 bp, Mus musculus
caagcccagggcttcatgcatacagagcacagactatcactgggctccctgtcgcctggcatcagtgttttgaaatgttctatcaggcaccaagattgaagacttgagccctgagcctcccctgtcagcagaggggtcatgtagatgacacaggaatctgatttatggctttgttgaaaggcaagttgtttatatctacagggtttattgtggtgagttagtggagagtgatggccatggaaaatgatcataggcatgtaacagggggaaacaaacatgcttgagggttgctggataaaatgttgtcaggcaaggctgtgctttggtatatttatgctgctcttatcgctggcaattaaccccaaatgtgactggataaatggctaagttcagtgctgtaatatctgcaagaatattttagagtgagtctcagcagagcagggaacctccacttggccttctggaagtccaagtcttttagctgacaaatgcctgttggttggtagtagctcttccctgctctctcttacatctgtatggacaagcatcttagcctcaccctccttggctgagttcattagtttccatctctctcttccattgcagcttggctgtgtctatcgtagatgctcactgaacacccatcagatacacggacggctttgccccgggttacacagcaggcagctagcagtattagttcagcgctgatggacttgcctttctctctctctctctctctctctctctctctctctctctctctctctctctctgtgtgtgtgtgtgtgtgtgtgtgtgtgtaggacttcataaaagaaggtgacatggtattggtggtcactgggtgtaccaccttgagagctcccttcctatctactctgaggttagctctttcttgccacctttgggatggggtaagaagggcagggcatctcttgggggtccctgtgctctggagggcagactgggaagcacctgtggcctgggcttgaggagcacctggagcaagggtagatcctcaaggttagtgcttggccaagcatcacttgtggcctgccatgtctccctttgggagaggcttatccagggagagttaattttggattttgctttacatttatttaaaagtggaatattcctttagcattggtgacgatggcctagaaaagccaattagtcaccatctgagtcctcctgagggtgtgttgccgccctgttcccctc

SEQ ID NO: 24089 - DNA, 1220 bp, Mus musculus
atagctttctaccactgagactgttgggatccagattccctgtttctctcctacttgtgctatgaccttgcacgtctctgacacctttctgccttagttttctcctatgtagtatggtggttgtgattctaaagtgaatggatataggtaaagccctgggaccagcatcaggtgtggccaccacgctcacaaatgcgataaatccttgcacgaagctctttagaagccatcctgtaggggaggattctgttgcaatgtctagcatgcagtgttgccctgggcaaacatttgtgtggacttctggacagagcacacatccgaagagggaaaggaattgagtgagtcacgcctgctgtatatcaggtgctctgttgaaatgttccttacacagcttaatatcctgaagaaggggtgtagagtcaccctgagagaggtaagctatgcctttcagtcctctccctcccagccctaagacacaggtgtgctggggaaccctgtcctatccagtgtggcactagagtccaggcctcagcgactttgctttgaatatacctgtctgtctacctgacagtcttggaggacaccttccctggtgcccctgtgagtccctactgatagggagatgagagataggaggtgagcagcctgcaacctacagttctgtcagctgaaaggcattcttgaaaagcacaaatatagcatggctataaaaagatgaaggtgaactgctttgaaaactgaaagccagtagggagtgcaactgtggccaagtgacaaagtggggaagcaaattttgcaagactggaaaaccagtgcaagtaagactaagcaaagatgctgacaagcccaagactacagccagccaggtctgaaccagaaagctgccagcagaaaactctgatgaggctccctgaggggtcctggggaaccagtgtgctgtcaccatgagctggggtggctctgccctgctcactagcactgcagagctcaggtggagtggtgggaggctccctccttggcctaggggcttcgtttttgacctccactgtcctctgttttcccttttctctagacccactcgctctgtgacctccccacctaggcctccccggcccatggttcagagcttcaaggcggatctccagtgttgctgctgaggacaaagcgagggccttttctgactttggtttggaggtaatcatactactggcttttacgtc

SEQ ID NO: 24090 - DNA, 1183 bp, Mus musculus
ccccgggagctgtatctttggagatggggacaatctaagcacaaacctgtctgtctttctatgctttctgatggtaaggcacttacttgtaagctacacacatgcacacatatacttaacttatttatataaagactccaaataatgtagaaatgtcaagtaccaggtacaactctgcttaacaagccagcctattacatctctccattctcttgctcccttaggccggcctccccagaaccccctcatccccacacttctccacctgatctgatcatgggagccccccttcctagaccagctcaccctgttctcctgtcttccatcccacccacaggctttgcctctgtcctcccacatcaggaggcctaatggtttcctgcttcttagacattcacctcccattttagaaagccgtgcgtggcatgctctggcccacccgatgcctctagaaacatcacactatgcactttctgacacagcccaccccaccagttactcatctgacacactctctctttagctaacgagaaaatgagatgcaaggaaccattcatcggacgccccgatattttaaattgacggtgtaggaattagctctaggctgacagttacctttatgctttcaataagtgggggttaaaaggggagcattaacagtgaacctggattgtgaagcccgaggtagatggttttcagcccactctgtatgtgtgctgtgagtaggcccacgcccttcaccgggcctgtagctgcccacgccatgactctaccagtggcttgtgctctttaaatgttttgaaattatgtaacatcccttctctgtactatgacattttcatgagtttcagctttgtgtctctgttaggtcagatcaatggtgttacttgccattgccattttaggtagctgaaaagtcatctgcccattatctgccctgcgggtgcatttcttccgaaataacccataactgtcacgggcctcttgtgttctcttgtgttcctgcatcagatgttgggaaatccccgagtccttccccatcatccccactctattctggggccaactggctgctcccctaagtctggccatatgggtggtcccacccatctcaggaaccaactcaaatgctaaattcagattaaatttgtagctcaggccttaatttagtctcacaaagctc

SEQ ID NO: 24091 - DNA, 1208 bp, Mus musculus
gtgtggcggacagtcatttggcaggcaaggttactgctctcccctgactcgtgcggcgtgcatgcgatgctgctgctgctgtctttcgctgtatcaccagtgtcctgctgtttcacttggcccgcacatgaagtttctgcctccctgtgaaagggcttctgggggaatcgcaggcatgcaggttaccagaggaagatggatcagctgccacggcgctttgcagttggtcacactcggtggctggaagggaaaagtgaacccactggccttgaggctcttcttagcagcgctatagggaatgggagagagcgccagacatgtctctgttggtgttcccgttgccaggtgtagagaagaatacaagatctgtgttcacacactggacaggccctgcatctgccttcttacacttagccagaggtgagtcctttgaagctcagtttttatgtatctcatgtgggggtggctccacttcccacagcagtggtttatagcaagaacacatacatatccttctggggtcaggggaggtcctggaacccaggacctcacgcctgctagacctagactgctctgtcactcagctctgaatcccaccctgcgtcctacaagcacggcagatagacctgcgtctctgaatgcttagttttgctgcctatcagataccctgatgcttctgatccatgtcatttgaaaaagatgcaggtgtcgtcgtcccctggattgatttttacgactgcttctgagtggggaccagaaggctgcaaacgtggatttagactcattgttggaggacagactgtgttaatgtgttgaaagcatggctgtgtactgtgggtcaggagcacttgagttgtttcttttttttttttttcgtatcaattagagaagctttaaggtatgattgggtttccagagtgggaattcatcccctcctccccctcctcctccccctcctcctccctctgctcctcctcccccgctctctaattctgtgtttctaccagttcatccttgttagcaggcctggcacactgggctggcattcacccaaagccctcttggccctagaagaggtttttccaaaacattaaaagcctcagggacttacgtcttggttaaatgcactgcagttgcaatttcaggataagcaaacctgtcttataggctcctggatcaattgtcctgccccctgacttgtcccttgt

SEQ ID NO: 24092 - DNA, 1187 bp, Mus musculus
tacaaggtgtttgactggtcggttgatttgtttgtttgcttgctataatacctcgtaggcagtccacagtcagtttctctccctctgaagttgtctctgtgtgattgctccagcaagctccaccccctctcctctgcttctcatctttcccaaacttccttaatcttctgaagtgtctctttatatctgggcccaggactctcagatctcccatctttgtggttctgcaggggggaggagcaggcaggtgggtgggggcgaccagtccaggtaccacactcttcgttaaggtagcttctggtttgacctgactgctgttgggcagccccacagcactactgggtttgattggccttagccaatcatcagacatctcccaggtccctttaccgtaagctgttagagctccatcttctgagtctttgagcttctttggcttcctaggcttgtcataacaaagtaccaccagccgggtggaccaaacagcagacgtgtgctgtgtcacaggctgagcagctggcggtcctgtacgggcagggttgatgctctctgcagggatgcggttgaggactttactgatgcttcttgtattagttggcagtcttgagtgtttcttcacttagagaagatctagtctatttctgccttggtctctacttggatgcatctgtctccagatttcccttctttataagggcaccgccattcacattgggtgagggcttcacccttctccggtatgactccatgtaattcaatctgcaataatcctattttcaaataaagctccattctgagatattgggggctaaagatgtcagaatatgattccaaggggggcatgtgattcgccccatgagtatgctgtagctttttggtgtctcgggtggaactttccaatttttccctggttcgttttctccacttcagttgcatctctctctccagctgattgggatcttgtaggccctgtttctggcatccaggattcttttgctgttgctcctggcgtgcgccgcttcctgtgtgttgatgatccaagggattgataagacactgaagtaggctggagctctatagtgggcctcctctctccttccaaggcctgttgggaagcaccctgagggctaggtcatacagctgtgacacgttctgctaacatccaccttccagcttcctcgtctggc

SEQ ID NO: 24093 - DNA, 1345 bp, Mus musculus
caccagcagcaggtggcatgcaggctctggacctccacgtgggcaccctggagcaggacctctggaatggccccaaaatctgcctttaaaagaaggctgcaaatatattccccagctctaaggaagaggagcaaagttaactaatgaaaggaacagatgagcagcctcctggaagacttaatggagctagggaaggagggaggagggaggagaaaggagggaggagggaggagggaggagggaggttgaaggtagatgccaagaaggcaggtgcacacagtgaggacaaggttctcagtctcttggcaaaggaccttttgctcaggagacaaatgtctgccatgacaagatccacctgaggctagtgggaggtcccaggctgatttagttcttacaaaaccaaataatagaaaatgctttagaagggcctgagagatggcccagtgcttaagagatggcccagcagttaaaaatcacacactcgctttttctgcgctctcgctggacaagtgagcagggacggcctcaggatgcagaacaacaccggggagtttgtggacctgtacgtgccgcggaaatgctccgcaagcaaccgcatcattgctgccaaggaccacttgtccatccagatgaacgtggccaaggttgataggaccacaggccagtttaaaacctatggcatctgcagggccattcgcaggatgggcgagtcagatgattctattctccgattggctaaggctgatggaattgtctcaaagaacttttgagcagaagaaatcgggaatttgttacaaataaaagttttaagtacctgcgggggggggggggaatcacacactcttgcttacagaggacctgagtttgattcccatcataccacattaggctgctcacaattgctcataactacaactccaggagatccagcaccctctttgggtgccttgggagcatccagacacatgcacacatgcacacacatgcacacacacacaaataaaacttgtaaaaaatgctttagggctcttaacacacagcaggcaatgccaccagtgttttacaccttccaacaagtctaactgtgtgaaaaatgagaacacagaggctaggaaatcaaagtcacaggcacaacgagcgagcttcccccaactatccccacactgagcctgtcattctatggaggtgttcctgctcagggaggggatggcacgggacaaggaatggtcttagtattcccgaccaccaagctgactgtagctcgagttccctggtcaccctgacactgtcaaactaaataacaaaaagagtttctcaaaaagactgatggtgttttttgtgaaaa

SEQ ID NO: 24094 - DNA, 1223 bp, Mus musculus
tgtcattgaccatgggagagagggctggcttcaggctggcacatggctgcagatccagctcagcccaggtctcatggtctcctctgacccaccatcactttcccctgccatgtctgagctgtggacctattgggtatgtgaggaacttggagagtagagatggcagagaatgggttcttaggtttgagctggaaatgacttccaatggccaccaccagctaagtctgccccttcttactggtccccccaaagtccggggctgcgtccagcttgtcagtgaaaagaattcatcaaatgtcccatcaaatgttccagaagtttcaaatctcagcccagggctggcgcactccaatgctgttctctaagtgtcacaggggaccactcactgctggcttaggttgacacctctgtcagacagtctgtatcttgaccagaggcatccctctggtaagaggcagtgaggactgagaaccggagcctggactgtactgagaggcccttcacaggactcttggcacaggtcttagtcttgccttcaggatgcactcaaggtggcccagaaggaagactcaagaccataggaggcagagtctggcctccatgcctgtggagactgttgctgctcaagattcgttggctgagaactgcttgagagtctctgctggcccctcatgtattcaggaacgcgcgcacgcgcgcatacacacacacacacacacacacacacacacacacacacacacagacagacatacacaccatctgctacagcaacaaaaaggatgttaagctgtggcattattaattaaagatgatatccagtctccaaatggaactgtctttgtgcatatgtgtgtggaccctcttggcatggtgtagtccatcagtgcagtgctctgaggtaacagatggtttctcaagacggaggaaacaacccagtggagtttgactttaatagaggccatctttctctgtgggtttatgtgcatgcacacacccgtgtgtgtgcgcgcgcgcatacacacacacacacacctttctctttcagaaaagaagctggggtagggggtaaatggaattcaccagtgaggccacaaggcccagcaaaggcaacatcagatgtgggcctaccctgagcagctcctgtgtggagttggggaatccagcaggagggcattgatgaggaggattcatgagatatgttggaagctgagtttaacaaa

SEQ ID NO: 24095 - DNA, 1745 bp, Mus musculus
cgatcaattttcccccttgaattaatagattgattttttttcaaccaaagtcaaggtatatcaaattgatgaaaatttattaacaacatcgattaaatattctacctgaaaatctggtaatacctcacacccaccacttagcctccagaccggcagtgtgcagactgtccggtcgccgccaggatgccttttgttaggaatgcagagtagcttatgcaggtgatgctttgcagatgccgcaaaaatgcttacaactgctgtttgtcttattttattttttgtcttgcagagttgtcttggttcaactggtgccttcctgggtcgtgtctgctcagtctccttctgattctgtgcttcagggaatcctatgacagactctaccttgacgtggtcgtctcggtttaagaagacagacttgtaggactttaaagggaccgtactttagtagtgcacctttgcttgggtgcacatgcaatgggagaaaaggcgaagaaagagatttctttcagaggttctgttaagttacagagtctcacattaatttaatgactactaggtaataatagtgcaggacgtgagtgtcgtgaggatgtgaaaactctgtggacagcacagctgtgttggcggcactcttgtgtggagctgtgacagctcacacaggacgcactgcccgagttggtcacccccatgtgcactgtacccgtgctgacccactgatgagctgaactacggcaagaagcatgggtggtcctatgaagatgacccctcccaggcacacagcagagggatgggactcacgccgctaacttctgaagacatcagaaccctgcgtcagactttaattacaaaatagcagagctgtataccagtgatagaagttagtcctgtgtacactacatgtttttctaataaagccatttcttatatgactccttacttttaaccaggttggaagcctttcactgtccttgggaacaggccctggctccttcccacccacccttgtttctgtgagtatggcgtcagtcacgccagcaaggtaacgaaatgcctgatagggttgcattaactgttgtgtgaaaagcgtaactctgttatgatttagcactttgttaaaaatgaactgagaaccacatgaagcatgtgtgtcttcagacgtgtgtggcacacgtgtaaagtccagcacccactgtaacttaccaggttagattgtagtcagatgagcccccacttgaaaagaacagtgtataactttgaaggtttgaagatctgtgcgtgatttctgaattgcacctgtgtattttaacttagattgtaatatactcagttctaaatgaagtcattgtatttgattggacagatttttgccaatacctatttctttctataaataatggatttttaaaaaaaacaaaaacaaaaacatactcattgcatggctcctggacccgtctttcaggaggtcataaactgactgtggcgggcctgtgacactgaccactggtgttccgtagctcctcttagacagaaccttccctaagcttccagagccgcagcaactccattgccagccagttctccttacagcccagtctcgtgcaggcatcagcagctcctggtagcccgggtggacaggctgcgcagtactgacttctgctcacccgtgtgtaccattgcacacctgcagacgcacctctcaccagaaattcacgatgtaccaacttacccgggtcttgaaggagggt

SEQ ID NO: 24096 - DNA, 1099 bp, Mus musculus
gctttgaggtttcaaaagcccgtgccattctcagcgctctccactgcctgcttgtggaccaaaatgtaagttttcagctattgctacaacttcatgcttgcctgactattgctatgctccctgccatgatggatcatggatgctaactgtcttagagttatcatttctatgaagagacaccacgaccaaggtaactgtaataaaaggaaacatttatttggggctggcttacagtttcaaaggtttagaccattatcatcatggtaggaagtatggcagcctttaggcaggcatggtgctggaggagctgaaagttctacagcttgatcccgaagagagtcaggaggagactctcttccacactgggcagaactttgaaccctagaagatttcaaagcccgcctacacagtgacatacttccttcaacaaggccgtatcaggtaaactcttgcttcataagttgccttggtaatggcatccttacaaaactaagaccgaagttggtactaggggaagggtatttctgtgacagacctgaccacactagttttgggggaatgtagaagactttgggactttgtgtgtgtaatcgtggcattaggaaagtaataagacatttcatttaccactgtgtgtccagtagcacataacagtatcaggcatgtaataagtatgctgagtgaatgaataaggggtcccagccaggtaaggtattgcatacctgtaccccataacataagagagtggatgaggaactcaaggtcgtttttggccacatagcaagtttgaggccagcctagacataaaccttctctcaaagaaaatgaagaaggggccagtgagatagtgggtaaagtgcttaccctgcatggctggcaacctgagtttgaacacccacccatgccagaacacacgcacagtgggttggcctaaggctgcctctattctcatactaagtgctggctaaatggagtcagcacatagacccagatgcctgcagccaatagctggggagaagagaggtaggcgggacttaggtttcctaggctagagaccgcgaggaggagcaggaagggaggaagataccatgggttagct

SEQ ID NO: 24097 - DNA, 1100 bp, Mus musculus
catctgaatagatggcatttaggtatgacaatggtatgttacagaacatatcaaacatacagctgagtaaaggggtatttattttgtagcatttacatcccatcaaatccattcttttaaaatgcgtaaagcagtggtttttagaatgttcccaaagctgtccagccatttgtcactgtcattgcaaaacattctcaccattcccaaaagtactctgataccattgccagttactcactgtctcccttttgctctagctctggggaacctgtcatcctcatctctgtagatctgcctattctagacattgcctttaaatggagtcatacagtatgtgtggtatctaatgtcgctcccttaacaggtttaaggtgtcatacacgctggtgcatgcatgcatgtcgacctaccacattttgtttatccactcatcaactagtagatattgggattatttctacttctaacattgaccaacagtacacctatgagcatttgtgtatgtgtgcatgtttgtatgtatgtaaatatgcttttagttttcatagatgtatatatctaaaagtagaattgctttgagaaaaatcattggttcttaatttaaagttagaagtgggagaaaaaaaaatggcaatgtgaacctgcttcacagagtaacgtagcctgtacacacagttctgtagatagccttcaatttcatattaaagaacatttaaattctctctttagaccttttaaactgtcaccttctccagaaccattaattgaggatggcacacacttattataaagaaagcaaaatccttctgtaagagacagctttgtcttcaattagacaaggcgagagagaacaaaaggtttttgttttttttttttttttttttacaaatgcacatattacaagggtgcaaggagaaaagcaaaggcattttgtatgaagatggatgcagtgggagccctagaaagtttattcttttagaaaacttaccaccatttttgttatcaggaaacatgttatatacattataaacataagagtgtacagtgcatcagaagacaactttaccttaaaatcttaccccaaaaccgctttgaatgtt

SEQ ID NO: 24098 - DNA, 1133 bp, Mus musculus
aggattccctgtctctgtagctctgggctgggataccttatgtggcttctagggatctgaactctggtcctcacacttgtgtggcaagcacttaacctgctgcgccatctccctagtgtttatgtgccagttttttgggttggttggttggttggttttttgagacagggtttctctgtatagccctggctgtactggaactcactttgcagaccaggctggcctcgaactcagaaatcctcctgcctctgcctcctgagtgctgggattaaaggcgtgcaccaccacgcccggcttatgtgccagtttttgagacagcgacaaagggtctgtctgggtcagctggggaaaagttctaagttccattggaggaatctaaaaggcttgtgtctgaatcctctatttgccccaagcttggcagtgacgtggttacgttgtaactgcctcagcattaaaatgtggtgtttcttcagtagcaaaagatcactaaatccttgaaattcccaagatctttgttgttgtcccggctgacctggaacttcactggtggactggaatttacagagatctgcttgcttttggctcctgagtgctgggatgaaaggcgtacaccttcatacctagctacttactgaacattttactcaagcattatgttaccttttcaggagaactttcttagtttgtattgacatttcaaagtaatacagcattttgtttgcccaaggatgcagaggcctcctagtcattccaccttagccccctgagtgctgggattacaggcgagtgtctacagtgcacagtcctaactcgacattttgttaggtgtacttctagcaggacctggcttaaatgacactagcgttttgtcctgataactgttctaatggcttttaagtttcacacatgtgtaatagctgtcagatggaagaggcttctgtacatgtatgtagttcagaaaccccccccacccccaccccgtgccagggttttgttgttgtctccctgctttgttttgctctggggatttctatattgtaacttttatgacagcttgcttctgcacaagttttatttataaattttttcatttgtattttctaatgtgagagacagatttttaacttcaggaa

SEQ ID NO: 24099 - DNA, 1151 bp, Mus musculus
gaagtttgctgaagtaacacgaaggtgaatatcttgcactctttagcaaacctaaatcacagggatgggaagcaaaaagggtcattctccctccctctcactgccaccttcctccctctgcccctcctttggtccctccctcactctgtccctccctcctgtctcaagttttcagccgaggttgaaggcaggtcccacagtttccattctctggattgttctgtgtaaagtacgtcaggcttgcagtcaggcctgatggcttatttgccattggctagttcatttacatctgagtttccttagtatcctttgacagagaaaataaaatatctcccctgcatcttatgggcttcttagaagagcggacactgtacatgtgtggtattgtgttgatggtgtttagagtcacactctacatcttcccaacaacacaaaggactgcacatgacttacttctctttatggaggagacctctgtctgcctttgggccgcaccttccagcccacatctgtggttgaaatggcctttgatattgttagtgttgctccaactctgccgtctcgtctctgccttccttgttgacaccttttgttgttgagaacatcacgttcctcgcttggctttgtaatgacggagtcagttcaaccccactctcccgaatcggctcacgtttctatgtttttctgcatgtttttacttttagtatatgcaatatgtcatgtggttaatttggtaaatattttgggaacattaggtatccacacttttagctgctgtagtgtggatttagttaatttgtgtgtatttgtatgctattatatatatgcctatatattaagcatacgatttgttagagtgatttctatagtatgagttattgagttactgagatggatgtttctttgaggctttggcttcatctccccaattatttcccaaagcacagttctaatttacatgtatgagcatagagtatacgtttattgtttctttattgttgttgctgcttgagaacggtctcactgtgcaaccttggacagcctggaactcggagatccacccacacctgcctcctgagtggttgggccttcctttctgaatgctgagcactgatcccagggtctaccacatgcacggcaagcagttggcc

SEQ ID NO: 24100 - DNA, 1124 bp, Mus musculus
ttttgattgactacctaagtgttacgttccaaaattttcactattttaaattacaggagttagaaagtttttttaattaaaactttattattagcattaaaaattatttaccaaccttaaattttaatatgaaaaaaaaatcacttaaattatgttaataggtgtggcgcctcccacctgcaacccaagtatttacaaggctgaggcaggggatctccatgagttccaagccagcctgaagtacaccataaattccaggccaacttgaactgtatggcatgaggccctgtctccaaaaaaaaagcaagaattcaggcctttgaagccaaatatttatctaagatttgccagaacagcatcagccattctctcggcattctataggacataatgacacacttatctctccattgttgtctgatgctctgtgcttctctttccccaggtgaacctgtcaaaccttttacaccagagaaagcgaaagagattataatgtctttacagcagcctgcaatcttctgtaacatggttttcgattggccatcacgacactggactgcgaaacacctttcgaaggtcttggagggcaagcagatacggttcagaatgggcctgagaggcacaggcacaggtaattgccatggcaacccctcctccatagcatcccaacctgctcagcagtgctcaccccatcttgaggcagtcctttatgtctaatcctctttgaccacttactgtacagataggaaactttacaagaaagtgtggggaaatagtttgacctcatacaaggttttttttaccccttgttaaaacaatgggtttaaacaccttacccaaaatgcaaatctgctaactcacgtattcaaggcgttgctagacattgttacggctgattgagcatggtagacaatatatatgttaatgagctactgcttagtgcccctttccactgaggaacagcagtaccataatactgcagaactgcagtgtgacactcgctaagagtgccacgtggtggtcccttgtgattcatcaggagcacatgcctacatgtgtggccccaggctatttatgacacttagtcttgcttataatcttatcttttactttatgatctgctt

SEQ ID NO: 24101 - DNA, 1105 bp, Mus musculus
taaaaccgagccttcagctgctaccttcttacatgtttatctcaagttgagagctaacttgtatcttgctttgtttgtttgtttgttttgttttgtttttcattaggaaaagatggcatctctttcctcctgaagatacgcctttcctttatccaaccagaattccttacgaagagtctagtgtgttcagtaaaatcaatgttgtcaaccctgatttgaagtgtttcccccagttccagaaagctcgaagacatatggtcacgttgagcccaggacaggtaatggggctttaaacagggaggaactgtcagtgggcaccacagcccggttggtgcctgggcttcccttgtacagatggcaggagcggctcccaaggccctgctactggaggacttctccatctgctggcctgagagatggagaaagggagcgcagctcctcctgctggtcacgggagggaatggctgccgaggaaattcagagcaggtggagccattgttactactcgggttaagagacatgtcagggcgtgggtactagaacatattcacagttaacacctgttccaccagacggatgcacacaggctgcattgcatcctgtgctcagaagcatgtgcactgagggtgattttcagcaagaatgactgacatctgagtcccttctaaagagactgtgttctgcatatccaccccgtggagagattttctgttacaacactggggcttgctgtatcagtttcttggcatttgaaaagtttgtattccctccatcagctttatcctgtctgcccttccttgccccctccttgctggctctcatcctgttctctccacacacgtacacagatccaccgggccacattgcatcaatcttctaccaggcacttcccttcatgcatgcctcttcctccagcccctaacagctactaccttactctgtatcactgtagattttcctgttctgggcattacatgtactgcagccaaacagtgtggagctttttgtgtctgacttgtgatgcagaacatgttttcaaggctggacagttcttgattatgtaggtgtaccataatgatctactcctgagctgatttcgagagcc

SEQ ID NO: 24102 - DNA, 1153 bp, Mus musculus
cctacaccaccctcatgttgagggatctaatcctggcccatgtgacaactcccccaccctcctccgccaccacagaactagctgcccattctcctgttcgtcacatgattcgtcttttctccataaggatcattgttccatgtgtttattaattccttgaaaaaaaaaatctggacatacaaggagtgggaaagattagaaaaaaaattatccaaggtcatttgtacataaggcctgcgtcttaagttcggtgaactacactcataggtagcaggtgataataacacatgtgagttatggtgctcccaaaagcatgggtctgccttctgtgacagggttggaattcatgaggggcagagcatacagctaaaaggctcttaaatcatgaggtacagagacagagaagaaaatgtggtttggtttttttaattttttttcctcaggaagaggaccacctagcgcgggtggaggaggccatcacccgcatgctcgtgtgtacactgaagactgcagaggacccgcaccaccccaggacctggctgaaccccactgaggtaggacggtcggctcttggtgtggatggtgagtctgcccagttggtctccagcgcagtgctgaagggctctcctcttcctaggttgaggagacatctcacgaggtcaacagctgctacttgaacagtgctgtttgtgccttttttgatcattgtgaaaaagctaaagcagtagagttgcaagtgctgagcgcaaacggggcggagccacgtgtgcaggaggagcacatggaagtggagcaggcccagggcccgagcctcacatcgagggctgagaaacaggaggccgtgagcctgtttggcccagatctgatccctgtgacaccagcatccgaagagagaggaggcgcactggaaggcgacagcgaagaatctgtcagcagtaatggaggacactttgcagaactgccctgtgccaggagacagcaaaccagcaaaggggcgagcgcattgacggagcccttggccccgaggggtcctatggcgcattctcgagtcttcgtgtccacagatgacttgctggactgcctagttaatccacaagtaaccaggatggtggcccagcttttgatacaaggaaaaagctgtgatactttctag

SEQ ID NO: 24103 - DNA, 1193 bp, Mus musculus
gagttagagtcaggagatgacagggttttggttgagtttgaaaaggagagtctaaacatagcaggaaaatcagaagacgtccaaggcatgagccagaaaatcagggaattaatagagagcaccactgaaaagctcagaagggaagagcagagtctgaaggagaaagtggccatttccccgggaaagcattatcttttgcaccacagtggcttcctgaaggatctaagcaaggggttcccagagatggagatctcttacgacgccacggctcagttcctgtacttgaagggcttccgtgcagatgtgtacaaagtaaagtgtgacatccaagagaaggtgttctccatggctcaaaaggatgtccaggtctcttctgaagtcttcgaatttctgcagcaagtagacagtcagagactctctaagtctctgtttgaggcacagaacattctcgccatatatgagctgaaaggtacagctcttttcttagttggaagttctttcaaagatctggcagaagccgagacaaaaatgctcagtgctttaagtcataagcagattgaagttgaggacaaggaggttctgataagtaatgggtggaagaagaaagttcaccctctgcaaaagagacacagctcttgtgcaaccattatagtccagaatgaattgacttcagaaaccccggcaaaggtcattgttacaggctgtgtgaaagaagtgaatgaaatccataggcaactttttgagtatttggaaaacaacatgaaagttgaaagagcacttaaaatcaaaccatccttgattgttgactatttaaggacagacaagaggctattgtcaaagataaagaaggcacatgtgtatgtgcattttaagcctaaagacaatccaaacagcattttgctaactggctgcaagagcaaagttctagagtgcatgaatctagtcaaggaaatccaggattcagtctgtgtccaaagattccagactgacaaagctggcgtcaggcacttcttcaaagataaagaatcgtattacaaaacggagattggtcgtcagttcggatgcgtcattgaattggaggaggatagagaggagaagggtgaagaggaggatggtgaagaggaggagggtgaagaggagggagaaagcagcattaatgagcagaagtgtcacctacagagggacatagcccc

SEQ ID NO: 24104 - DNA, 1228 bp, Mus musculus
ggtctaaggggccatggccgtggtcgaggggggagggttgtggaggtaaagctgaagataaggagtggatccctgtcaccaagctgggccaccaggttaaggacatgaagatcaagtccttggaggagatctatctattctccctgctcattaaggaatccgagattgttgacattctcctgggcggatcctttaaggacaaggttctaaagatccttccggtacagaagcagacttgggctggccagcagaacaggttcaaggcattagtcgctgttgggggctacaataatcacaatggccttggtgttacgagctccaaggagattgtcactgccatccaaggggccatcatcttggccaaactttccatcgtctctggctactgggggaacaagattggcaagccccacactgttccatgcaaagtgacaggctgctgtggctctgtgggtatgtgttctcatctctgcccccagaggcactggcatcatctctgcttctgtgcccaagaagctactgatgatggccggtatagatgacagccacacaatagccaggggctgcactgccaccctgggcaactttgccaaggacacctttgatgccacctccaagacttacagctacctgacccccgacctctggaaagagactgttcaccaagtctccttctcaggaattcaccgaccatctgtgaaaacccacaccagcctgttcagaagacccaggctctgctgtggctaccacacaagggtttttatacaagaaaaataaagcgaattgaaagaacccaggactacagacagccatgccatcaagtgaaatcaggtttagctggtggaatacagccaatgaaactgatagagctttatcccgtcccgagggattcagttattcgtgggtgcgaggggggccgcaaacctggaaggagatgggaggaagaaaaagaggaataggagaccaggaagggcacctatcgaggtctcgtttattaggctgaggtgccttctttttaaagcatacatcgcggggaatatgggagggtcgagggggaattatacaaagaaaaaagaagtgggcaactgctgacatgggggccgaagtcaggcgccaggcagcgggcactctgcatcttatctctagaacatagatcctccttgacagccttgggtggcaggctgggctcaggtgtaactcatgtccttggatggcatgggagttcagg

SEQ ID NO: 24105 - DNA, 1143 bp, Mus musculus
gtcttttctagagtggctggcactctttcatggaaggcaaactctacaggcacaggttggggggaatggccctgtctacaaagcatgaagaaatgagctcagatctgaaattatccatggaaaagcctggtgtgttggcatgcacttgtaatcttagcactggtgagtagagacaggaggattcctggagcttactggccaactagcctagttaaaaccatgagctctggattcactgagagaccttatctcaagaaataaggtggatcgggacatgggggtgcatgcctttaatgtcagaacttggaaggcagaagcgggcaatctctgagttccagacctcacctggtctacagtgtccaagtcccaggacagccagctatacatagtgagaccttgtctcaaaacaaatattaggaagacagaaacaaatatatctaacatcatcctctgttctgcatacacacctacacacacacacacactggggagcggggagatagaaaagaaaactttatagttttataggatttcaatttttgctgaagaaatctgacgtcattcttgtgttacggttggggtgttgggtgagtctgtaatcatcttctatgtccttacataatggaaccttccctgatttttgtttgctttgtttatttgagacagggtctcactgcatagctctggaactcaatttgtggaccagcttggtcttgaacttagatctgcctatatcagcctcctgagtgctggcattgcctggttttttgtttgtttgtttgtttgtttgtttgtttgggggttttggttttagcttttttggtttgggttgatttggtttggtttagttcggcttgatttgattttgatgttggaatttaaaccctaggccagtgagttccatcccataattctttttcatgtccatctctgtagcaatacattagttgtttattttttaatctcttcctgaacccttgtgtaagtgggaaagtgaaacccttgtataaatgggaactttaaaaacaggtttggcagccggacgtggtggcgcacccctttaatcccagcacttgggaggcagaggcaggtggatttctgagttcgaggccagcctggtctacagagtgagttccaggacag

SEQ ID NO: 24106 - DNA, 1202 bp, Mus musculus
acaccacgcaggggtagaggagtctgaccccaaccctattttccagcaggtttataaaggtaaaaaccagaacctagggggaggatgggagaggaaacaggggaagtctaggggcggatatttacttcaaggcacctgggacattgaaacattttgtggttgtttttcccaagagttccagggaattaggccatctggccgggggcgggggcccatgttctcagggcagtcattattttatttttttactcttcatttccccacttcttcttgtgagtagctctaatcttagagcgacccctcttcttctttcggcaaagtcaggtactgttgtcggagcaccattacctgtacaacactaaccctgtcttttacaaaagccactaacttattaagaatgcaaggtccaaaagtgagcaaaagcaaaaggatgattaggggaccggcaagggtagaaacaagggtggtaaaccaaggagacttattaaaccaattttcaaaccagctctgtctatcttctctttcccttctgcgcttgtctaaccggctcttcctatcattgtgaagcagaattcaccaagcgttggattgttcacccactaatagggaacgtgagctgggtttagaccgtcgtgagacaggttagttttaccctactgatgatgtgttgttgccatgataatcctgctcagtacgagaggaacagcaccttttctggggtctgatgagcgtcggcatcgggcgccttaacccagcgttcggttcatcccgcagcgccagttctcagggcagtcattattttacttttttactcttcgaatcaatacatctataaatgtaagacaggaggagaaaaaggaccacatgggctaactgctcccaccagattggcctgaaggctcgtcggtggggtgttttcctgactcacgataaatgtgagactcactgtgggcggtgccacctctgggctgtataggataacaagctgagagtaagccagggaccaaattcctccatgatctgcttcaattactgcctccaggttcctgccttgaattccagtcctggcttccctcaaagatgcactgtaagctgaaatgcctgcccccaagttgttttggttagttttatcatagcaaccgaaagcaaactagaacaactttctcgatccctcagtccttctctccctttcttctcacttt

SEQ ID NO: 24107 - DNA, 4030 bp, Mus musculus
aacatgaacatgggagtagtgggtgacacagagacaacagtagtgagactttgcttccttgggccagaaactgcttgcaatgtgcatttaatttaagatgttaatttataatattgggctttggatgtaatggcaataatcatttctgatgcgtatgtatagagtctttacatcaataaagtagaattaagaatgtagttactgaggttttcaagaaagattctttatccttcattttaggtctggataaaattgagttcttacagagtcatgaaaaccaggagatctatcaaaaggcttttgatcttattgagcattactttgggaccgaagatgaggacagcagcatcgcaccccaggttgatcttagccagcagcagtacatcttccagcagtgtgaagctcctatggaaggtttccagctttgaagcaatcctctccttcttgttcctgtgtcagaccaggctatccagtcaagtcctcttgtggagcccacagtcctcatggagctaatctctcaaatgttttccataatactgtttgcgctcatttgcttgccttgcgcacctgctctcttacacacatctggaaaacctctggctctctgtggtggaatacccttttattacaagggtaaccagaacggcccactctcttatggaaaaatccctaagctttggagatccgcacttacattagagtcatgggaatatatacacatactaatgtggctcccttttttgtgggggaaaaaagaggactcttcctcattccgtaaagtggggaaaatgacattgaaagataaaactaaaacctttatcttgaattttacacaactacaagggagatatttagacttgtgtatacatcagagtactcttctcgagttcttccacagtgaatcaacccttggagtacctggtggctttttctagccacatttgcattaatccttattgagatgggatggttttctttcctctaatggagtcattttcttcagatattaaagttaaaccatccaatccctcaccttcagccttcagtgaatgtgcttctagttgtcaggaatgctgaagaattaacactttgacttttaaatgtgatcctggcttggcagatttccttaaagcaggaaggagagaagcatatattagtttgtatggcttttgcttctctttgtttttgtttcttaggatttggaagtggttcagttttaacgctggtatgaaggctaaaagtccttaagtaaaaccatgttcaaaaatccaattaaagactaagaacataaaacccatcactttgtttaaaccggtgtgacgagaggctgtgtttctgcattacaaatgatcctcaggctttgtggtcctgaccaagggcctggtaaattggagtcaccctaggtgcttttcctcttcgtgactggcagataacacatatttaaatgttacttagggatttttttttcctttgttgagtgcagctcgattctaatgtaatcatgctgcatacatgcttttgctgtgcagcatccttatctttaaaagcatactagtctcctcagtgtgacctctagactaaaagggcagtgatccaataacctcagtatcccctgtttttatttcatctcctactagtaccctacctcccctaggaagaacatgcccacctcctgcttatttaatgatgactgtaatgtacctgcaaatggcgcttccagtactgtgttcactgacatttgtgcttggactagaaggggaaagaaacaagaaaaaaaggataattgccaagagaactgcaaatgagttcaatgtgacttctcggtgctagttggccatcttggctcaatgttgggacacactatcagagagaggagtctttttttttttccccaatgatattctgttcaaaatgaattctgaaggaaaagttgctcatgtctgtttcagagcatacccttttaaatctttttagactactcttctagaattcatcataaccccaaaatagataaaagctatctagaagttgccctgacaagctattgcacatctctggtaaatcctgctgaatgtaaggaatattcagagctctcatacctcatcatgatgttatttaagcagccaatttacacgacctgatttactttgaaaaatttgtttcattcaaactagaaagttccagagacaaaggacatttctcagccaagagtgtgatgcattcttgccctagtctttacttgtgtctgctctgggatggatgctgtctgatgtctgttaccaatggagcagataccacaaaactagtcaactcccgtctgtcctgttgttttctagtgctgctttgtgctgagagaacatgttagtttactgaacttgacctgtacaagactgattctttgtaattttagggttaaattaggtggttaatttaaagatgaactttcaatgttgcctttacatcacattacagtatcacttctttgagaaggtaatagaagcactgattcatagtaaaaatcttgtttttagctttgacttttcttgtggctgatttctttttaaattgtaaattactggtaacatgttatttctatagaatgttttaaattatgtaccttctattggatagttaaaacctttgcatcttataaaggagtttgaatgaaaagaaatagaaagcacacagagttgtcacctcaccttaccaagagcatacagctggaacttttgtagcaatatcagggtggcccaatgagttcaggtccattaatcagtgtgagctcttttatcttaagcctgaccagaagttcatgaactttaaatattctgaactttgtttttatagtaaaatgattgtttcagtgtaaacatggcattcagctaaaccctggcaagttcagatgttctggaactgagtacttacaaagaagacttttgtttcttaacgcaagtggaatcttaggggttacttgtaaatcctatttttagtctttcacctggcaaagtctattaatttaatcttttgaagatttttatcagaaaggtgttacttattacagaagcatgttagtatttataacataaaacctcttaaggattttagatagtgatcagggcaaagtggctttgttgttttccttctctgtctccttccagactttccaagtatgtattttatactgagaactttgatttttaaagaagcattcagagactttgagatgtaaaggtacctggtacctgaagcaccaaaaggtaaagagccgggtggagaaacaccccagaacattcagatgccaggtacagaacacagttaggagacttggctgtgggacacgggttcttgccaccagtcaaagccatctttagattgccctcgttagccccctgctggaaactctgctgcaccagggttgtttcttccacacaccagactaagctgttggactccgggtgtttctcagccttactgtcctataataaatctgaattattccagttgctgctgactatgcctaagaaaacatatgtaagtataatttgtcaaccaaattctgttgtacatgactacctaccggcaactttgattgatttctgtagtgctaaataaacatttcagctgtctgaccccaaacgtggggctgtattgtaaaacaggttttccttgggttatgggatttattttatgtctgattaaatttgggggaaattttcatatcagtaagcaagccattttagctgtttttaggggctggaactttttatttaagttggaaagtgtgttgagtaatgtgccataagaaaaaggagtcagtttttgagcggggattgtttcttttcagggtgcatacataccttccaaattagaaagtttgctcacttgcagtttcattttgaaatcctaaattagtagagccatttttttttgtttgaggtagacaaattaactatctgtctgcagagttggaagtatttagactcctatcattcaaaattagttaaatataatatttgcctgtatataaatg

SEQ ID NO: 24108 - DNA, 1099 bp, Mus musculus
cctgctgagccatctcaccagcccccaaaatttttattttattttatttatttattttttttggtttttccagacagggtttctctgtgtcgccctggctgtcctggaactcactttgtagaccaggctggcctcgaactcagagatccacctgcctctgcctcccgagtgctgggattaaaggcgtgcgccaccacgcccggctcgcgatttcttatcatttgatccgtgtagcagttggcaggaactttccactcacaatgctcgtggttcacctgactggaagctatgcaaacagcttcgtctctgggacatttatggaaaactggtgcttgttcatcatggtgcagaggtgggagctgggtaaacacacacatctagaaggaaaagctagggaaagtgttcattctggcctgacaagctccgggctgctgctgggatggagtgcaggaaagaaaggccgagggaggctccagaccctcacacttgcctaactgtggctctgtgtaagtggggattcagagctgaggggaatgggagctgccagcctggagctaagagggcttcatcttctcagagctgacagcaaaggctcccagagttattagtggaaactttgtctaattatcaggtgaccacgaaactacaaagagatgtctgtggccaaccaaatacataaagaatacaagataatactaaaagtaattatatgcccgaaattacataaagtagatgaaaaggacacacctggaaaaaaataccgaaactctgcccccaaacacttaaggaggattggaagtggtcctttacaacgctcaaggaagaggaagggctgagatgtagctccatatgaagtgtttgcctagtgtgactaaggatgtgggcaaaggaaagaaaagacaggaactttcaagcgagccttacataggtcttattcgagatgtgatggcatacacgcacagacagacccaatacttggaggctgaggcagagggttgagagtttgaggccagcctgagctgcgtagtgagattcccattttaaaacgcttcctgattcctttaatgagggtgtattatctggtataatccagcaaata

SEQ ID NO: 24109 - DNA, 1200 bp, Mus musculus
ctaagggtctgcgtttctccttcttcccttgcagccctggcccgccaccgctacatgaagcaggttcaggccctaggtcctcagatgatggaaaaacccctgtactggggggcggacaggagctcccaagtttcatcttatgcaatgaacccgctgctgcagcgaggtaaactttgccagaaagtcatgggacggggagggcagagggtgagggcagaggtgccgtctgccaagaagcatgcgcactaaccgggtgtctttcgatggagggtgggagggagtgcaatcctgcttactaacgtgacattttgatgccctggttcctaggagggtatttgggaccagcagttcagtgtgctccatccttgtttccattcagatctgtccttacagtccagccttccacagatgccaatgacccagatggctgctcaccctccggtggctaatggtgtcctggaatatttggagaaagaattgcggaacctcaacccagcccaacctctgcctgcggatctcagagccaaatctggccacccttgcagcatgctctcctccctgggctccgcagaggttgtggaacgcagagtcatccacctgcccccactaatcagagacccaccgtcctccaggaccagcaacccctcacaccagcagcggctcaatgctgtttcttccagacactgcgatctgagtgagcgcccgaggcagcgccatcactccgatttcctccgagagctccaggaccaggggatgagaccctgggccccggggagaggggagctggacccccattggagtgggagacaccaccgctctaggcccagcgagtcatccatgccttggtcagactgggacagcctgagcgaatgtccctcatccagtgaggctccttggccccccagacgaccagagcccagggaaggcgcccagagacgtgagagacgcaggcatcgcagctactcgcctcctctaccctcgggccccagctcttggagctctgaagaggagaaagagtcgctgcccaggaactggggtgcccagcgacgtcaccatcaccgccgccgccgctcacagtctccaaactggcctgaggagaagccgcccagctaccgctcactggatgtgactccaggcaagaacaacaggaaaaaagggaatgtggagaggcgcttggtgagcctggggcatcctgtggag

SEQ ID NO: 24110 - DNA, 1153 bp, Mus musculus
atagaattatatttgtggatacataaagattaaagatgttaaccaagatttcctgagtaaatatggcacgggtaactgtgatcctttagatatgacaaaactgtcaatctctacatcagttatattgaaaaatgtgggtcactttctgatgactaacctagccacattcttaaaggttacagaacaaaccatagcaaaaataaatttaaaaagtagttaatactgattataaagtagacccattcagaggtaactttattttcattcatcattacttaaagctaaatttaactcactaaaatgaaactgacatattacagaagtaacctttaaaaactgaaaccacacttttaataattgcagctgcatttctgttacaaaaacatctaaaaataacttcaaaattgtcacacaatcactctatgttatttagtagatatcctataaaaactttcttctagacaaatttaaagacaagtatttttacttttgggcatgagtattatcagcaaagaaagtatcaagttttcaaacattcatcaagtagattgtgagtgtgtgtgcacgtgtgtgtgtgtgtgtgtgtgtgtgtgtacacatgcatacatatacatacatagagagagggggtggaaaaatgtgtgagttttatttatgtgtatattgttttacatatatagttatatgaaaatattccaaaattgtgcgtgtgtgtgtatgtgcatatatggaaagagagagttacagacttgagtttgtaactggctttagcaacttgacaagttatcaaaattcttagcctcaaatttcaaatctagaaaatagagataatgcctgtgtttcgtagcacaggccagtaatctcacctactcaggaaacaaaggcaggaagaacatatgtttaaacccagcctggattacagaatgagatcaaagctgctactgctggacaatttagtagagaccctgtctcaaagagtataaggaggactggatatagttcaatggtagaacatttacctagcatgaacaaaccttagggtgacttcccagcactgtaaaaattaaatgaatgaattactaaagttcatgtacctcacaaggttgagataatacatttaggataatttaaaaggttttagtatatggcactt

SEQ ID NO: 24111 - DNA, 1222 bp, Mus musculus
cagctggacacagctcaggaggtgccgtgcctttgcaagcacacccagttctttagtcagagcaagtctttgaaaaccataccaacaaagaagctttgtatttccatttgtacagtatcttgaatgccgtagtgagctctagttactctgttccgggcatgaggttctggggctgtcttggagcatgtgtctgacactgaaagaagtaccaggggtcaacagaatctaacttcacttgtaagcttgattttctgatcttctcagaattaaaacaaaaacagctctagaatatttaagccatttttagtatccatgaaaatttctaattaaacgtacgtatgagttgattctgagtctgagagcagacgttctctcgtgtctgaaagttgctgctgggcttcttgctctcccaacatcctcgcccttgccattcagagctgaggtttaggaagctgctctctgtccgtgctgagtgcctgtcgttgcagagtaggctgtaagagtcgtctgtgaaatgctctggagagtaacttgtgtagtttctctggtgtgtgtcttcagttgagttccatgcagcaggtggtccgagagaaagacgcccgctttgaaacacaggttcgtctccatgaagatgagctccttcagttagtaacccagtcagatgtggaaacagagatgcaacaggtgtgttgctcaagctccctagaatgactgtcatgttggttaacatttaatcaagccttcacagccactgcccttcccacggccctccctccacacagccgccatgcagtccttggctttttatccgtgccctatcttttgttgcctgtcattttggggtcctgagcttacattctctttttccttatccggtcggagcttggcactttaaagctgagcttgcgtgggaatctgtgtggggtgagcagtgggctggcttctctttcatttgctcatttacacctaccgttcatgctctaagtctgatcgaaaacttcaaattgatgaagtcagttttgtagtttaaatagagataaaaatgagtttgaagcaacttattttaagttcattgagcaaagtgttttaagatcattgagtagacactgaaaattgacttcatcattttggagtttaccatgtactaactcacatcgtttgtacttaaaagtagaactgtgtagtaatgagaggtgctttagtggcactttgtgtgatctgt

SEQ ID NO: 24112 - DNA, 1197 bp, Mus musculus
gacctcagagcagggctgattgaattatggacattcagtttaggagatacagagttttacagatttttaacagttttttggcataaaagaagtttgaaccagagggttccaagttttaggaaattcataaaatgttcatttgtgttgggctatttgtaatgctctatgagccattcaattaaggcctttcttggtgttttgtggttatttgttttccttattttgtaataggtcagcacggctggtactactctgctcaacaggagtgactcttctcctgaagaaaatgggcaggctgttctagagaacacattttctcagaaacataaagagctatcagttttattagtggaaatgaaagaagcccaggaggaaattgcatttctcaagtcacagctgcagggcaagaggcccgagggggactatgaggtcctcgaccgtagagaagtgcagctgatggagagtgaaggaccgccctcagttacagcaggagatgtcctctgtgcacccagtgatgagagcagcggcccagcagctgaagaggaacaggcaggcatgaaagatcggcatcgagcatctgaggcaggacctctaaatgatgctggaatggaactgagctccccgaagctggatggcgtggacaaatccctcgcagtgtcccatgtctgtcagtgtcaccagggcgaactggaaaggctgaaaactcaagttttggagcttgagacaagccttcatacagcagaggaaacttacaagagaaacttaagtgagaaagtgaaggaaattagcagcctaacccagcttagcgaagaggtcaaagagagcgccgaggaagcccgcagcacgctcgccgcagtgacggaagaaagagaccagctgctttaccaggtgaaggagcttgatgtcttagcagaactgcgggctcgggtccaagaactggaaagcagccttgcagaagcagaaaagcaaagaggtctggactatgaaagccagagggctcagcacaacctgctcacggagcagatccatagcctaagcatagaagccaaatctaaagatgtgaaaatcgaggctttacagagagagctggatggtgtgcagctgcagttttgtgaacagggaacccagatgaaaacccttcagagccagctagaggcaaaggagagggaagtgcgagaggggacagagcgtctgagg

SEQ ID NO: 24113 - DNA, 1161 bp, Mus musculus
cagaagatcataagcctgctttctggcaaagaagaggcgatccaactagctgttgaggaactgcaccagcaacacagtaaagagatcaaagaactagaaaacctgttgtcccaggaggaagaggagaatgtggccttagaagaggaaaacaaaagggcccttgagaaaaccaatcagctcacagaagcattggaagccatcaagaaggagagctttgagcagaaggctcagttggactcctttgtgaagtctatgtcctctctccaggatgaccgggaccgcatcgtaagtgactatcggcagctggaagagcgacatctctctgcaatcttggaaaaagaccagctcatccaagatgctgctgctgagaataataaactgaaggaggagatgcgagggttgcgaagtcacatggatgatctcaattctgagaatgccaagctggatgcggagctggtccagtataggcgggacctgaacgaggtgatagccataaaggactctcagcaaaagcagctccttgatgctcagctacagcagaataaagagctgagaaatgagtgtacaaagctagaggaaaggctgaaagggttagaagcagagaagcaaagcctacaaatgtcctccgatgccctccagaaggagaaacaaggtttgtctaaagagatcaaaaacttacagacacagttgaccgccctgcaggaagaaggaacgctaggtgtctaccatgcccaactgaaagcaaaagaagaagagctccagaggctaaatatggctctctcctcctcccagaagagaactgcagatctggaagaggagttagtttgtgtacagaaggaagctaccaggaaggtaagtgaaattgaagatcagctgaagaaagagctgaagcacctccatcacgacgcagggataatgcgaaacgagacagaaacagccgaagagagggtggcagagctggcgagagacctggttgagatggaacagaagttgcttacggtaaccaaagagaataaggatcttatggcgcagattcaggcctttggaaggtcaatgagctccttgcaggacagcagagatcatgccactgaggagcttggtgacctgaaaaagaagtatgatgccagtctcaaggagctggcccagctgaaagagtggcag

SEQ ID NO: 24114 - DNA, 1727 bp, Mus musculus
ctgtcgaagggtaagaggaggacacgggatgggctcgggaatgggcttccggtgtggaggtgggtaatggggtaggtttccagccgttgtggagacttgtctcccaggattgctggtgaaggggaagagctctgattttcctgtgttttatttgtttgtgcgtttcagacccggagtggtgccggatggaagcgggtcctgcgttcactctgccattctcgaacccgagtgccactgctcgcagccatctacttcctaatgattcacgttttactggttctgtgtttcacgggtcacctataaacttgttacttgactgcaactctggaacttgtaattccttcatctctagtgtcaggattgtcgattccacagcagccttctcactttagcccctccacctcttcttggaaagtgcctgtgaaaacagaggtggctgtgaggacaggcagagccttaaagcctgccacatccgctctccttaaacacttgtgcttggtctgagcagcttcccagatgtgctgtgctcactgctcttcagatgttgcagatccacatcctgtgtggtcttgtaggatgctgagggaggcctcccagccaggccaacaagatggttccaataaacacagtaatttggaatccagtatcacttttcttggtaaccggctttgtcttgtggcctgtattttctcctgcctcaggatgaatacaaagttgtgggcgtgtgagcagtctttggagactcaggtgggagctggaaggctcccagacttcagttgttggatctcggggaggaaggcattttcttcctgcctgttgcattgccagcggagggacggtttgttgctgtggatcgtcaggactggaccccattgcttatgccttcagtcacatgtagactaagatagtaagtggccagtgcctttccttgcatcaaaaggcaggaagaactgacaatggacagacagcaaggttcgaattctatatttctggatgtgcctccataggggtcctaagactatccagaggccagtggggccatgccaaggtgaactggagtcagggctgaataccacatcacaactagtctcaagaactactgagctgctgcaccagtgtgctggtccttggttattctgtctccaacgccattgtcacccaccactgggcacagggctgaggcggtggaaagaaaaggcaaagcacctggatccagacctgagagcagtggccaggaatggatggatcccaccgtgtcgatcctcccctttacggacatgatgtgctcccttcctgttctcaccccctaaagaagagtgaactgctggactcactcatcagccctttgttctgtggtgatgaaaattttagtcacaacatcccaaaaccttaactactgtaaaataataaaattattttcagaataaggaattgtgtgagactatctgttggcacagaagttacatgcctgtgtttgcacactatgggagggatggaggagtggcaactggaggagaaagttctgagactccttcatctcactggccagcaccacatggctgtgaacatccttctagcctcagctgctggagccaaaggagatgaggttcagattagaaaatccatcctgagattgggttaaaggagcagaaccataggatgtaaatttgtgaagccttgtggatagttctgagaaaactctgaaagtattggaccaccaagtatgg

SEQ ID NO: 24115 - DNA, 1166 bp, Mus musculus
cctgaggatgctcctccttacaaactgctgccaaacaacaaaatacatcaacaaaacagcatttgttttgtcttattattcctccacaccttattggcctttattaaaaataactataagacacctaacagctttggcagggctcactcctttcctatgtaaccttcaaatacatcaaaattaaaacatcaagaccaaatagaaattatattcctttttcctattagtctttaacaccttcagttatagaactgaaaataatctaaaagccaaagcagcagtatggtttctggtaacattcggattgcctatccagagtccaaaaccatagctatgataacaattatgcactcgtagcaacttttagcatctcctgtctccactcagtaagtcagacttctggttaatagtgccttatggacatggcttagcattgaagagatatgtgtttttggttgtaggtgaaagtatcctagtttgtaagaactctgagaaatccaagggcattgctctgcttcaaggatctctggagcctgtgcacagctgtctgcagagacagggagaagtcactgctagcatgatacgagctattctggaggtaggagttcaggaaatcatagtttactcttttatatttatcaaaaattgagcatgtcaaaaatatgaggtgagttttctttaagaacgagataattatattttatagctttctcaagtatgagtctgtttcttacatatatttaaacatacatacatacatacatagatacatagttctttaggctctgctattgggttctgttatataagttgataaatacattctaatacatgtacatatacatgtacacacatatgtatatgtacatatatatatatacatacacaaatatatatatgcatatacatacatgcctatgtactatgtatatgaatatctggttatttttagagttgaatatagcaactagcatattaatctatttaaacatgattaaacaaccaaatgacatgtggctctcttcaccttttttttggtagtgcagagaattgaactcagccttgtatgctgtgcgtgtattcctctattgagctataactgtggctcatctttactttttatacattctttattgcattttgagaaaagatgacaaaatgaaccc

SEQ ID NO: 24116 - DNA, 1955 bp, Mus musculus
ctgcccattgcagagaaactcccatcaggtgcttaagggccttcccgcccgtgtaagaaagcacctggtaatctagcacagaagcatagtaggagagcaaatttgatttttttttttaatgtaagaaacttcccagaaaggtaggtaggttataagtattcagttccctcttactattaaagtattaatatttttctctatttctttatctaattttttcctttcctttttaagacatagttttctcactctgagtaaaatgttcctgtctacgttcagaaccccactagggataagtgttccctagtattgcagctgcactgtggtcaggcgtctgagacaattgcttataatcctgccaaccaaagcagcttaccaagaagcaggtcactgcttaggggaatggagtacccaagcacttcatcttcctcaaaactgagtgtgggccagtctgtaaatggagtgagagagtacaggagaggggggcctgaaccttaggttcctgtgtaagctagaaccctcgtctgtagagcccataaggccggtagattgtttccttctcatagaccttttgggttgtactttagataaacaaagcaggttaggtctacccgcatggagaaattcaaggagcacatgcatgaagggaaggagtctgcatccaggttgacgaatggagagtactgggaactgtgccttagagctgcctcagtgtgatttggaaatctcagatggaaagctgagactggccccacttcccccacttgttctacagacctgtgccagcgctctgaattgaggagcctttccagtactgagcagtgtagaagtgctgattcccccactttcctcactcttccagaggtcatcaaaacctttatttgtctctcctttgagcctcatcagatatcgtacttcagtgcctctactgtgttgttgagcattgtaacctcaaggaacatagtcattagcatggtgttattcctgaaggcagaacttaaaaaataaaggactttcatataaggtctacagcaatgaaacttttatagtattttcccttgcattgtgacttttagttgtcattttgtagtatatgtgtgaagctaagaacgttttagagaatctgagccttgtataaagtgatgacatggttacctggttgttggatgactgaatattgacagtcgacttactacagggtaaagctggttagtttctggctctgacttcttggagcatacctaccatgagcactctttccatgtaaagatgttagaggctcctcatcggtcattgtcttaagagcacaggtgcaatttgatgcgacttaaacttttggcaatgaattgccttaaaaaacctttttatgtatttatcttaaatacatgaactgttcaactttaaaattttgttttttaaaccttcatggttgtagaaagatgttaatttgtaaaacgttaatttttaaactatatgttctttgtttcgttttatatgagattgtgtaagttacatttcagtagtggaaaatgtactaataaaggcgctcattaaagctgcatttgaaatagactaaagaggtggttatactcactaacgtacactaatgaggaactaaatatttttcaagaaaaatacagccattcctaagaagacattgggaagaaagggtatccatagtgtgttacatgtaaaaggattcactttccctatagagggcatataaggtactgtttgcaagaactcttggctattctagttgactgatcatctagaacaaacatgaagcagggatggtgtgtgtgagtgaggggtggaatttacagtggtccagtgctttatacaacagaaaagagatgcccatattataaaatacacatagatagtgggttacatggagaaatagggaacgacaaaagcaaattctatgctaatgccagggttactaggtgtat

SEQ ID NO: 24117 - DNA, 1198 bp, Mus musculus
ggacattaacttctcaggctttgggaaaaacatctcaaaatgctacctcaccctctcttggaaaattgaaaggaagcagcggcatggaaggtcctagctctgcccattctctgtatcctcaccaccctgtccctgattatagcttatgtaaaagccttgtgacgacataaaggcttgtcaaacccatgcagtaaagaactggagacaagggctgcagcgaaggctgactcttacttggaaccagcgggttttacaggcctgcgattttcccacacttgctgctgaaggcttaattaagtacttcagaaacatatctgtgttgttttacttcctgaggggaaaggtcatgttaatcagccctgagttatccaccccaaaccatccctgccattttaaaagaagccaaatggtgttatttcattttctccatcctcattacacacagggatgcctaagaatagcaaccccatctcctctgctctctctgggaaagggcttagtgtctgggaagagcgatggactaatagctggagttaaatagaaatacaaattaataatacatggcgaacagaccagaagagaagggtctgtgagactctaacagctcctctgctccaaggttgcagctgtcggaaggctctttctgctttctgtttggaaagtgggtgaaatctgagacctgtacaaggccagtaagacagattattgcctctttggtggttctttttgttttgttttgttttgttttgttttgttttgttttttttaattttcttttcccagtttggttggttgttgttctgtttatttgtaaggaaatccaattcctggaatgtcccttaatacgatgaacagtaagctaagactattatccttgtcttaacaatgtatttatgagaagtcaattacgtcccagagtaacgaactcatatacattatgagcccgtgtttgaggtttcatcatcacgctgcaacgtttttggcggtggtgtgtatgtatatgtttgcataactggttgtcattgtttcttagcccatcttttttgctggtttaatctcagttccttagtttataaaattggttgccaaaaaacgactgtaattggctgctgtgttcaacaccttgtttccagatgctcctgtctgcagcggcgccccgcttcctgctccccgctccccgctccctggctttgtacct

SEQ ID NO: 24118 - DNA, 1099 bp, Mus musculus
ggtttgttttttaaaataagtttttttttaaatgtttatgtttggctttttaaatttttgtttatttatttaatgtatgagtgctctgctgcatatacatcctcagaccaaaagagggcatcagatccctttaaagatggttgtgagccaccatgtggttgctgggaattgaactcaggacctctggaagagcagttcatgctcttaactgctgagccatgtcaccagccctacttaattcatttgtatgagtgttttgtctacatttctgtatgtgtaccacatatgcctgatgccagaagaggcgagaagtagacattggatcatttggaactagacttagggatggtggtgagccaccaggtgggctctgagaactgaacccaggtccttttcaagagcaacaactaaccactcttaaccactgagccatctcttcagctttttcctctggttttggtcatgaagttactggtattttgtgaaatgaaatgtctattccagagacagatctggaagctattaaagtgcagactagtgagtgactggtgacttgagaggtctcattgtgtggcattcagatgcatttcatctctggccttgctctgcttgtccggttactattatgcgaccatactgttcatttctagagcagcaggaggttaggtttagacttctctgactggtagtgaactgatcacctttgcagttgagggatttcaacctgattgaaaggctgactgcatctccatcaaggctcccttaccttcgagctatagctggtcacctcagggtcgaattgctgtaattcagcttagtttgaaatgtaaatgtcgaagttatttcagtcttgccaatcatggctgcttggtgttggttaagaccttagatgttcatgctgcatactgaagactaaagctgattttatttgcttattttaatctgccagttaattggcgagaataattttgtagaatcatttggggatttagctaattaagtttaattatgtgtttggggtagattttctattcttaggagattattttagtataaatatattaaattacttttttcttagccaagataagctgatttt

SEQ ID NO: 24119 - DNA, 2244 bp, Mus musculus
tcagaagtgaaggtgaagggggtttgggcatttttccaggtacagggaactctgtaacacaaacagcccataccctgtcacatattagaccggttgcagttcggagctgcaccccaacccagagcttctagaaaatcagctccatgccacgaagcacaagaggcccctcagacagaagccacaggacaaagcatcttcatagacagctgttgagatccaaacagttaatttgcttttgtttcttgtaagaagttccaaggatggacgctcaggctatcccagcctgccagcctgctgtgatctgtggctaactggcagagtcagccactgtggtccttagctgctcctgtttctaggtgtcagtttacttagtaaactggtaagaatgaatcttggaatttaataaatggtagtttgtggtttagccaactggtccagagggagctaccttctccttaggatagatgaatctacaccataagaaaaaccagccaggaatagcatggatgggttttgctttggttgaaatgatcctagcaggtgactgggtatgaggacttcatggtcactctgcccaggaagagagcgtgaaggacaactagcagcttccttagggatggtacacatgagtgtgatctctggagtcagaggtttccccacacacatgatgataaaacttttcagatttagagcggttaaaactggagatcgaatctggattgagaatcagcactgggggagaaactgttattgaaagtcaatcctttctttgagcctccgaataaactatggagattttcctgcataggaaagtgtggaatgttgagctattgagatgggagtggaattcgtcctaaatagtttttcctggtctcatctgaacaagacaatttggctctgcctagtgttctgtgccctccctttcaaaagctctgagccccgctcatgcagtccagatttcatccccctctccaagtgccttggagagctcacagcagcaatgccatcatcaaaagttttgctgctgggaagaaaaaaaaaaaaaaaaaagaaaaaaaaagttttgctggttcttggaggtgatgggagagggcaggagtatcaatttgttcaagtagctgcagtgtctgttggccaatcatctttagaaccctgtaacactgagtaccagagggcaagcccacattcctcttctgctacttcagtgtaactagggcagctgttgtctgaagcaccatagattcaggtgatcctccatagattcaggtgatcctccatagattcaggtgatccttgaaccgttcatgaaaagctgctaagtagcctggtttgggagacttgggttgagatttgcatgggaccaacacgcaggattacatcttcttcagttcctagagtcctctagaagcctatagaacaagacggcaagctctctgggcttgctctggggttttgttctgtggttttatgttgttcttgttgttttattaacatcagtgtctcttaagatccaggacccagggaggtcttttcacatacatataccaggactcttgggtactactgtcagtcttggggaagcaggctcctccatcggcaaccaaatccatgtgagcactccgaatgccttggttagtcctatgacctaaatagttaaacttcagaaaatggtttcaacagatttctgtgccgagtggttttgaaattgcatttgtatttgctgtgcttctgtattccatttaactgggttttttgttacttctgatttttgttactattaataaataaaaataaaataaaataaaataatagttggtttccttattgccaatgaaggccaatgaaatcatgaggatattaaccttttaccatgtaaaagtaggctctgagttccttggagccttggtaggggtgatatgaatacataattatttccttctctttgatgctaagcattgagccaccatgcatggcaacagtcacttattctcagcagtttgaccagttatgagtttctgcaataagtgttgcccataactgaccaaggctgacagcaacaaaaatctgtggcagtaaagaagtgtctagaagacaatttaacaggcacagcacagctgcttaaagcaatagccgtagcttcccccactatggctattctttcacctctctctctggcttacagtaccagacataaagtcctggctatggaataggcattgagtccaatcagaagagagttggttg

SEQ ID NO: 24120 - DNA, 2821 bp, Mus musculus
tatttcagagcaacctacaacctgacactgtgtaaaacacttggaaatatactttaaccaattagttgaacaattgtttagataacacctgggttctgagggcctggaactctgtagaatgggctgctctggaactcagagatccaccaggtgggagatcttccaggtggcaattccaggggtcctccacctccctagttgctgagattacaggtgtacactaccatctgcttcctgcttccatgtccatcttaacttcatttttgtttattacaatgatctcttctaagtaaacagcttttacacttaatgagaatgagaggctaaagtcttcatctgtctattcaccaaaagacagaataataatttgggaccaaaaaaatctagatgacggagtcagcgtctacccgagagcacagccttcttgcagctcctccgttgccggtccacacccccagttcgccatggatgacgatgccgctgcgctcgttgtcgacaacggctccggcttcgcaggcgacaatgctcccctccccgggccgtcttcccctccatcgtgggctgccctaggcaccagggtgtgatggtgggtatgggtcagaaggactcctgcatgggcgacgaggcccagagcaagagaggcatcctgaccctgaagtaccccattgaccatggcattgtcaccaactggaacgacatggagaagatctggcaccacaccttctacagtgagctgcgtgtggccctgtgctgctcaccaaggcccccctaaggccaacagtgaaaagatgacccagatcatgtttgagaccaataccccagccatgtctgtagccatccaggctgtgctgtccctgtatgcctctggtcgtaccactggcattgtgatggactccggagatggggtcacccacactgtgcccatctacgagggctatgctctctccctcacgccatcctgcgtctggacctggctggccgggacctgacagactacctcatgaagatcctgactgagcatggctacagcttcaccaccacagctgagagggaaatcgtgcgtgacatcaaagagaagctgtgctatgttgccctagacttcgagcaggagatggccacggccgcatcctcttcttccctggagaagagctatgagctgcctgacggccaggtcatcactattggcaatgagcggttccgataccctgaggctcttttccagccttccttcttgggtatggaatcctgtggcatccacgaaactacattcaattccatcatgaagtgtgacgttgacaccaagatctctatgccaacacagtgctgtctggtgataccaccatgtacccaggcattgctgacaggatgcagaaggagattactgctctggctcctagcaccatgaagatcaagatcattgctcctcctgagcgcaagtactctgtgtggatcgatggctccatcctggcctcactgtccaccttccagcagatcggctcagcaagcaggagtaggatgagtctggcccctccatcgtgcaccgcaaatgcttctaggcggactgttttacaccctttctttgacaaaacctaacttgtgcagaaaaaaaaagagagacaacattggcatggctttgtttttgttttttaattttttttaaaaggttttttgttttgttttggcgcttttgactcaggatttaaaaactggaacggtgaaggcgaaggcagtcggttgaagcaaacatcccccaaagttctacaatgtggctgaggactttgattgtacattgtttttttgattttgtctttttttaatagtcatcccaagtatccatgaaataagtggttacaggaagtccctcaccctcccaaaagccacccccactcctaagaagaggatggccgagtccacgccctgagtccaccccggggaaggtgacagcattgcttctgtgtaaattatgtactgcaaaaattttttaaatcttctgccttaatacttcatttttgtttttaatttctgaatggtcagctagtgtggccccccttttttgtccccccaacttgatgtatgaaggctttggtctctctgggagtgagttgaggtgttgaggcagccagggctggcctgtacactgacttgagaccattttaataaaagtgcacaccttaccaaaaaaaaaaatctagatgacaagtagtctaagaatacctgctttacaatattggaataaatgagtgaaagttggacatagttgtgcacaccttcagaccagcacttgggaggtggaggcagaagaacaggacttcaaagttactaggcttcatagtaaatttgaggccaacctgggctacaaacatgaaaacttgtctcgatatggatggggggtggattttaaccatcaagtgtgtctcctttgttcctctttgttactaaaccatgacttccaactacataaacatgagcatgaagcagagcccgttatgttcatccacagtagagtagttcacagagctagcataatcattgaacactgaaaaaagtattaagaaaacattgtatccttaaggtgtgaagaaaaatagtaacacaaattattgtcattggaaattaatacattttactaactagttgattgggcaattaaaaaatactaaaagtataagctaacattaaaaaatatgtaactctcactgctgatcattaaccaacctgtaatgacaggaagcctagttggtaagtgccaaaagtagtttcacattgtattagggcatcaggtggtctcttcaagtgtgttttattagaagccaactgtatg

SEQ ID NO: 24121 - DNA, 2373 bp, Mus musculus
cacaggtcgcttgtaatgaaatctgcagttagcttttatattttttagaactcatcttagaccctatcttttacggaagttgctagtgatttcttaatttttttctttctttttcatatttttttaaactaatgattagatgtcagcttagtgtaataggaattggccatctggaagctgatcatcttctgaagtcagcagatgatcatttaagactgttaaatgctatttggcctcattagttatgagttgcatgtgtatctaatgaatgcttagagtttcagaatccgcaatttttattatacagttattttcttttcctttttttttctttctttttttttttttttttttggtttttcgaaacagggtttctctgtgtagtcctggctgtcctggaactcactctgtagaccaggctggcctcgaactcagagatccacctgcctctgcctcccaagtgctgggattaaaggcgtgcgccaccaccgcccagccattattttattctctgagacagggcctggctgtgtagcccaggctagccttgaacttcttatggtaactcttgtctcagcttcccagctgctgggaataccacataccctgctttaaatgttttactttaaaatgtgccaaaggtgcctcttggtctaaaaatcttgatattaaatgttattgccaatattaaaaataagcgttcattataaattgtacttgaaatatatgacattttggggtgatgtaaataaaagtagagctcaacccttagtagtgcagcacgtccctgagaccagttctaagagacgctgaaatattgggtttaaatgaagaatcaagaagaggctgttggctggaatgttagatgaaacaaatcttttaaaatcaacatggggtagggaaagagaaatcataggtacccaggcaaatccctgagccagtaaggccctgtagagtaataatgaattgttaccttaaaatcttatcactaactttattagtattattaattattacgttggttcctactgctgggaagctgttcacatcgctccttatacaggagccagcaagctgtaggctttcttcagccttgctcttcccagctctggagagtccctccctgacctggtggttataatacagcaggcggccttggttaatgtttaccttttcattgtgtttttgaaaactacaaatcaagtatttagtagtagctatttacaaatgtgtttgcattcgagtgcttgtagatacaactttacatgtaaacatgtgtaacattatttagctacattgagtttgtaagtgcctttacctaaatgatttgcctttcatcaaaaagtagacattctattataagtattgctctttgtttagtgcaaaatacggagttcttaagttagactgggcatgtaacacagtgaaggtgctgtgtaggcttttaggcggcatgacctttagcgcatagttctatgccagtgcttaaatagaagtgtttatttatccttcactagttatacattaggcatataatgttatgtgacattaactcagtaatgtgtggttttatatttctgacatagtgtgatctttttaatagtaccgtaggtatcgtgtcctttgtgatcttccatttagcccttagtgtgggaaagaaagtatatggtaaattgttggcaatagctatatgatgcgtatttgacttgagggagaaagactgctcctgagaggttcctctgcccacaacagatgtaggaaatcttcatcatgctgtgccaggaagatcagagccctccagaatcaaggatggagccctaccactaccaccccaccccccagtcaaacggtgtatcttttacctagaattttatttaaaatgtatttgctaccacaaaggataagagaagttccatcctcttatgaaaacattgttactgaggtctagcgagtttcagcaacagttttcctataggttgaaaagggggtcgtttaataggaataaaaacctccattctttttatattttttgtgatctgtatttacaaaggattgaagtaagcattccactaactcacagagttgaacatttagaaggcagttttatggttgctgtcaggcttttactttagtcagtctcaatgagtgacataatatgcagtctcatgtatgtattgaatttagtggcttaatgaaggctatttacatgcagaaagctatctgcattcatcataatatacttgattctttcagccataaataaattgaatataactgtattatttaaaactctagctggaggagtcttagatgagttggcattgctgtttgctggcattggagcagtagctaagttggttggttttgtgtacg

SEQ ID NO: 24122 - DNA, 1197 bp, Mus musculus
ccccaaatgaatgaataaaagaacaccatgaccaaggcaactctcataaggacaacatttaattggggctggcttataggttcagagattcagtccattatcatcaaggtgggaacatagcagcatccaggcaggtgtggtgcaggaggagctgagagttctacatcttcatctgaagactgctagcagaatactggctgccaggcagctaggatgagggtcttaaagcccatgcccacagagacacacctactccaacaaggccactcctactccaacagggccacaccctctaatagtgccattttctgggctgagcatatacaaaccactacaatgagagttggggaagagaaatagctattgtaatgctgtagttaaagtagaagttaggaaatatcaagaatacttctggttagcatgatgatgcacacctttaattccagtacttaggaggcagagacaggcagtatgagtttgaggccagtctgatctacatagagagttcaaagaccgctagactatgtaaagggacgctgtctccttgtgatcctgtttgttgtatcctccatcttgtcctatggtgtctgttcctgttccctcccaagctgccccttcccctcctcccatcccctgtcttcctgcaaacaggaaacaaagaggcaaacaaacacaatgtttgggggatggagaaatggctcagtggtttagtgcacatgttgttcttgcagaggacctgagcttgattctcagtatccacacagtgtcttacaaccatctgtaactccagtcgtgggggatctaactacctcttctactaacctcagaggacaccagacacacatgcggtgcatatacatgtattcatacacataaataaatctaaaaagcaaaactatgcagactgtagaagaaatgtccttatagaacttgaaacagatttattttttaaaatgttgtacctgctcagttatagatgatatagaaattataaaaagggaaataattgtctatattttcatgattcagagccaatttctgtttgctttttgatggagaccacgtagtaaatagcactttgtaacctgctttttcatgtgatcttgtattgcaaaaaaacaatcttttataacaaatagcatttgtaatttttttccatcaatttactttacatcccaatccctgcccctactgttt

SEQ ID NO: 24123 - DNA, 1160 bp, Mus musculus
catctctccctgcacctcacacgcctactgagttcatcattagtctgtgtcttcattgttgttctgaaattgacatattagccagattgttgatttttatggtttttatcttaatcttttagcaacttttgatatagatgaccacatttcaaagctcttttttggttctaagataataatcttttctttcttcatttacaattccattatccatggttcctcttgccccctattattcaaacttattctgttcaatttttagaactctctttcagaatggtaagtcagatcttaacttcacctgtcaaaatctccgttgacttccatttacatttaaagtgaaattgagtttcttgccatggtttgtgaggtattactcctcttttcccacactgtctttctctctgaacttacctttctccccttactcccctacttaatggtgcagccacagtctctgtgcttaacattattttagaagtaccttgatcattatggtgaggagctgttatccttaaatgtttcatgtgcttcctttgcagaaccgagagctccagatcatgagaaagctagaccactgtaacatagtccgactgcggtatttcttctactcgagtggtgagaaggtaggtgtgagagcgcatgagctactgttctcgtgggaataacctcccccctctccctcgttcctctatcaactagctttgctaattgattgggagaattcaaagcacaaaccaggattctgaacccaagatacacagctgatggtagcgtggaaatgccaatgagaagaatgaactttaagggatcttcctggcgatgccggggaggcagcttcacagctcttgttactccaactggagggactaccttagttcaagtgtccagagcccgcagttaaagcttgacatggctgcgtatacttacaggccagatctgtgggatcgtgggacacatgggttcctggggattgatctctgccggcctagcttcaaattcagtgagagagcacgtctcagggaactgatgagctagacaccgcacacccttttctggcctcctcacatggacatgggcttgtgttcttgcacatgtgggtttctcccccaacccacatccccaacacacaatttaaaatgaaagcaaattttctgagc

SEQ ID NO: 24124 - DNA, 1099 bp, Mus musculus
gagttcatttgtagcagacattttttaaatagatttagaaactctagccaaagttaggaatccagtgatgtaggcagctatcacagtctggtgttacgctaacacttgttcttgtgtgcacacgagtgtgtctgatgctggatctttacagtcatggtcaggtgcctcgcatcattcacagaggtagggaagtaggtaggtaggtaatgatataataagttagaagcagtcaacctttaaatatgtagttcaaagaagaccctattttaaaatgtccacatgacattgattagttcgtttagttgactgtaaaatgtttaggaggtgaagtaatttaagactataaatgaaatggttcatactcgcatgtatgtagttagtatgcctgcctgtcttagttaaggttttgttgtgaagagacaccatgctctcttcaactcttacaaaggaaaacatttaattggtgctggcttacagtacatacttagtccattaccgttatggagagaagcatggcagcacatgggactggagaggtagctaagagttctacatcttgatctgaaggtagcaggaatagaactgtgagcccatggacctggacttgaacatccaaaatctcagatcttgcactcacagtgacaaacttcctccaacaaggccacacctcctaatagtgctactccctatgagccaagcattcacacacatgagcctatggctgccattccttttcaaaccaccacaccgcctccctttctcttcccgttctgttatcctcctaattccatgatggttccaggtacttcctttaacattctcatagcctctcttcaaaaaaaaaaaaaaaaaaaaaaaaaaaactttgcattcattatttctttcctatttaagcaaagatgtcagtaatattttagtgccagaaatatagacaggctttccttcttctaagaggccaagtccccttcattttagaattcatggtgaatacttgtctttgataaaatcatcttggatctttgtatttaaatcttattttggagctaagtgagatatatttagaatctttgatgtggcactaaacccagaggactctagg

SEQ ID NO: 24125 - DNA, 1188 bp, Mus musculus
ccagattttaataaagtcgtttcccttagaaaaacacttgagagaagacatcatagctaagtaatgtgaactgttagccagcctactgctttgttttccttactttaattgaaaaccaagcttgcaagaattgccacattcttatgcatagctctaattttaaatccaaatctagactctgtatttaatttctgcttttttaacatcatgctttttaaatttatttattgatgcatgtcagatcggccactatgattttaagtggtagtaatattaaaaaccacacatcaaaataataaagtcacttgtatctgctgactttataggaaaactgattatattaatgtgtatatatgttttatatatacatatattcaatactgccttttctttttgtctacagtatcaaaattgactgactgaatcatgaaaagaatgttcccccaccatcaccattaagagttttatttttgttttctttgtttatcaatgaatggtgtaagaatcagtctcttgttttttgaagaaaaagcaatattccttggaaagcaaggtggattgaaggattacgtttgtgtgaggaacagaactcataactagtttgttgatacttttaaggttggtgtctttgtgggccttatatactctaaaatgaaccttggtgcttatgggccattacttgacctatgaatctttaaggcacaatcagttatcttttacatttaaagatcacttgagtaatggccaccgctccttccttccttcccactccctccccacacatctgctaaggtgagctgatgactagggctgtagggcccttggttatgtatgagacacagactcctttaccctcattacctgaccttaagtcacgttgaggtcttgccctccaggtggttaggaagaggagtctcttggcggcccttatacaggccctagcaccctgccttgcttctccgaccgtgtgtgtaactctccaagagagttgtattgtctgccgaaatgagttgatgctagaaagacatcagtgaggctgtgcggctggctgatctcttcaggccaccgaaggggtttctcagacctccgtttagatcagacttgacaagaaaggaagcaagcccaaagcaaacaaaggcgcttttggtaaagcgcttctcagataattgccgtgcgaaagacttctga

SEQ ID NO: 24126 - DNA, 1125 bp, Mus musculus
tccagagaaagtttggccaatgccagatctcccagagttgggatttttgttattttttttctttgttttaaatcaaatttgtgtctggttcctatttacactactgattgttctaatcccagagatgaatatgtttctcctctgtatgagaagtaagcaccctttatggtgaaacctgtctcttgtggtagaaacggaagccgctgaaaacaaacatcagcacaggagagccccaggcagaggtctcccttgagattcttccgaagcaatcgttggggtctgggtcagtttcacagggttatgccattttattcaagtccgttgctccgttgtgcagtctccaccatataagcaaaaatgacagccagtacataaggggttagcttgacaaagtagacttccttgtgttcatttttaaggttttttttttcttaactatatctgtctacaggcagatacagataggtatatggaaatgtgcttgcctgtaaaatttgcatttataaatgtgttgcgatggatcacttcggcctgtacacatccaattagcgtgaccacttccatcttaaaaacaaatctaaacaaaatttattattattatatatatataaaggactgtgggttgtatacaaactattgcaaacacttgtgcaaatctgtcttgatataaaggaaaagcaaacgctgtgtaacattactacttgaatgcctttgtgactgaattttttttttcattttaaatataaacttttttgtggaaagtatgctcaatgtttttttccccctcccccccattcccttgtaaatacattttgttctatgtgacttggtttggaaatagttaactggtactgtaatttgcattaaataaaaagtaggttagcctggaaatgaaattaaacttcaccagtgtgtggtctttatttcagtgcccatccccctctcttcacccttcccactctgccatcgccacatgcagtcacactgccgtctccactcctctgacagaggaaacatgaatccttgagagaaaaatcaggactctccttctctgagatgaccttgctctgatgtgtagacaggaggtgcagcttccagcttggaaaccccctggacttaatgtag

SEQ ID NO: 24127 - DNA, 1199 bp, Mus musculus
agccgcactttggaacccctggtttatgacatcctcctgtccacagatatttgcttgcccctccatagtatctgtaacacataagaacttataggaaccccaactccacatgaaaaatataagacctcaaggcctggggagatggctcagtctgtaaagcacttgctggaggacaaacatgaggacctaagttcaggccccagcacccaggtaagaaagctgggtgtggtggcacatgtatctcagcagtggagagtcagatgtagcatccctgggctcactggccaatcagcctggcgtaataatcaagccccaggtctcagtgagacctcatgaaaaaaaaaaaaaaaaaaaaaaaaaaagcaagatggctgtgtccagaggaaccacatctaagtttgacctctggtttacacacacacacacacacacacacacacacacacacacacacccatacacacctgagcatgtgcacaaacctacacataagcacacataaacatgtgaatccagacacgtatgtacacgttgaaaatccgtaggaccttgataaagaccacgtatatcttttgtcccctaccctgtccccacctgcgtttgctctccttgaatgctgtgctcagtggtctcgttttctgtaagatttttttcccctgtactttgtgttgtactgcagaaacttactttcactcctcatctgctgaagctctggaccgtgtgttcactttaccttctccagtgctcagctgtgtctgtcagagcaaatgtcgtgtgaataccgacctaccctgcagcagcgtatgaccctgaggtggtcaagatgcatcgtccattttaagtcattgttagatctggtttgctaatgttttgcttctctgcttacgagtgagtcagacaatagagctcatggctcttatttttccttctaattgtccctcccacgtgtgggattgcatcagacttaggcattctcctgaggtggccttgaagcatcccttcttccttctctgagaacttgaacaagactgagatgatctgtcgcttcagtgtggaaagacgtacaaagccatcgaggactggtatcttcatgagaagcaatttaaccttgcttcaatttctttacagcatagagagctactttgcattcattttggtaaattatatcatttagaatctcattttatctgttcagtttt

SEQ ID NO: 24128 - DNA, 1144 bp, Mus musculus
gtgtttgtttgtttgttttattttttaaattgacttctcctccacaggtcctacttcgagaaagaatgggaaaagtacctggagcttagaggaattttggacggcaactcggctcccgtcttcccgcagccctttggtgtgaaggaaagggatcagttctacatcgacgtgagctactcgggctggggtggcagcagcggacacgatgcccccatgattgcctacgatgccctcctggccgcgggggattcctggaaggagctcgcacacagagccttcttccacggtggagacagtgattccacggccgccattgctggctgctggtggggagttatgtacggctttaaaggcgtaaatcccgccaactacgagaagctcgaataccgacagcggctagaagaggccggaagagctttgtattctctcgggtcaaaagaagaccctgtattagatccctagggagaaggtggtttgtttctggcggtttctttccctgtagccctgaagctcagtctcttcagccttttgagagtcaagaatcctaattttgtgtttgaagagttctgagataacaagtcccttggatgcgtttagccctgcctttccacatttaccctgttctccccgagttcctctcttgtgtatgagaatctttttatttcagttgatggggtcagcttttcccattcagaaacctcataaccttgtattccagtttttgtttttatcacagaattgtgcaaaatgctttgtctgacttttccttgattgggtctcccacctatcccaagtagactaaaacaaagattttttttgggaggagtttatttgggagacaattccaggaagcaagactggaagggaggagtggccacacagggtgtgtcaagagcaggattctctggccatggggtgtagtctgtgctacttccttccttcctctgcccaaggcaatcttcagagttgtcctggtgagatgccttgccatccttgagtgtgtgtccagtgactttcacgtgattggttaaggcccagggacactgttaagtccctggtggtgtggatttggtttattggttgtattatgttaattgagtccccaaaattacatggggatttgcaagtctgcatataagaaggt

SEQ ID NO: 24129 - DNA, 1173 bp, Mus musculus
agataatacaggacagcttccctttgagctgctgtgagttctctaataactggaggtaggtgtgtgtgtgtgtgtgtgtgtgtgtgtgtgtgagtgtgtgagagtgtgtgtgagaatgtgtatgtgtgtacgtatatgctttgttaattcataagatcacaccgaggattatatataaggaacactagctgtcatgccccagcatgggggtttgaaattgaggagccacccccatcatgtgtccatgactctccgttcatttcagagaaacctgggagtctgtttagttccgtgctcgcactgggtctgttgttctggtgactgacccctcgctctccccgactcacccctaggtggtgcttgcatgcagaacgccatgctgctacagcccaacagggccgacggctataggattcccttcaacagtcacgagggtggctgcggggctgccatgcgcgccatgtgcatcgggctgaggttcccccaccccagccaactggatctgctgatccaagtgagcatcgagagcggccggatgacccaccaccaccccacgggctacctcggcagccttgcgtccgctctttttacggcatatgccgtgaatggcaagtcaccatggcagtggggaaaagggctaatggaggtgctgcctgaagccaaaaagtacatcactcagtcaggctactttgtgaaggagaatcttcaacactggtgagtctctgggtgtgtgtcctagctgacttgtgggtgaggatgtgtgcacaggctccatacatgtacctagggttcagaggtcacagctgccatcagtctcactaacctgaccctgccggggcgtctgctaagtatttcaagctcctttccgtccatggttgcctgaaacagccaagtggatacctcactgtaggcacctgtggtcctctcttaagtcctattctggattatgtctttctgtaatttttgtgaccagccagtgctgagatgagcttttcttggttacttccaacttccctgagatttgtttttccagtattgttccaaacagtatttcaaaacccttggttgaaatccctagagaggtttctccaggagctagtaagctgtaaggccacctgtccccttttattggttaccttacattatctttcttagaagaaacaaggctcagag

SEQ ID NO: 24130 - DNA, 1259 bp, Mus musculus
catcctttgattgtaggagaagcagtctgcaagtcactgagctcctcccgatggagattgaaagtggcttggagaagattcagcctgagggagacgctcagaggattgaggagctgctaagcctccctaggaacccttcatcgccacatcaacaaagcaagcactgaggaccagggggctgtgtctgggaacgccagtgccaggctactccgctactccttgccagcccgctgactgatgtgagggctggaagctgtgctagcggtcacttgtctctgatctttttctttctttctttctttttttttttttttttttttttttttggtttttcaagacagggtttctctgtgtagccctggctgtcctggaactcactttgtagaccaggctagcctcgaactcagaaatccacctgcctctgctccgagtgctgggattaaaggcacgcatcaccacatggcttccgatctttttattacatccagaattaggcacccagtactcagggtgccactgacctgtaaatccagaagcttgggaggctgagaaaggaagatagtgtgatgctagcctgagctacttaatgagaacctggttaaaaaatgtgcacccacaaaaaaacccaaacaacagaaccaaaaagcaacccaaatattcttatttattccgatcattgatccatctaaatatttcatatttctctatcatgctagattttgtacaagtaaaattcttcccaaaagatttaaattgtgttgtctggatcgcctaatcatgcctcagtctttgaagagtgttctcttggaggacctgaaggaactggaggaggagcatgtccgcgagaccctcttcctcgggccctcagacagtggatagtgtgagcctctacgtttagttgtttggattttttttttaaaataagaataagaggtgattccttgccatttaaacgtggtttaacaaactggaagcaggtgggtatcagtaaagaagcgatccagcttagtctccgcccccacactgccaacaaagcacctgtgctgcaggacacagaagatgcgacatgctgtccccacagtaaggagctggctgcctgagagaagccgtcctatagatttcagctatggacagaatgggagaaagtgcaagaccgagtcacaggcagcacttttctggcctttgggtgtgttttttcaattttactaacatgcagttaatggtctgaaaacattaaatggaagatcccaggactaagc

SEQ ID NO: 24131 - DNA, 2403 bp, Mus musculus
tacctaaaatcccagcaatgaagagactgaatggagaattgctttgagttccaggatagcctgggctatgaagtgagtcatatgaaagagtcagaagtctcaaaacgccaaaccaggaccaaaacaaaacaacaaaactcaagtgcttaaaaatgaatattagctggaacaatgcttgcttttaagaaacaaatgttaaatttattcctaaatgcatgtggattatgatagttatacggttgttcgtgagaaacagctgagttaattcaaataaaatacttggaacgaggctcatgataaagtactcaaccatatgtagcctgtgatatataatattcttgttaatcttctgtccaggggaagccagttcatcataaaccatttgcagatggatgacatcacctgttactgggagaacctcttgactgactattccaaattcctgtcctataatgtaacaagaagaaaagattattatcagatcgttcccagacgtttgaaaactgaactgtagtatccatcccaggaccagaatcctgacagtggatctgagatgctctgtggtgaaataccatgatcatgatgcctgtaccttgaacacttttggacaagccaaacatccagttttccttatcatgttgaagccagagggactcttgagaaagatctagtatgtgtgtaatgagcagaaatgaaacagctcagctctttggaatcatgagataaggctttggaactgcattctaaccatcgttttcctatgatcagtcacagcttgtgcctcgggtcatctacgtgtgttatcactgtgaaatggactgtgtccatctgaagatgctttgtcctgttatttggagcagaccatccatcgtttggaactagtacaatacacaagcaactctgaagttattttaggtttgattctgttgctttatttttatgtagaaatcctttggagtttgtgaaaaataccacagcgattgcttcctctggagtctgaaggaggccagtggctgtgctctgttttgtaactgcataaattctctggcactcaggaggtttccataatgcctcagtggcatgagtaacttctgcagttggatttcagattcccattttgtgccttcatgccctttttattctctctgaaggagattaagagaaatttcccagtcctttcaggaagcagtctcactaaagaactatgcctctgtaatactagcacttctgaagcgagaggcaggaagatgaattcgtggccaccctcagctacacaggagttcaaggagagcccggctacatgaggtcctgtctcaccttttgcacatcttttattttgccattttgaatttgtagcagcaggatcagctcagtttgcagagactgcagtcttcatatgtgaccatatcatgaagtggcaatttatagagcactcagctttcgcttttactccggtatgaggttatccttgggctccagcatcacctctgaacctccttggcagttggcggctcacatctgtgttctgtgccaccgtgctgctttgtcgttacgcgcctctttcccccacgctctgtacgcttactgatggacgagaatgacgtttctctgctcttgatgtctccattatcagcacagtgcctcacgcagagcagttactgaacagctattggaatgagtgagtgggaatggatggatacactcgcctggcctaactaaagtctattttttaaactgctcggttgcttgctccagtggggatgagatacactgtgagaaatgggtcagttcagatccttacttgccctggagtagtaaggagtatctgtttttaaaaacaacaaaagttactcggctctgactcttgcctgtgtacctcactgtagatggtatgcgaatggtgggtaacagtatgtcaagtgtgtgatttcgaaaatggtttgtatggtcacacttctgaagatttctgttatcattaatactggttcggtcctaaacgtaaccattggctcctcatttacttactatagaaaagactactattgttttcaatataaccgaatataatatgttttgtaagagttgtacttggtgagcctggaaaagagaacccattgacccaagagaaaagtgactgtgggtggaaaaagtggttgggtttgatgagcagaactcagctgggctgagggataagcgttggttctagacagagatgattgaaacccttcactaatggttcctgttagcaagtccatgtcctgaggatgagagagctgtgtatgttagagggtattttgactacattttgactgacagtattgctttgagacccttcaagatcagagaacagagctgggcggtggtggcatatgcctttattcccagtacttgggaggcagagtc

SEQ ID NO: 24132 - DNA, 1149 bp, Mus musculus
ggcgtccccgtgtctgagtgggtattctttctggcttctggcttcctgcattataaataaaacagtctctgggctggagagatggcttagcggttaagagcactgactgttcttccaaaggtcctgagttcaaatcccagcaaccacatgttggctcacaatcatctgtaacaagatctgacaccctcttctggagtgtatcagaagatagctacagtgtacttagatataataaataaataaataaatctaaataaatatttaaataaataaataagtagaacagtctcaaagagattaagcgaccctttagaaaaagggggatgggccttccagttgtacaagttggccaaagaaaagagccaatattgcatagcctgattgcctcttttccagaggcccatatgccctcagtgagagagccaccttggtattaggggaggtggctctcaggtcttctcccattcctccctctggtgaagggggttgtaatggccccagtctcagtctcgtatgggctgaggatcctggaaccagtactggcactggcgggggccatggggacgagtggagggagatttagaggaagagggtcttggagtaacaggtctgctgttgaagattcttggcagatcagaagtttctcaggtctgagtctctccccccacaagaggaatttattgttccagtgcacaatgggggtcatcccagacccaaagaagagggagtgacccctggtcgtccagttgttagagtgagtttttaaatggtttccaggggcagaacagagcatcagcaactaggcacaatatgattggcagaacagtgcaccctttaaactgattggtctttagggaatgaggtggcaaggacttcccttgtctgatggtgggcaaagtccatccagtggaatgtggaatgtgcccccagacccggggtctgaggaatgttaattagcctctcccttccagaggagcaagtgttccatgatcttcccaaagttcctgacgggaccttttcagctgacagccttaacttttaggttggtggaagctagtgatttgttcctacatcctaaaaagtttcaaatgatagtcacaagaaatggtaaatgagttgccttggtggggacagaatgacatggttgct

SEQ ID NO: 24133 - DNA, 1228 bp, Mus musculus
ttactgaagcttgttgctgcgttctcttatttattagacttaacttttctagaactcattctttatttctattatctacctagttcattatttaatattcagtccctgcaaggggcaggcgtccgacgtgcttgtcacagtcgtttgcatatgaaagacgtgatcttaggtggcatctccgaatttcccttctcttctccaagcatttctctagacactagctgactggagccagggaaaatttggggaaaaaaacaaccaaaaaccaaactaaccaacaaacagaaaaactccgccgggcacgtatgggccggaaagcccgggcgccggagagtcccactgcgcaggtgcgccgggaggagggcgagccagctctgctggccgcaagcctgtttccgggggccagcgcgacgcagagctgacgtcatcgctgtgcgctgccacgtctcctcagctcccgggcgatggaggctgaggatgatgagtcttggtgatggggtcggactgtgcttctgactttagctctggctctggcacggactcccggtctgggtctggtaacctagcgacccgagagctttcttcgactgtccagtgggatcctgcctgcgtcccggcagctgtttttggagcgctttagaggagggagtgagtttgggtgcccggggtcgcggctgtgaagccgccgcctcctcccagggatccctctccgtggccagcctgtcccatgcgtgagttttacttaacctgctttgtcatctcgccggccctggcgtgcttcggctctttcggccgccggcctgagaccactaggtgattccgtcttggaggtttagtccagtcaagtttgtggtttctcgccttccacctcgaacaatcttacgctgatgcgccccagccttttgccctcaccgtactttctctttaattgagcagggatcagctttctttgcctttaacagtttggagtctttgtcccacctggcgtttgttagcctacagtggactagggaacctcggatccctctacagtagtaatgttaagcaaaaaaaaaaattttttttttcagagtatttttagtcgtatttaggaaatacgtggtatatgttggcagaaccatgtttgccgaaattgaggaaaacataatgtcgtcgtccgcccacctcccccctgaagatctctttagccctttaattttgcacgttcatttaatttcttagcggtttt

SEQ ID NO: 24134 - DNA, 1099 bp, Mus musculus
tactggctgttgactataaatcctcatctaagttggccaagctggctttgaactcgttctgtagctcaggcagcttttaaacttgtgactgtcctgccttagcctcctatatagctatgattacagaccttgccaccagactcagcacccttctatcttactgtgcatagtcatttgtgaggttgtcagaatcctgttgcctatttctggactagaaagttgttagggattgatgtttagtaagcagcctggcggccctctgctgataggttcttgggctaacatttaagaggaccaggtataagcaagcttacaggaggtctgcatgagggtatggagggaaagaaagaaacagcggtgtctggagatgtctaaattctcaacggttgggttggtagctgtggataggacacattttttacttttttaaggcagagcttagttttcaccaaatctaagctcttactgttaaggcacactgcttttgagtagaagtggatacatggataaaatgttcctttcggtgcttccacactcaggctactaaagcaggtgctgcgtctacggttcactacacagctctgatcctggcccgcttggtgctccttactctgtgtggatgggtgctctgctggaccctggtcaatcttttccgaagccattcagtcctcaatctcctgttccttggctatccgtgagtatttcagtttcatagtgtgttgacaactctctgaagttatttgagttatgcagatgatataatggaggggaaatgaggttcttcatacacagcgtaagagtttggaacattggaatgccagtagataggaataatttgttttctaaagttaggtagttggggaagaaggtataagccaagagcattctgaggaaactgagatccgtggctatcctcccagtggagaccatttcagttaggtctgttcatctggtagaggtctctaagaggtggctggctacagagtctttaagtaagtagagaagcttactgtgtgcagctcacggctttaacctcaggacttggaaggcaagtgctggtgggtctgtctctgagttcaagacgagccagggctacatg

SEQ ID NO: 24135 - DNA, 1188 bp, Mus musculus
ttaataaagattgttttttattttgatagacaggcttagtcccttagctgacctctggcttttcacccttgctgttactgcaaggtgtccttagctccttaggctgtaaaaaaaaacagggatgaagagaaacgacttccagcttctattttagccacaagtcgtggtgttactaatgacataattattgcttaggccttactaaatctgaggttgataattctcctttaggagctgcacagcactcagaactgtgcatactggtttgtaatcatacaaattcagtatgggcaccgcttggtgcagagagcactgcaggggaaggtccagcttgaccatttctgagtttcctgtgagataaacccggtttaaaagaggttggtatcaaattttggctaaaaatcaaaaatgtttttcggctctgcctccccctccccaaaagataccaagagccacaggtgtgggtcttatcagtacccacgggagaaatcaggtcaatgtccacccaagccaaggttaaaggcccactcatctacggatgagaaaatcatttggtcacctcagttaagcgttgccttatttaacttaattaataggggggagagagattggagacgtactattgaaagggcaagcccttcactgcctcccacctaaataaaaaagccaattggccttgtactacagagccggccgaaccccttctccctgtttcccacctatcatccaaaaatgcggaggaatattaacttagtgttattcttattatagtgtatttcacatttgttcagtcaaacttagccagagttccaatgccctacttaaaattcaactagaaagttacctaccaagtactaattagcattataaagtcagagcctacaactccaggcttttcagttagttgtttactaagataagaaaggacagtcttagccagatacagtttaccataagaaaagttaaggaatcccacgaaagcaggttttttctttagccctagattccaggcagaactattgagcatagataattttccccccctcaggccagctttttctttttttaaattttgttaataaaagggaggaaatgtagtctcccctcccccagcctgaaacctgcttgctcaggggtggagcttcctgctcattcgttctgccacacccactgctagaacctgcggag

SEQ ID NO: 24136 - DNA, 1165 bp, Mus musculus
agactcaagaagactgtttccccaccacagatgtcctgagattcagttaaaacgaaacatgctgcatctccagagatgtgccaagccaaggagaatgctagaagcagagtaaagcttaccccccaaactgtggtccagctggaccccttctttaattcttgcctaacttaattattttcaggacccttcaagtgccaggtggaatttacataatgaaattattttttaaaaataggtgtccttagggagagaaaacaggagcaagctcatggtctggcctagtctccctctcccactccttctgatgacactagcaatgcattccatctgacctgactttatcatagaggcaaaattgttcagaacactggctggagatggggagaaataaggaaacttcttgtgaacaccctacacacacacacacacacacacacacacacacacacacacacacacacacacacacacacacatttatttacctcctcctgaaccatgaatcgtattggtgattttgctatattgacagattctcatctgttacactctaggatctctcacaggtctgtggcaattactgttcatgatttcctgaaaaaatatttttttaaaagaaaactattttttttaaatactagagagacagtggactaggaaagcgagaacttgccgccttgtctagtgactgtattcaatgactgaacagaggccccccccaccatacaagagttttaggtgattgagtgggtggaaccagctggagccaggtgggaggggcctttacattgccagcagggccccaaagaattgagattgtgtatggcaaccgttaatgaggacagcgcctgatgccttttgtaccgaggaagataattgcctcttgtttgacaagtagagtttagtaggttattacaaaaagggcaagagttgttttggttttgtttctttcaaaataattttttttcaaaagaataacaagggttaggcaaatgggggaccttcctgtgtgctcttgggggtctgctcagcatctggaaatttgggtgtgcgattttccctgaacacattgcataccagtgtaaaaagactctgcctcccccctttttggcttttttactgggcttggctggccttgcagtttaccagattcatttacagactc

SEQ ID NO: 24137 - DNA, 1192 bp, Mus musculus
ttctattatgtagctaactgatagcctaatatatgtgttatttatcaaataaagcaagcaacagaagaatattgagcacctagcatatgcaaacagcctgtgagcactaatgatctcacactgttttgacattatatagtgtaactgaccatgtgtgtgctctttgcctcagtgtttaatttttagatatgtaccaaacagaaatttatgtggcatgaaaagacatagaagactatttatagcagcaacaaatagaaacaaacaaacaaacgaacagcagcctatacagtcatcaaaggagaggcacatttaaactcagaatcttcttttcaaggaggacagagaccattgcaggaaaccacaactggtcaaaagccaatgactgtggtgtattcaggaccaatggatacatctataatatatatattatatatataatataatataagacgacctggaaactgcaggcaagattgtcttctagaaatgacatgaaagctataaacatgatcgctcaatgatgtgattacctaaacaggtcctgaacaatgacaatggcaacatcaatataccccggagctcttgactctagctgcatatgtatcaaaagatggcctagtcggccatcactggaaagagaggcccattggacacgcaaactgtatatgccccagtacaggggaatgccagggccaaaaaacatgggaatgagtgggtagggaagtgggggggaggatatgggggacgtttgggatagcattggaaatgtaattgaggaaaatatgtaataaaaaaataaaaaaacccacaatataccaatagttattatgaaaagaagcaatttcatgggactccattcctaggcaaattactatttacaaacaaggacttctgtgagcaaaaaaaaaaaaaaaaaaaaaaaaaaaaaaaagccttcccaggaatgaatgagctagagaaagtagccaaggagctaaagggatctgcaaccctataggtggaacaacattatgagctaaccagtaccccggagctcttgactctagctgcatatatatcaaaagatggcctagtcggccatcactggaaagagaggcccattggacttgcaaactttatatgccccagtacaggggaataccagggccaaaaagggggagtgggtgggcaggggagtgggggtgggtggata

SEQ ID NO: 24138 - DNA, 1163 bp, Mus musculus
tttgccaacaagcaacctctgtgtgtatagggaacagatgtagtttcaagttccagtttggtgacatgagaattaagcatgcattaccaatgcaagtgaagtatttatttaaaggaacatgataatatgaatgcctattttataaaatctcaagttggtatatgaaaaacctattctagtctctggcagtggaggtggaaagtttaaatagactatgacttctgaccactaataattggcttccttcataaaataaaattaaatgagattactaagtgacatttcctatgactaacgccttagaaactgatcttgtttgtatccttttcatttaagtaaaaatgtagcattaaggaaatgaaaaactgtggctgcaaaaattctaggagtactctatctcaatgctctccattgagcaggtgataaaatttatccaaacagcaaagttgtgaacaaatcatggaagaagttctgttgttgatatttcaaggacaaaaatatgctgatactattactcattctgtctacagccataccaccctgaacacgcccgatctcatctgatctcggaagctaagcagggtcgggcctggttagtacttggatgggagactattactcattctgttttgatttgtcccaaactttgctgagtcatgtgtgattcttacatgagaaaattttatacatagtacagcaaataaacattttaaaaggtataaaaattaaaagtaaaagatatgtggatccaatgtgggtttgttgttgttgctttgttttgttttgttttgttttgtccatggcctcactggaagtaatctgtcctcctcagaactgcctattgaaaatgtacattcatgagattttatgggtataggtatatgctttggaattcctaggagacaaatcttaaagcatatttttattcctctgcctattacagtctttcatcttcttgtctgctatgatctctgagccttaggtgtataagatatgttgaagatgtatcacctggggctgggaagtaccatgtagcctctggttctcttcaattttattgtctcttgatctctgtagcaatctcagtctggtgcaaagacaccaagtgtaaatcctgaaattgtaatacatacaaggcaccttatgcagactaaaaaaaatgt

SEQ ID NO: 24139 - DNA, 1220 bp, Mus musculus
aatcatcagtcacagcaaaaacggtcatggtaccactttacattgacctaatatgtctgtttataaaccttatgatcttctctatgcagtggaggtaacacgggaggggagagagagagggggaaatgagttgtacatggattgctatggaaacaggagctgaccaatcaatggagagtcatcagaacatacgcctcctcttcactgcagaaatgatgaattgatgtccggatagaacaatccttttggctctgatgccacttgtagtgatagtttctcagcatccattagaagacaaatgtttgttgtgttttttaaaagaatcagacgtgtgagttcttactcttgcaatttccggactccatatgtagacacatactgtctttcctttctataaagtagtctgtacatttctcacatgctctctaagtatggcctaattttcggatgctctaatcctcacgcaatctagctcatattccctcctttcgccttgctgtcccaagctgcctcagtcagctagagtgtagccatttctacaagattaagaaatatatggccggtagtggtggcgcacgccggtaggatttgctgaaggaggcagaggcaggaggatcacgagttcgaggccagcttgggatacacatttggaacaacattatgaactaaccagtaccccggagctcttgactctagctgcatatgtatcaaaagatggcctagtcggccatcactggaaagagaggcccattggacacgcaaactttatatgctccagtacaggggaacgccagggccaaaaagggggagtgggtgggtaggggagtgggggtgggtgggtatgggggacttttggtatagcattggaaatgtaaatgagctaaatacctaataaaaaatggaaaaaaaagaaatatataaataagaaacaattcaaacccctgcctcattttagagctaataaaaaaacagatgaagaaatgtgctggctttagaacaacagagcttaaccatcagaaacatgaagaaatcattgtcgtatgcatctaatctattgaatttagatatgaaaacaactgtttgagggggaaaataaagttaaagaacctttgaagtcagagtctaaactataaacagcagtatattccatttcacaataatctgcttgttgtgagataagccctgtttgggaaagtgtctgagtttctttcaagaaatga

SEQ ID NO: 24140 - DNA, 1169 bp, Mus musculus
ctgctataaaaaatttcagcgtatacagtgatttcaagtgaacagtgttccaagttactgctgcaacttgttgccattgaaaaacttagaacatccaaatactagtttatggaaaaatagtgtgagctctcaattcaaggaatcaatggctagttaacgctctcacaggatttactgggattcctggtttagcttcttgtctcaaggacatttttctatattgtgggaatagaccccaaccctctgaccctctccacaaatgactatgtcaggatctgactacgttttgtatttttgcgttacagttaggtttgacttgacttctagggaaagtagatgaaacaaaccaacaaacaactcgcttattctctcagatccttgctcgttagaattcctaataaatcgtcagagtgcccacgcaggtaggacatggtggtactccagcatctcttgaatcctcccaagaaacttggttttagaattgttgaagaaccacagatggttctgttcagttgctctagtgtaaaagcctaagattggggttctgaattccattgaattccatttgcagaactttgtgtctgaggtcaaacggtgctgaaataaacctgtgaggagaagaaattggagttttctggaagtctctgagctgcccagagagtgaggcaatcaggcattggggctttgattcaggtcttagatgacagaagtacaagcatttcagctatgaagagcaggttgacaggtatacccccaccaggctccagagcaataatgccttttcctgatgaccttctagtgtttattaggttagaaaaaaaagcttaaaaatgattaaattttatccatgttctggaagctgtctttgtttgtctgcctaggtaggccagcattttgggattctcactataccaagatcctgagtttattgactaggtaatgaggcaaagagtatgttttttacttgagggcaatgctgggggtgggtgtttagatcggttagatatggtgttgactctgacacctagttaggtggcaaggctttgggacatatagcgtactcctgtttgcctgtatgactttgactgattgataaaggaaaaagatagaagagcaaagccttttcaagtgagttgtttttgtgtcatttctgcagattttcagaagac

SEQ ID NO: 24141 - DNA, 1166 bp, Mus musculus
aaccacacccataaaatataataaaaataaaattaaatagtgttaaatagcatctcaattattaataagaattcaaagttcaaaggttgttttaaaatttttggtttagtttagttttgatcttgagatcggatgtagctcagactagtcctgagctcttttgtctccacctcccaaatgctgggataacaagtctgtggccccatgcccatgtcacatataactggaatagttttgtgaagaactttcaaagctgttaacgtttgagacaattataaagtattgctatgagtcattactagttagaaaaagtccataatataataaaatgtgggaatgtctgcatcaggaagaaaaaggatttctatttaatgacttttttcatggattaaacaccgtatattctcatttagtgttatgaagaaactaaaattcaaagaaaatggtgactcgttttattcacaactagcaagtgtggctacttgaggcagatccaggctgcttgactttaatgtccattttgtttttccagctttactctgcttcccttgtatctgctgatggagtgtgtgtgcctgaataatcatggcaatgatgaaagctaatctttcaggtcctcagccagataccatcacgacgcacagtacacttattattcttccccttttctttctaaacatttcatgttgatctgcctaccttttccttatgaaaatgctatgagtcagatggaaaacatgaacgaacagatatgatcacataactaaatattacataccacaagctagctttcccccacctcaggtttcttatctgggagaaagtgctatgaagaatattactggcttatcatgcatttcaaaagtgaaataattcttcataaaattaaaattcttaattttaatgaaacagatggtagtcttcatagcatgtttcatttaattttttagaataggcaattgatttcaggtcagttgatgaatttcctgctttatacagaaaatatctcagaaaaagccactatggaaacatttaagatatgtttagatcaatctgaggtccgagtaaagacacaccacatgtcttataaatcaccatgagatgctgcattttgcaaaggtctggagagtgttaattcttcctgcagagatataatagagtgcaga

SEQ ID NO: 24142 - DNA, 1110 bp, Mus musculus
cttgaccttttccctgtcaccaaatccactgtcaggacaccattataggacactactgagcatgtagatttcatttctttaacgggaactacattagttcatccagcactcttttatttctttaactgtctgtggaccaagttcttctgcttacttttggccttgatcatcaagaaatctctgttcctgctcttggtgttgccactataagtaggaaagtaatttaggcattgtacttttgtgctttgtgcttaaattcagggactagcacctatgataagcaaatgtcctatcaatgagctccccgaaacctaacatatagatttgtgagtttcttattgtgattttaaaaataacttctctcaactttaaagttttgtgtgcaaaatataaagtaggatttccagtactaataatttctgtgttcatacaatgattaatagtttacattgtttacacttattttatatatttttaagcatgtgtctgggaggcaaaaacaactgctttgtcgctctctttcaaatatctagttcaaggagatagagtaactcatcctacatcaataagtttgaattgactgaacctgaaattgaaatttagatttaccccccttctatgatgtatggatttccctgggaggtacaatgtttctcccttgaagtgtaacttcattaattaatatttaatatgtgtatgaatatatgcttccttatacagtattgaatttgaggtaaaatttgtgattttatttttaattggtgaagtctcctagatttcctaattaaaaataacaagaaatatgttacctttatttgtagaatttctgatgtcactatagaaaagctattttcttatatataaacatagtatttcagaattaaccttttcaataataatatttataattggggagggataaaaatataagaaaatccctttgagtcaatcattttccttggacagtagtgtactttgaaaacaatggttcatttttgtttactcactattacgcttgcttattcaaagtgatttatgtttgtttttgagaagtttttaaaaggtgtttctctgaaataaattgtattttaaataggtgcggactagata

SEQ ID NO: 24143 - DNA, 1108 bp, Mus musculus
gcactctctgatgttcttccaaggtataaagtctctaatgtccattgaggtagaaatcagtagaatcagattgttgaaattatgtggttactagggggaaacaattaaaaattagaaacaaaagtatttagaaagtcaaatgtctgtggtaccattttttaacaaagcatcctggttagaaatgagtaacggcattaggagctcccacagattgttctgcagtgtctcagtttctaaacctacattaggaatgtaagacaaccaagctgcattgaaggaaacaattgagtctttttgaaatccaggaactataatactatgtgaccctcctatgcagtatgtttgattttgtgatccatttattgaaaccacatcatctgccagattctatatagatttaatctaatattttcttcctgacattacttgttcacctcaggaatatttaacaaggaacacaagacccaagactgagagctagtattcagactttctttctgactcccagactgctctctctcttcacgattactctgtgaaatccttcatagaagacttaagcagtgcaagttacaacaaatgggacagagggtctgtgcaaacacaccagagaaaaaggaacagggagagaaattgtttcttctaaaggattcactgagaacagtctcatattgtgttggatacacttctctggactcctctattattttatagtatcctagagtcttagttaaggtttctattgctgtgcttatacaccatgaccacacccatggcaactcttataagggaaaacatttactatgggctggcttacaattcagaggtttagatcattatcagcgtgatggaaagcatggtgctggagggttacctgacagttctacatatcgatccacaggcagcataagtagactgccacactagggctggcttgagcatgtaagaccttaaagcctacctctgcactcatatgcttcctccaacaaagccacgcctactccaacaaggccacacctcctaataatgccactcgctatgggccaaacacatacatgagtctatgtggtcattcctattcaaaccatcacacacagtattttctatg

SEQ ID NO: 24144 - DNA, 1099 bp, Mus musculus
atcatctttttcttaagtctacattgaaataattgaaaaactacccaagttttactttcatccatcagttgtatttcacttacacatattatagaagtaaaatttatcattatcattcaaattttctaagaattaaaaaatcatttttctaggaattgaacagactgcatttgtcataaactcaaattttgaaaacttgtttgggatgaattttttcctgatatcaaattttcaaaaagatgttccgcaggaaagccatccgttatgtcatttggggagtttggcccagagggcagtcatgttgaccccatctgcagaggttggctaaactagaatcttggactaagtaaatcccattcatcaaggtccacataaagtaaagtaggtggggagcagggggacagatggtagggtcgacagcaagaaagttgttgttgacattgatgtagacccttcttcttgccagagtgactccatggacttcttttggcatgaaagcctaagccaaagctatcatcttaatggaaggtgagctgcaggcacactggagagatctagacacagtaggtatctaggattggcttagattctgtctatcagcttgactgccatacctatttgattgatgtgcagtggggcctgaaagtgctgttttgatgttaaggattgtgtcataaggttcctgatatggtgcacatgtctggatgagattggacattgactgtctttgcctatgccaagcaacaccagacttgagtgcattattctgtggatcagtagcagatggtgagtgcacacatttggagggggtgtgccttcaaacacaatatggagccaacaaacttagaaggttagtgcatgtcttgactttggcagctatttttaaacaatgacaaaaatttcccgtattagctatttttactttgagaaaaactaaacacattcgtgttctaggcaacagaagtatactaagcaagtatactattctctgtgttggtcatgtcgggtggagagagctcttggcattggctaaattggccaagtgagtaattttggattgtatatactcaaacttggtaccaatataattgttaacaat

SEQ ID NO: 24145 - DNA, 1115 bp, Mus musculus
gatagtcactattctggattcatgaaaaaagtgaggaaagattataggagaggtaaaatttaaatatagaaaaaagtactgtgttgagctcagttagtaattgtcctaatagttaacaatactgctgatcatcaaaaacacaattactgcttgcaaggatggtagagtttttatagttgttgtgctaagattagtaattagttcctagaagtatctagatgggaaatcttagtctattaaagaatggcagtgagtgctccaggactctgcacggtggtggcctgtgttcaatgtagaaggcttggtagtagaatgagcacctctgctgtagaaactacaaggtgaactggatgaatgagataataataagtcatttagagattggtgaatccaatgttatgagttgtgaaaacataatggatgaaagaaaattcaaacctgaatggaagggcatgtttagaaatgatgaatttagaagtaaggaagtaaggtccatgcagactactggagcctagatttgcaaagttttatgggaaagctgttgagaaaattaaagaaagactttgtgaatagaaaactcataggcctagcatagaatggcatgcctctacccacaatggatgttaacatctgcatactaatacttttttcctgtacttgtaggtaaccatttccactgattagtgggcacatgtgttataccgttggacgctgtttcacattctctttatgtctgggtgagggaactgtagatgtacattagtatgtatttgttgacacatctctgcatttacctgtctgtcaatgggactagtaggacatggaatttttcatgggcaagaactccgagtcaaagccgtgcccttggtgctgctgctgctgctgcaactgctgtagctttctcattttagtctgagggtacaggacatcttgttagttccaacctaactttggaaaatagaagttgtatccgatataattcagaaagacctgtcgaatgtttaccactgttctggtagccaatagatatagactctttaaaatatgtataattttccattgtacagccatagtctatatctcttttctgtctaaagacactgttacattattct

SEQ ID NO: 24146 - DNA, 1169 bp, Mus musculus
atactgcttccagatagaaagaatagaaggcaactaaagttatatttgaaagagaggaaggatattttcttcatattttttttcttaatttttattattttaaagtattgcctgggttgctaagggcctccgaggcccgcccaccctgctgtaatttcaactgctgctctgttttcgatgcatagatctttgacttctagcaggcttcagtggagcgagccactgaacagttatcacctatctatctagaattctgtcctttatcatgggaggggtgtgctcttttacaagcagatttcttccttctccaaaatttcactgagctcttaggattctagagttccatgagccttgctttgtttcctctggtgaaacactagtggtccagacaccttgacacaggggtctgtttccttcatggtcctcactcctctcccctgcctgctcaccctctcagagcactgtgtgggcgtcactctgagaagcctgttacaaaccacagtgcattgatgccaaaactcctcccttcctttcacggcctctgactgcccaccatagctcacagggctgagttaggatggtcattctttagttgattgttgactcttgcttttttggaggaattaacagtttctctgtgctaacatccaactttcaaaaggccatgaatctccagcatcatcctggatgctgctctttctagttgggatttctctctttggtgttgatcaagaaatcataagattttccaattatatacagagtcctgaaggggttccagcttaaaaaaaaaaaaaacgggacttttaaaacctagataatactcactaagtaattttatgactggccatgttttagcacacttaaaaggaaaagtaactattccaataacacagaaacacaaaactacatttttttttaaaaaggagattttctttttaaattgctctacattttaaatcagttttcttcctaattttcctgttagcattttatttacaaaaaaaaaaaatgcagcaaatgagggaaaattttccaaggcaagcaactctataatgactaaattggttttattcatatattttagacaattggttaacttgaatcttttccataagttctttgtgatgtttagtagtttgtgcaactggagtatttgtggcgttgaa

SEQ ID NO: 24147 - DNA, 1178 bp, Mus musculus
agcctcctgtttttgtaagctgacacctgtcaagagcaccaacagcccgaacaataactaatgcagcaaaaataatggtcagaaacactatagtatatatttgagagattaggaagtgatttttcttcttttattcattaaaaaaaacacacacacaaaaacaaaacaaaacaaaacaaaaaaacagcgtgcgtaccccctccccaacacatttcagaaaacctgcatctcattttacagttagatagttttagtttttgtgactatagattaggaaatgttctggaattgaagctggtagcaaacacatttttttttctgcactggacattaggacatgtgtgcatggatgcgattccttcaaagaaagtgaaacatggcaaagcaaagggacaatactttcacacattaaaacagttgtctgctatctgtaaaccttgatttaagcataattataacttcatagaaatctgaaactggaggaatgtgtattttatagtttgtttgttgatttgttttcctttatgtctgtcttctcaagctagggaaatattttgattctctgatttgatgctgtccccgtatgtcaggcaactgccctctaccccagagtagtcttctgccccttagaaaagccttcagttttccatcaaggggtcatttctcatggaagtcttaccttccttttctgctgttgcttagagctttgaaaatgaaagaatttctgcactttggggattggaatagttaaaacagagcatagtccttggaggaaaaactatctttacctgaactgacaggtctggggccaaagaatggagccaaccactgataaaagtcattgattttatacttcatatcatcatggcctcctcaaatcctttttggaataaagctggggacaaatttattttcttttctttggatgtttcttgtgagtatccaggacagaattcccagaaaggaaaaggaagacgcattagtaaaaatactcacggcatctgatcttcccactttcacagtagtggggacttcagtcatggccacttaaagctctctatggtcctaaggcccctccctggcacagagatggtagtaagaaggacatctccaggctgccagcactcgcctatccatgcctagcaacacaaaagaagaaaacagcaaattaagactgg

SEQ ID NO: 24148 - DNA, 1134 bp, Mus musculus
aagagtgaggaagctggctgatgtgacatgaagtcttcatcttggctcacaagaagacagaaactcccccactacagcatatcccagtgtgcctggggtcatagtgtctgtgttcagatatcctgtcactctgagcatacttttctatcatggtaagacctagatctctgggtaaccaaagaggaaggccatgcatgtggtagagccctgtgaggtggcataagggaacagtgcaataaacactgcccgccatgaggggaaaggcttattctgacacaaggtaggccaactggaaaactggagaaagggttggacatgtcctcagagtccacaagctgctccatcctagaccatccttaagcagagaccttgatatagtgcctaaaagttaaaagttgttgctccccccccccaacttttctgtgttcaatttacatttattgcctttttaaatcttagaagcaatcggggttgacagcgctttcgtaattactaatgagaggatcttgtgctaccggaagagcaatagactgtgtggcgactcaaacaagtgtggggatgctgaggggctcctccagagtcccggatgacagctcttggaaacccttgtttgctaagaatcacagcccttgtaaacacctaatgttgagtttctttgaacactgtcccacctgaggggattcgtttggaaagcttccatttcaggcctctttaacagagtatcaatctgatgctttctccttcctccttatgataggtctcattctactttcccatgtcagagtttctttttatatatacaaaagtgccagccttgctagtttaaccctacagagaccattcagaactaacttaagcagcaacttaggagaactcaaagcattatctgtatttcaagcaggctcctgaatcagatctcatagcagatgcctgggaatgcgtggtgggaaagcactaacaggacatggagacacccaaccaaagctatgagaggaaacagttgacctttaaaacagtctcaccttaactttccttgaggcattggggacaagtttttcttgaaacttgcatatccactccagttccttcaccaaagattttcttctccagagcccagcctcctttctcccaggc

SEQ ID NO: 24149 - DNA, 1114 bp, Mus musculus
ttgttcttattttatcacagtgaggtgagcaaggcaagttgcctcgttctcccaactcggtgcttctgcttgtggggtgggggtggggcggtatagacaagggtgcactcctaaagctctctggtgctgaagggcctcaaggttgagtttctttcagaaaatgtgtatggcacactctcaagtgcacacgtgaacggtgtcatgcgcactatttttaaaggacaagggaaggggctctgaagtgggttttgctttctctcatgacatttgatttccctggtgccttattcctattctatgctggcactcacatgcccacaggaacacacgctgatgtcagccccaggagtgaggacctctaggtgacagttgagcatgtggggaccatcggatattggggtcagttggtaggggaggaactagatggctgaaaatacacagggactgcacaagcccatcacagtcaagattagtaatgctcatatgtgagtatgtgcaatacatgcacacacaaacacacacacagacacacacagagatgcacacacaaacaccaaatacactcttcttcctctgaacattgcttccttcttcatttcctgtctttgccttctcataaaggtgctgcttgctgctgctgctgaggtgcccggagtccagaatgcccagtaatcactcaggcacaagcctggcactgccacgttcagtccttggcaagaccaaaccctggtttctcttgcctggggctgaaaaccgtcagatttttctcatcaaaaaaaaaaaaaaaaagttatccaaggaatcagtggattatagttactctgcattaaaaatgcactttaaaaataaataaaagctccagactgtttaaaacacacagagggaacaggagaaagataaacgtgctagtgtctgaacccagttcagcatatctccagttgaaacagtatacactatattatgtataaatgtatacacacttctatatatgtccacatatatgcggtgtgtgtattatacaggtataggtgtgtgtgcacgcacacaggtgcacatagcatatcaagtgttcattacaaatccagatgctcatttcacaaacagcagcagagga

SEQ ID NO: 24150 - DNA, 1180 bp, Mus musculus
ttgccagattgcaggaagcagctgagaaaattttgggacctgagggtctgttagtccgacaacttgctcttgaaaacgccaattcagcatgtagggctgctctgagaggtaaaaccaagagtttagatataaatggtatgatcaagctttgtaatgaggtagatgtgttttctcaacaagtttctaagtctattaacctggccattggggctgctctaactccagctccaagattggtgccaagccccattggcccaagttaaaagtagacatctgtgtcctcacattgggtatagatgccgcctggggcacccctgattattatatgcctcaattaacagcagttaacacaggtaaatttgagccccctcctcaaaagacgttttttctcatcatcggccgagtgtccagacttttacaaggcctaatggtgactcctacagtggttgacaccgactaccatggggagataaaaatcttagtcaccgccacgcaggaaccacttacccttagggctagagagcgcatagcccaagccttaccactcccactattcggccatttcccttatatgaaagaggagcgaggaccttcctctttgggatcctcggaagtctactgggcacagaaaataaccgattcatggcccatgccgactttgtttctagaggacaaacagttcaaagggctcctagataccagggcagatgtgacagtaattccctcaacacattggcctgcagcctggcccttacagcccactaagggatggtgtaatccactgatcataaaatttactgctaagaggaggaacttagaggcttgagaaagttctcggctctctcacctggggcctaagattgtatcaagataactatgacaatggcctgacctttaaaaccatccctaacaatcataaaggatccataggacttccaggcacccgcccccctgttcctgccccagggtgtgctacgaccctgtttcagcccactctccctgcggggaggcccccctcttccactgatttactgtggtctatattgaatgcttctgctttagccttgttgcataagacacaaagagataatgcgtcagaatctgaagattgttggatgtgcttttctgcttccctgcacttttatgagggcatagccttatttgaaaattttaccctgct

SEQ ID NO: 24151 - DNA, 1240 bp, Mus musculus
acaggtggctgtttacaggcatgcccagttgagttatagagcccagacccaatccccgaggcaagccttcccacaagagtatatagtagtagtctccatccaagagaagatgtagagattggctgagacagtacatgcgtgtgagctttgtaagcctccgtatgttatggaggttgtgccggggccgctaatgctattctcactagtgggagagaagcttcgtttgccagaagagcatttcctagtatcaggtgcctttgcactggctctgggaatgctctgagcggatgagtgaccactgtggatttcttagcctccagacttgagaggttgtgtctatcagagcacccctcgagccttgcccagcaaggctgtttgttattaccattggtaacctctccagtaggataggtagcctgggttctagatttcgtagtcttcacttcctcgttctctttgacttccttctctcaggtaccaggaagactttgacccgcttgtaagagggtgctcctgttactgctgtaagaaccacactcgtgcgtatatccaccatcttctgatgaccaacgagctgctggctggtgtcctccttatgatgcacaactttgagcactactttggatttttctgctccatccgagaagcactaaagaatgacacactggcacagctgaaagaactcatttgcagacagatgttttgagaactggaaaatataagcctgtctcatcttcagaaacagtgaaatggcagagatctgagctctcagcggttacggtgggaccaaagagcatctgccccaccctgcccacaggagtgtggaggaaggccttctgcagatttcttggcccatatcgatcagaactgtgactttatttttctaggtttattcttctagtgagattcctttagttgaagacaaaagtattagatatgagagagccttgaaaggatttgaggttttaggaaccagtgagatgggtgaggcccgagtggagatggctgtcatagctggaagcacagctattccctggagaagtcatctagctgattccacaggcttttatttgtttctcctcatgctctcaggggctttgggccatacctttgtcttcagggctaccacaacaactaccacttagggttctcctgccttaaacatgttcatatgtcccaggaatatggggctcaggccatgcttttgtgatccgttgacgtcatttggctacaagtcttt

SEQ ID NO: 24152 - DNA, 1867 bp, Mus musculus
acatgtactgtttctgggattccaaagatcagagataatttgtgagaccttaaatttgccttggccttgttgctccgtagaggggaaatgggaactgtgcacgcagctttttgcagttggtttctaagagacagtctacaatcagacctttgtgctttatgatcttaagatgtttgtgggattctggcattctccagacagtagatttttttcacttggagtcttcaaaaaggcaagccctttgtgagtgggttgtcccaagcatccgtggataagctagcagtcccttgaccatgggagcaagaactccccaccaaagtgactccagataagcaggtcctcttgtcctacatctaagcttcataaagatccctccctgttcccatcctttatgttactgccatactgtcatgtatattcccaggaaagaagacagagcttgcttctgaaaaactcaagggcaaacactagggatgaagactggaaggaaggaggaattccttccttggtagaaaagtgttttaggagcttacaaagtactgtgtaggtcaccctcactgcctcgtcggcaagccactctgacactgctaaaatgaagccttaaatgtgttttggggacaatgctgtctgctccctcaaccacatagttgctaggatattgtaaatctctgctctcccagtggcattttcctctgatgaatgcactgactgtttgttgtccactgtaccgcctgcctggaaggcaactgctgtaagcttgctctcttacgcaatactccttggtactctaatatttttagcaaaagaaaactttgtattcaagaacttcccactgccagaaaacacaattccagtaagagtctatgtaatactgatatctgcctgcctgacttccttcttttgggtaggacatcagcttttattattaagctcaattgacagaagtgaaaacttgtagaagcacagctttaaccatgacgtctaataaaagcaatgctccacgcactcactcgttgctttaaactagccgagtagatttctgtgacggaacttcccgttagccatattttggtaccctgcctttcgaaaaggacacttctcaaacaagcagcgggttcgagttgtgctgcttgaagcctggtttgctcagcgtaactttgcaggtgaactgtttcatgttaaacacgcagaggccgtgtggtgggaatgaaagccatgctgactaaactgaacaccaaatgaaactcagtgtgttcttgtgagtgtttgctgagattcatggaactgtccagaagcagcggccagactgagtcctgttgctgtgagctggctctgagcattccactgtaggaacagcaggctgaatggtgagcagagcacatggctctcgccacattgggcttgagacttctaagtagtggagatgtcctggtgtcgcgtttcacctttaaaaacccctacttaaaaggcaaagcttcaaacccagagctagtctgctctaatggtacaaacgaaagcctttcaggcagagccactgacaagatgccatgtcagagcagccaactcaagcttgtgccagagtctgggtgattggatgacgtgtgatgtctttggggccttttcgtgatccgatttctgtgtctgatggtagagtaagtgaatcctgggaatgactttaatattaaattcagtatttgatatggatggcctacaacatgaagtaggattcccgaagccaagctgaggctgagggctgggctctactctttttgtccctttgtctacatcttagcctttaaaactggaattttacaaactcctgccttttgtgcaaaataatgtgaccacattgtttaaaaggaaaata

SEQ ID NO: 24153 - DNA, 2699 bp, Mus musculus
tagtttgatcattgagtgtcaatagcaggcaaaattcagaaatgaaatgtttgattttgttttagtccatttgcacatttccacttcaaaagaaaattgggcttacctgcgatttaccagttgatactccatattaataaataaactatcatacatcttgaaaattattttctataggtaaatttgtattcttttctttttcaggatccagtgaaagatggcgaggcaaagatcaaggccgactatgcacagcttcttgaagatatgcagaatgcattccgtagccttgaagactagaactgtgatttcttccctcttccacggcaagctcatacgtgtatattttcctgaatttctcatctccaacccttagcttccatattgtgcagctttgagactagtgcctatgtgtgttcttgttcattttgctgtttctttggtaggtcttataaaacaaacattcctttgttccagtgtttgaaggagctagctcccttacctttatctgaagtggtgaatgtagtgcatatgatatacattgtaagatacacattgtaacatgatccatactgtaaacttgtatgtaaggtgactaccccttccctcatctccagtaaactgtaaacaggactactgcatgtactctgttgggaatggaaggccagaactccataccgtggatggatgggtacttaggaaacaactcagcatttgtagtcagaccacttgtaacttagtggtttgttgagtaaccattttgcaggaaatacttccatttaaaaacataaaagattaatgttccaattatttgtatcaatcaggaccatttttgtggggcacttgggaactatttgtttttcaaacagacatttgcaagactgaacataatagataaatcagttacctctgaaaatgtgaaagaaaggaaaaaaaaaagaaccaggtggtcaaacttaaattgacatcatcttgttaaagcatattttatttcactaagagaaatttaatatcagagacttttatatactcaattactagaaaaccttttttttaagtacaatttaaaaatcattgaaaatgtgatccacatcatagccattcttttcctcagacttagtcagacaagcttctcagagtggtgggatggggattagaataccacagacactctgcagtgcctgcaggcagtcggccccaggacaaccactgctgtaggagtttggggccagggtggcatggttttcacaaggtacacgtgtcacgtgtttgtttgcctgttgacattctgaaaacagcaagtttaccaattgcagaaaatactttctgttttctctttcacatgctcagaaagcttctcaaaggtatctggtcacagcagcttccttcctgttatagaggtaaaaggtgttcttatatttaactggtaacaaaagaaaaaagaaaaaagaaaagatcaatttttgtcttgatgtttcagtgtgtttaaataataattcccatacttgcttaataaggctcgcttcagagagcttggcgagcgagctccctgttcactctctccagctgatagtgctgtcagtatacacttcagatgtaatgtgtaaatccttgctggtgcatgtctacacagtggactgctgctgaagaaggatattcttccaattattgaacactgttgacagatatggattatgcaatggcttgttgggaggtggattagtggtgctgcttaatcggtttgcttccaatgtggcttcgtatccaggagccctgactagcggagatgagaaagatttcaaaacctgtctgcttatacctaccagcaacctaggcttgtgatcagaatgaatgatcccaagaaactacttgaccaagtttgtttttgttgtcctggattcgagatgtgttttcttccttgctctaagactgttgatgtatgagtgtgaagaggctacagaaacaatgcccagattttcactgtaactttccctttgcccacactgtagaacttgagattgttcactgatagtgcgtctttagtaaggatgtgttaaaatatagcagtctttttaaaagattatgcagttctctatttattgtgctgtgcctggtcctaagtgcagccggttaaacaagtttcatatgtatttttccagtgttaaatctcatacctattccctttggaaacttccatcctgaacaatgaatagaagaggctatataaattgcctccttatccttaagatttcactatctttatgttaagagtaatgtataattattaaaatctatgaaaaataaaaagtggatttaaattaacttttctttccctttttattctttttgtgggggaaggcggggtgagagctctgagaaaacattacatgtgtattttaacttaatgttgcagtatgtccttttggaagtgttttactgtatgtgtattacacgcatcttgaggttggattgtggcattcacaaccgtctgtacagcatcctacagtcacagcacggggcagttgggaaatacagtcagcagaatattttcccgttataagtgagttaactttttcaaagttagaggcaatccataatgctcatttcaatttttgtcaatttaactaagtcttgtaatggaaacaattttagatctcatataaccatttaccaatggccattgttgctttccagtatgttac

SEQ ID NO: 24154 - DNA, 3297 bp, Mus musculus
gaataggcaccgatccttctgatctctgccacctgccttgcaaatggaggaattatgttaagagatttactgataggaatcgactaacctttgttaaatattgattgttgatatatatgcgaaatgtctgagttggctactcttgaccagttttaactacctgtggttaagacttgaaagttgatgaaagttgtcttatatatgtgtctgtgtatgtataccctgtatctcaggcatgtccagatcagcaatgagtcagcgattgacttttaccggaagtttggctttgagattatcgagacaaagaagaactactataagaggatagagcctgcagacgcgcatgtgcttcagaaaaacctcaaagtcccatctggtcagaatgcagagacacagaagacagacaactgaacaaatcacaaatgaactttcttgcacttgcttgtcgccaaataaaagaaagacccattggttcccttcccccctttcttccactttcctcctttgttattcctttttttttttctttcctcttaaagtttttaatactttcatggactcttaaaaatgatcatgtgttggattgttttagttctcttacttttgtgaggtggttggattgaaggaggagaagatagatctgtatagtttcacagttaagatgtcccgaaaattgggtggcagatgatttcaaatttttagctgaatttttttaaaaaataaaaacaaaccaacatcctgctttcacattgaagggcagagcctactatattgtttatttcaaaagacaaaaagcagcagcaataccttgctctctaattcatagacaagcttagtgtatctgtggtactttgagttatacagactgtctgtggggtgctaatccccagcattgccttcactctacccttagtcctttgagcactctcaggagttggaccattgttatccttgtgagaaaataccaagcttatttaggtttttaaagcaatttttttctatttgctgattggcggggcagtttgtgtaggtagtaagtattaaactttggtcaaagtatttcagttaaactgctttttttgctgaggaatggacttcttgttagcaggttttttttgttttttccttctttcctgctgttaatcttgttactagaggcattaactggtagagtgtgggctggtgaaattaactgttttaatatcccagctagagatatggcctttaactgacctaaagaagattgttataattgattttttttcctcttgtttttcagtaagcccaataatagtgtaaccttataaatggagttatgcccttataagtcaatatccctaaataaacctgaagcaagtgttttctcttggacgaacagaattgcattacgtaaaaggcttagatggacttgtaacacattaagtgtatttaatgtcaactaatacagattgttaaaagtgtggtcattgagtgtttaataatatatgaaagaatttctagacagtatttttgaaaagaacattgttatgctattgcttatctgttggagaacatcccaggttagcttccactctgtgcctacaatgttgagtttaaagatttggaataagaggaatcagtagaaaaattccttctattcttggaacaatagacgtataaagtattaatacaaatatcactgtgaccttcagctgacaggtttggttaagaccagaccatcttcaggcacactgggagtggctctgatggattgagaactgtaatgtggagacatgtgagatacgttttgctcacattgtcctgtctcaaatatatggaatttcttagattgttagtagtcatcagtggctcaagaaatgttcttgttagactttaaaacagtacagattgtgtgttttctttcatttgactttaaaaggaagtttaatacatcatattagtaaaattgtggtatgaaagtatcatttccaaataggttgaatgataaaattatctcacaagatgataaaacaccttataactcttacgtttttatttgagaatgtgaaagtatgtaaaatggacttgagtagtcttgagtgccaagaatatagataaggggtgggatggatggatggatggatggatggatggatggatggatggatgggcgggctagtgaaattgtagaaataccatgcttgtttcttgggtatcagtttcctaaacagtccaaatctaagctcagaagtttagtgttaagcacctttactttaatggataagcttcagcgtgctcttgccaagagaagagggcataaataatagtaaaattagtttgaaaaacgtcagcaattttgtaaacttcctgatagcaaaatagattttgatatataaaagagttttctgagatgacactgcctctatttctataaccatttcacttggactaagtagtcctatgaatgtatccctaaatgtggtttttgaaaaccgaatagctgcctcacaacaattaagtacatgttatttaaagaggaagaacaaataataaagattgatttgaatgtgtaggctccctattatagcttctttttccacactagtcagtgatttaacctaaaatttaaatgtatgggtcaattgtcctgtatcaaagttacagtaaataattccatccacttacataaggagaagatgtggaaaatgtagaaactgggactagtccatgtacctgtgagtcaagaaatactaaagtaatgccccagttgagtttgtgggtttgggttttgatttgtttgggctttctctttgtttttaacattataaaaataatctttgaggtaaaactaattctattaactggaagatacccagctatcttcatcattttttcaggaaagatcatttttattgtggggtaaataggttaaaattattctgtatgctatttgaatttaggttctaaagtaaagaatccgtagaggaatctatgcaatatgtaatttgtcaagattaattttcatctggggaaagaagttgctaagtgtctccaaagcaggtcactcaataactgaaagtcctccaaaaagagaactagtgggaagcatggtgtgtggtggtggaaaagaaaaactccctcagtttttggagggaataactttaaagatacttaagtggctacgtttacttggtgcagttaagaattaaacttgtcaattttaatgttgctgttacatctaaaataaacttatgtgatgttctggtagtgatctgtctgtaactgtcatgaaatcattattgtgctgaattttacagt

SEQ ID NO: 24155 - DNA, 1159 bp, Mus musculus
ccgtggcatcagactacagtgtctgcgctggctgccaaccagtctgttcccctttgtcttcccgctgccatttctgctcaaaacattctcgaactttctacttctgaaagccaatcaagtgggctgggtgccactggtggctcagtggtcaccgtttcagttggccctgaccctcacccacatcgttcctcgaatacatgcctaaatgatcaaaatgcttcagaaaataacaatgcacaggagagccccaaatcatcaaagaaaacagtcacgtgtgtctcaggcatctcctccagtacttcagcagctgcccccgaagtgcaccatgaaaacaagtccagcccggcaatgcagggctccagtgcagattcgcaaaacacccttgtgtcagttaccaccacagtgtgctcccagcctcccagatctacaggtggctcttctccagtgagtggtagcaagactgtagactcaccaagtacagccacagtggtggtgccagcccatgctgcagtagcgaagagtaccctcccagtgagcagtctctctgcaaaccctttggagggtggttggactctctcttgttctctgccttcttcaagtgtcagtgcttcagaactaaaaaacatcagcagccttacccgaatctcttcagccggaaacacacagacaacgtggactacactgcatctggccggaaacactattcagcctttaagccagccaccatcttctgctgcgactccagcactaaatgagtgtggtaccagccctaccccaaacaaccacaagcacgtggctacagctatcaccctaaataattcccctccaacagatgggcagccagttgagcaagtagtggtgactttgccttcgtgtccacccttacctatgcaaccactaattgcccagccacaagttaagtctcagcctcccaaaaatatccttcctttgaattcagcaatgcaagtgattcagatggctcagccagttgggtcaggtgtcactgcagctccagctaaccaaaatgtcatcattcttcagccaccaagcacaaccccatgcccaacaatgatgagggcagaggtttccaaccaaacagtaggtcaacagattgtcatcatacaggcggctaatcagaacccattgccactcctctctg

SEQ ID NO: 24156 - DNA, 1737 bp, Mus musculus
agatggccccagaataaacagctcagcagagccatcatgcagtgatggactgctggacagcctccctgttggcctatcgtctgttgctgtgtcccaggcaaagaatgttagtatttctgcttcacattctttggatgttctgaattctgaatcagtaacccctgactctggtccccaatctaagtcaacagaagactgtagctcaccttcccacgaatctgaaacaaacgaacaacttgtattggcgccagcaaaacccaaagattctactcctattttacaagagacatctcagggtacaccaccgtgttctgtagcgttgtccaatgatatgaaatcctgtacttcagccaacgtgttgactccatctcctatcgaatcccagagtttggtttctcaggtttctggtctgtcatccactacgagcacttcaagcactgactgtatttctgaggtagaaattgtggcagaaccttgcccagttcagcaggattcattggacaccatgcagacagcagggtctttaaaagggcaaggactaactatgttgctgtcggatcttgctaaagaaaaggaccttcagaggtcatctctctcagtccagatggagcatcctgacttttctccagaaagttctaagataggtgattctaatgttgatttgcctcccaagcaggaactgctactgatgagcgatgacagagacccgccacagccccactcctgcctccctgatcaggaggttctccatgggtctttgctcaccagtagacaggctgactctcctctgtcaaccagctctggcagtagtcgtagtttctccgttgcatccatgcttcctgaaacagctcgagaagatgtgacgagcagtacaacatctaacacgtgtgatggctgcacctttgcagagcaaactgacattgtggcccttgctgcaagagccatcttggaccaggagagcattgagaagggaagacttggcacacaggctgatgtgaaggaggttactccaaagccttctgaaacctctttagagggagaccagccctttaaaccacagatccacaaggagacatgcacgggacaggctgacccaacaccaagtgaatttaactctcaggattctgtggaagtgacagtcgataggcctcttgaaaaaccaagctgttctctgggaattaaaggatcaaatgcccccatacaggtgtcagcccctcagccaccaagtctcacccatcagaatagcatcagcagccatcctctggtcagttgcacaggtctatcgcagagctcagatcaaacttctaatcctgtgacggttaatatgactgtttcatccagttcttatggcagccagcctcctgtgccacctctgatgacagaatatccccaggaacagctgaccagcatgactagcgccataccaaacccacaggttcaagaaccgctttcaaagcccagtcatgaaagtcgtaaagattctgcaaagcgcactgtgcaagatgatcttttactaaattcagccaaacgtcagaagcactgccagccagcccctctcaggcttgaaagtatgcccctgatgagcaggactccagacaacattcctgatcaaacccaaatgatggcgagtcagatcacacctaactcttcaaactcagttgtacctgttagcaacccagcacatggagatggccttgcacggttatttccacctagtaacaactttgtggctcctcc

SEQ ID NO: 24157 - DNA, 2024 bp, Mus musculus
tgtgtcatatacgcatgtgtatttatcatgttgcacatggtaaatggatataatcttgtctcagttggaaatgagcaaattggaaatgaccatagaacggctgtctgcaaatgggcagttgaggcttgctctaaagcaccggttctcagttctcctaacacttcaccctttaactcggttcctcatgttgtggtgactcccaaccataaaattagtttccttgctatttaattttgctactcttacgaattgtaatataaatatgtgattttgggtggtcttaggtgacccctgtgaaagagtcattcaacccccaaaggctgagagcccctgttctaaagcataggaaaacatactgtagatttttcttttttattctttcaaacattacatcccaactgcagttctccagccccatccacctcccctcttccccagatacagtccagcgtgaaaagttacacagggctgggcacaaaccctcatgtccagccgcatgaggtgacccaatggaaggaaagggtccccgctgtagatatttttttaaccccaacgaattagtaatgaattttaaacatatactgaatcttgagaagttaaagctaagaagaaatttgtactgaatctgttttaaacgtttaaactcagctttcaattgttgctacactctgttaaaaactgaatagagggagaggtacacagaactgcccgcccgttggctgggtggaagcaagcccaaggatcagcaaggtttcagttttgaaggttggtttgtttggttttttgtttttgtttttgttttgtttgtttgctttctttttatactaaaaaggccacctgacgcctgatcagagcagttacccctgaatgcctttctaaaggctcagcgaaaggatcctttatgcctggtcacatgtctttaccaaacccctctgtttctgctgcccttgaaaatcacccttcttggtgaactaggcaaacctgtgtttctttcctgcatagcattcccgcggggtagaagagaacttcacaagttcattacttaatgtgtgaacaccacagtaggaaagctactgagggaaagagaacatttatcagttgcttttaggcaacaaaaattcatcattttctttgtacttgaaaggtccaatctgccagcttctctaagggcagtgttctgtatagccagtcacccccatcccaccagctctttttggtagctgtctgcttgtcacatatgtatcctcacatcatggtggctcttgagttctgaaggacagacttgctcagtttgaactaaggtagcatggcgtggacagagttcaggtttaggttgtgtttctgagacagggatcttgccacgttctccagactggcctagaattcctgggcataaggaggccttctacctcagcctcctaggttgctgagactagaggtgcactcttccaccatgctgagaagcgccacctgagacagcagtgtaagagtcctagaacctgttgccattttgggttattcttgtttggctggctgactgcagctcagctctgccctgagagagcatcactgtgccagggctctcatggtgagaatactgtactgtgatgctgtctggctatcagccttttgtgaccatctagagagagatgtaaaggtctgcagtaattaggctcctgctcacatgtggctctgaggaaagacacggtgtatttgtgtgttagatagcacttcatacgcgggctcagatgagaacgagttctcactgtgctcctgcctggtttaaaagtttgggtacctatcatgactgcttcctaagtgagggtcattgattggatcattttgttctaactattgatcccatagaatcagccaaagtgctcagttcctctcagcattccacaggaagttttaaggaagtggagatttttcagatttctctatgtaaccttcttcaatgagtttgttaaatatgtcaatcacaggtgaagtaaatccattttaatgtttttaatagacgttgg

SEQ ID NO: 24158 - DNA, 1888 bp, Mus musculus
tagatggcaggcagcctggccatgtcctgggatagagttctccccgcgttaggatgtgatggggccatcctgttagatcagtgtgtagtagtgagacccaggttttacctcttggcaactcctatgcctctttcttaaagggcaacaattcctcaaaatgccattagtttaaagcttgacttaagagatttttgtttgtgggaataactacattccttggctcggtggattttccccctgtggtggaaggaaaggtaaaggtgatgccaaaatgaaatagccttcagttcctgttgacgtgagagtcacagcaatcctgccatgtggttactgactacctggaggaaatgagcctgtggctgatacatatggagggcaacgattagcaaatgaccagagacactagtgtggacttgctctctggtggttttgcaatatgtatatgcaaactagcttctttgagagattcctttccagctttgttttccccaaagttctaccaaaaaggaaggttttgtgtttgtttgtttacttttttttttttcttaactgtgctctgtgttctgcccctgctgtgctgaattctcctgtagtgtttttagtagctcctgtggggctcgcaacactcagatggagccagtccagacaggctgggagaccacacctaggacctgggactcagagcttctgcttctgttgacatgcctctgtcctggtactgcactccacacgaaactgtgcctctgatcctgggacataatcacccagccagccctgcgttgcagcgaaggagcttcagggatggcacatgccctgtagccagacacctcatagacgacaagtacagctgatgcttctcactcttgccttagcacccctgagccaccgttgacagtcactggcgagttgtgtagctgagcctgtaaacagagcttatgtgacaggcagtccttcaacgtcctcatctctacatttgcatacactctacctggtaatctttgctttgggcgcatgtaaattgtcaggtgcttcataaacacaagtcagcctaggttgagaagattgggcaagttcttctggatgaatgtgtaacctaccacaagattctatgagacatgggtagacctctcttgtaatgtagcacacttaaaagttaaaactctttgggcccagttgtgtgtacagctgtacgtgcattatctactaggaaattaaagctcgacccgtttaactttgtcctcacgtttgctgagacatctctgccctcctgctcttgaagtcttaaagtcattttcatctgcagggcctctgagcacagagcttgactatagtggtgaatgtgtggggtgttgaactgttagcttccaagaagggaccagacagtgtggcttaagatgctgcagtcgtgttactgtgaaggaaaattcttccactttcagcagggtgtgtgggtgtgcgtgtgtgctcgcatgtgtgttcattttggctttttaaaaatgttgaaaatcgaggagaacttgattaccttcacagattatttatagatacactgggcgtgatgcttacgtaggcaagcaccggggaacaggagttcagtgctccggtcatgtaataccttgtctatgccccagccagcactctgctgggcactgtgtcctataactgtaaatcgcctggtttataatgctaacagaaactggtttgttttgtaatggaatacaaagaagatgtataataggaccaggattgtcccgcacttgtaaataagaatgggccctgtttattttgacatctttttacaaatgcattgtattaggatgtgaatattccaaaacatgctcttgtttaaagttttgaaatttttattgttaaatgtaacattttaatg

SEQ ID NO: 24159 - DNA, 1208 bp, Mus musculus
ttctccttagcctacccctcctgccccttcctgccctgcagggctgagcagactttccatgactacattacctttcttcatgggtagagcagctcattttgtaactcatgactgtcatttccagcttacagatatgtatgtacaaataatcaggtgatggcattgatgccaggtttcaaattcatgattggccttattcctggcatacacttagctacttttttgtgatgtttcatagaaacaaaaatgggaaaacaccaaaagctttttcatatacccccttaggagttacacagtgacaaaatgaagattagataatggttttaagcatttgagtaatggaaaatcttttgataatccatctttaataacatagcatacactcacatttgttattcaaaaggaagacctgggcaggagatggctcagcccatgggtaaacacatgatgctatgcctgacaatctgaagtccacctgtggtgacttgaatatgcttagcccaggaattggcaccataggtgcctggaagccagttttcccctgtttgcttttgaacaagatgtagaactctcagctccttctgcaccatgcctgcctggatgctgccgtgctcctcctaccttgacgataatggactgaacctctgaacctgtaaggcagccccaattaaatggtgtccttataagagttgccttgtcatggtgtttgttcacagcagtaaaaccctaactaagacaccactcctggaacccataggtggacagaaccaactctcacaggttacccactgatattcacattcatgtaagttaccctctgatatccacatatacgtacacaccctcgcacaaaatataaaactttaaaagggagtgaggtcagtgaggccaggtgaccctttatggtgctttgctactccagccttgttctgtttaccttcagatatgtaagattttatgaaattactcagattttaactcaacagtagatcataaaatcatctaattcagaaactgacttgtttcagtcatgaaggacgtgttcctcagactgttcatcatagttaacaccttgcacagtctaagccaaacactcaccatgtgattagcttacacaaggccgctgtgaatgtttattgacctgaatgcactcctgtggcaaactgcacagaagcagctctcaggctaagcagtgttcccagagctta

SEQ ID NO: 24160 - DNA, 1547 bp, Mus musculus
tgtgtttacccatgggctgagccatctcctgcccaggtcttccttttgaataacaaatgtgagtgtatgctatgttattaaagatggattatcaaaagattttccattactcaaatgcttaaaaccattatctaatcttcattttgtcactgtgtaactcctaagggggtatatgaaaaagcttttggtgttttcccatttttgtttctatgaaacatcacaaaaaagtagctaagtgtatgccaggaataaggccaatcatgaatttgaaacctggcatcaatgccatcacctgattatttgtacatacatatctgtaagctggaaatgacagtcatgagttacaaaatgagctgctctacccatgaagaaaggtaatgtagtcatggaaagtctgctcagccctgcagggcaggaaggggcaggaggggtaggctaaggagaaaacagcgagtcttccttccccctgccctccagtgacggcacagcctacggcctgcaagcctgaaaccttaggcacaactgcacacttgctttaaaggcccgagggtgggagtggcaggatatgaatctggattttgcacactcacttcaactaggacactgctgctttctgctataaaactgaccatactcatgaggctcaagaaagctccaagtttgaatatttctgattttgggattcttggccgtggggcattctacaattaaagactgcaaacagccccaaattctgtaatctgaaccatttccagttcctagctttgcagataagagctgaaaggagcattaggtgttccagttgtaagtgcagagtatgacagtttgtgacctttcaaatcctcttgaccccactgtgtcaaccccctgttgcatagggctggaccttgccttctgctctgatgacctgtcctggcattttagaatgtgtggtctgtgtgtatagtatacgtgtctgtatacatgtatgagcgttatgaatctctgggtgcttgggtatgtacaactgggaagaggtgtgtccctgcctcatcctctggtccctgggcaggcattgcactggaagcccatgccttgagaatgctcagaaagcccctcaagagcaagccgcagtgcctgtctgtgtggtggcccagcatggtgggcaagcagtccttccacttcagcgctccttttcctggtcacctcagctgtctgctgctgtgggaagcatcgacagacagttctgcttttggcagaaggatggctttcaaagtaattattttgacatctatgttttgctttgaaaaacaaaacaaaacctttctgctagttagggtaaaatagactaattctatcaactgtagaacaatggaaacatttacaattgggtttttaaaaagccacagagttgtggagccttaccacagctataacctctgacagcagtgtcactttggaatgctaagatatctcatgaagagttatgagctgccagtcaaagctcgtctccccattcagaatctagcacagtgactctaaacactgcactgactgggaacttctcc

SEQ ID NO: 24161 - DNA, 1151 bp, Mus musculus
aagtattggcagatgcaagagatcataattgctaagttcctagagaagaatttttttaaaaaatatgtaataaggtaagacatcattaatgtctgtatattctctgagaaaaacaaaagtatagctgaattgattttagtagtcttgccaatatctaaaggaaagcattgttgttctaaatttttccttagttgacaaagttaagtattttattgctgttttcttctataataatgaatgtctagttctacattggttgtagggaaaaaagggtttaagttgctttgtcctctatattcttgtgtatattccagatgtgtgtattcttttacccaaggccactctgtgcctttcttcacagatagctctgatcttctgcccttctgctatcctctccttcttctccttccttttcattgatgcagccaactggtacctaaaagaaccttttccgaaatctcaccgctggccccacttaccttagtgtccatctgacaaaacacttccaccagctgtgaccctcactgtttcacccgcgaaagtttaagccctttcatgaagctagctttctccttcccacttcatggagtagcgtctctggtttcatcacagggattccatccttcaccactcttcctcctcaccacagaagccagctaaacggtgaattctagacagaacgaatcccactcttgtataagagaatgatagagaaggtgtattcttttcattctcaaatacacaactctaaaaacactttctaacagacaaagacgctaaccaagaacttaatcatcgcttacgaaaagccctctcctttgatattttataccaaacaattgactctagtttgtctttccttttctgattcctacgtgtttcatgaatgcaaaagcgcaagtagccacattgtgttatctttgcatcaattttaacttcactgttgtaattgtggggttgtacattctttaaaaattatttatgaggacactaaactgcacatgcaaaaacatcttggtttacagaaacactagtctgcagaggatgaatgtcagacttcggatctgggtgttataagaatctttgtgatagaataaatgtttgatcagcacttttaagttattcctctgtatacattgctcatcagagaa

SEQ ID NO: 24162 - DNA, 1190 bp, Mus musculus
ttatttgtgaacaatggaacttaaatccagagaaagtcatagggttgattgtatcattgacataataaatgaccaagccaccatcaatccactgccactctccgccactgaagtgtatttgtgtttatttttataaacttaaattaaaacataggaattaaaagtgagtttgcattttttttcctcctctccagctccggtgccatagccatcatgaatgacacagtaaccatccggaccaggaagttcatgaccaaccgtctgcttcagaggaaacagatggtcattgatgtccttcatcctgggaaggcaacagtaccaaagacagaaattcggaaaaagctggccaaaatgttcaaaaccacaccagatgtcatctttgtatttggattcagaacccacttaagtggtggcaagaccactggctttggcgtgatctatgattctttggattatgcaaagaagaatgagcctaaacacagactcgcaagacatggccattatgagaagaaaaagacctcccgagaacagcgaaaggaacgaaagaacagaatgaagaaggtcaggggcacggcgaaggccaatgttggtgctggcaaaaagccaaaggagtaggtctgcagtgatttgatgttttgctgtgacatgcagatttctgagaggacaaataaactaaaaagcttctttttaaaaaaaagtaagtttgcagaaaactttatagtaatctaaaaacttgatcttttttctgtcaaccaatattgatttttttacacaaatattgaacataataaattgggaaggcagaaatgattcttttctgcatatgggctgtaaagcactgattcatgtagtacagtctctgagggagtctcttgttggatgtccaggctggtctggctgccttagttgcatctccagctgtagcatctggagactctggcatgggcagaacagtgttcctttctctcttctccatccctgtctcctggttccatggaaatgatgctgctattgagctatagagttttgactgtgactatccattggggcctgatggagtcaccactggttatacaggtaaagacaataattttctctttccctgaacccagcagtgggaaatagtttagcagtgaaacacaggactcacggaatccctcctccacccatcccttgttgatgggtccttt

SEQ ID NO: 24163 - DNA, 1173 bp, Mus musculus
atctaatgatatagtgtttttatatagcggttggttagactaaagaggaagatgatctttccgcattaaccctgctttggggaatacgattagactggcataagtgcaaatagatgggtaggtaccattttagtttaagtggcagaagggtagagtcagtaaggaaacatgaaatactagtgtaaggtgtgatttttaataactactgaggtattaatatttattagcctttatattaaattgtggtttgcttttttttacttattaattttggctagactttagccctcattgattatatctatattaacatgccaacataactcatgagtatgtgttgaagagttaatttttatcgcataaatgagagtcggcagacaataaacctggttgaaaggacagtttaaaaaaacacagtatttatagccaatgaagaaaagggcaataaaatttttgtgcaggaaagtgttgcagctggttggcagattatcctgagaaaagtaccttatgagttggcttttgtctgggaacgtgggtctcaaggactcccactatggccagaactgagcatagtagctcactgtgcttgcatgaactctctgcaaacactggcttatgctgaaccccactttcttcccaggtgcccagagtgttgatatatgtggagcagcgactccctctgagtggtccagtaaaccccttggcaccgactcttagcaagctttcttgcagatggtatcacatgagctgttagagctccttgctggagacccagtttctgcctctgtgactccagtgtggattcttggaagcttacccccagtttccctgggcttcaccccatgtgcctttttcctttgctcactctgctttggatccgttcactctaataaatcagtagtgaaagaactgtatggtgagtcctgtgcattctcacaagcctgcatgtctgaagtgatctccagggcctctgatacacttaaaattaaactaaccatgactatcccttatcccagagaaaagcaagggggggggcgagggagtgaatcctgttggctttgttactttgagctagaatgggaccatttggggacccctttggctagatattactaaacatgaaaagtattggaaagtgaaggggatgaagttcctgcccattggagtttcgga

SEQ ID NO: 24164 - DNA, 1219 bp, Mus musculus
ggtcataaacagcgcagcactgtggacatccttccctcttggctgcctacgctgacgactgatgagggttttacctctgcttcccaaagcctggggttgcaggtgcctaagaccttgccaaaattattagaaataatttggtaaagaggaaagaaagaaacaaaaacacacatacatttcttttcccctactcatctggtcaaagtaaaagacatgaaattcctgaaacattgttaaaacaagaaagaaatctcaggggaaaagctgaaagtgatgtatttaaatctaaatgttaattgctactgtttaggataatcccatggtgccaacatgaagatatttttttgatgaatctctgtcttttgtttcactgaaattgttatttcattctgtattttggaaagtatgattgggtaaaaaggtaaaaattttgatgcaactttaaaacttaaaatctcatacttgaagcttattttaattttcctatcaaatgcagtgggttaaagttaaaatgtgaaaatatgtgtgattttccaaaaatattttttaaagtataattcacactttgtgtactttgttttagcttgcagacaaaaggcatcactttctttccttaaccgatcagaacttccaaacctggcttataagaggttaaaaggcaaaaccccaggaattatcttcatccctggctatctttctaacatgaatggtataaaggcagtagcagttgaggagttttgcaaatctctaggtcacgcctttataaggtaggaacaatatatttcagataatatattaccatttagtattgtaatggagccaactaaagtcaatgccagcattttagtagatggagttatttcaatagtgtgcagactttggtctcatgatttagggtctatagggtatttgtgctgtgctggctagatgggcagcagagggtgtcatccgggggctcgtcacttagttgtttagatacaatgatctgtgtggcaaagaaagtatacctgttgggtttcctatcataccttgtgattatgggttttgcactaaagacataaagaactcatgtggccgctgtttattactctctaccacgggtgtttgaagctgagagtataatatagcatacctcaggggtagagcatttgtttagcacaaaaatcccggaatcagtccctagcacaacccacaaaagacaaggtttttcagtgtaata

SEQ ID NO: 24165 - DNA, 1157 bp, Mus musculus
tttttatagtctcatgttcatgtctggaaattcatgcttctatttaggaaggcaatgaaatgaagcattctgagatgaaatgaagctttctgatgtgtctggatatttgcattttttccagttgttagggttagggtcaagggtcaggggttagggttgtggtcagtggtcagaggttaggaggcatctccaaagagacataatacacataagcacaaagtgtaaggtggagacccagaagaaatccaggctgaaaggaaactgctgtttcctctgagaagcaaaaggactgcatgctgacatcatttttatgatgtccttgattgtttgttatgttctgggaaacagaactgactaatgaatgagccacggtcacgagatctcccttaactgagcaactggtcctgggctaagctgtcattggttcttccatctttaataatgacacaaatctcaggtggctgattcataaattacgaggtcctagagctcagcctgaatgccttgtgctctagggatgcacccttagcatgattctcccttttgtgcacatgtgcagagaatatggttagagtcatgcaagaatgtggtgcaggccgatggagttcaacgatgtgttgtacgtttcagggtggacataatgtgtggggctcaatgaaatctgccaaaatgtacatgggcccctgggaggcaggttttctctagaggaaacagtagacattgagagtatcaaacatccaagctgacaggaatctcatttggtgcagcatagaagagcatagatgtccttgtcaatttcattacctgtctagcgaatcttaaccctctaccacagctgcttccttgtaggtgattccacagtttcatttctcagtagtgtcaccttaggacacagggagagtggactgattgaatagcaagtggtgtcagtataaacttctcctcaattccagaaggttctaatcagcttgtgactgccccaagagacctcctacgtccacagcctttggattccccagcttcctgctgcacacactgacactaacggccatgtctcttgagctagcctaactccgaagcaaccctacaatgatgctattgattcttcctttaaaaaaaaaaaaaggaaaaaaaaaactatgtcttagacagtgtaa

SEQ ID NO: 24166 - DNA, 1263 bp, Mus musculus
aaccaggtgatggcacagattgagctgtggacccacccagataaataccctgttggggttcacttcctgcctaagaagctggatgaggcggtggctgaagcccacctgggcaagctgaatgtgaagctgaccaagctgactgagaagcaggcccagtacctgggcatgcccatcaacggccccttcaagcctgatcactaccgctactgagtgctggggctgtccttcaccttccagctgccatccttgttccgggccctatctctcgttcccaagagcaaatgtcaccaactttgcagtagcctggacagtgcttctcccacacagccctccccttacaccctctggggctggtcactctgtctttgacctctgctgtatccctcatactgttccaggtgtggagggggaatggagaggtacctggtaggcatccacaggggacatgatctcagaagtcttggaagtcctgaggctggatgttgctagtgatggtcacaagccatgcaccttatcattgataccctcacttggtctttagatctgtgtgcctggtttgcagatccattggtttctcagtccaggacccaagaacgagctccaccaaagagcaggaacccctggagtttgaaggcccccgagagctgggcctttttactgttgggcagtctcttaaacctcatgatactgagttggtactttttttggtccctatttcacaagggttaggatagattaaccaagaaaggacaagtgacagactgaaaggggctggaaaaacaaagaggaaaaggcctgtcacttctgtatagttgatggttcctgtcacaagcccaggtcacaaacagattaatttgttttataatgtttatatgctatttagaatgttaacaaaggaaggtggataaaatacagtttctactgcctaaaaaaaaaaaataaaaataaaaaaaaataaaaaaaacaaatttataaattgtggctcgaaggcacaaggaaaatcagcatatgctttgatgattatgaaatttgtgtaattctggtaagtagaaacacatacaactttcaaatgtgtccaatatactccctatggcctgcaatcgacccaaaagagctatgtgcattgcccaaaacaatgtcaaaagtttactcgaaacacaatgagatgttctctggaatattttagtaactaaactctgcagctctcgggtttgatctttatagataacaatgtcaaaagatcagacatgcctgtaagaaata

SEQ ID NO: 24167 - DNA, 1224 bp, Mus musculus
caagtcagaaggaaaggtgaagagagaggctattttgggcagtgttttaaaatctccccatgatcagacatatggtcaaatgccagctccttttgctttgtccatgccctaatcccccagtgctgaatcttgatgtttatttttgttttgtttgatttaactctctgactatctcatatattccttccaagccagagcgctatttgagaggctcctgacattcacaaccatggcttcccctagctgaccttagtgggacccaattccaaacctcaaatcataaaattcctcagcgtttgtaggttacagttacagtttgtagttacaaggtgccactcctcttactcgggtgccatgggcaccaaatgactgcaccatggtggttttccatccagttcctttgaggggtagggtcagggtcatggccttgagtgaatttgacttttgtttgttttcaccagtgtcctagaagaaatgtaaacagtgtctccactaatgtaagcaatgtttgaatttctagaatggaccaattagcaggagatttgactatgaggatgagagcacaatgcaagaagatggaactcagcgcatgtgccccctttatagccagatgtgccaccaagaccgaagccctcgccaacatcacccacgcaaccccgagagactctacatcaacccacgagaacattatgtgtgattttccttgtcatgaagggtgttctaacaaatgtttattcttagacctgagagacactgaggcatctaagtgatttcagtcttaaagtgtgttgcaacgatcgatggacgaatcagagctaagagtagattgcttaacatcattaagggttccttaaccaccagttgtgtgtgtgagctcacctgtagcttcacttccctgtaactctgaagtttagctactaacacttggcctccagtggtgtgttcatttggaggggaaggccccagatgctggcgactgctttgcttgggtctcaggcactgcttgtctgtcctttaaacaggtgggaaaacgagccccacatccagttcactgattattaagctgggattttgatttccctagcctcccagtacaataacaatacctgcgtacagaggccagaggagaggagcggactgctgtaaccaatggtgacaaaggcaaggggaagcggcaagcctctgtgtgcttgtgaacccgtgttagtgccccgtgtccttcct

SEQ ID NO: 24168 - DNA, 1186 bp, Mus musculus
gtctggcagataacattagtaaatgtaaaacttttaacattaaaattaattgaatttaaattattgacaataatttatgagtaatacctctagtgtaagaatatacagaacaggttctgtaattgaagggtgtgggggatgttaggtgcatatgtataaacgttctgcactttgaggaagcaatgtggagcttattgatgagtctcagatcctgtatagcaagtgaccttaaaaaacagcaccaagacacagcttgggtgctgtactgcacaagtgttccatttatactaaaaagactattgagataagcccccctttcccaacgtgtctgtgtgaagctgattttcttccatgctcttcaactatatagcatattataaatggtagctagtgggaacatctagtttcctttctgagtttgtctttttgcttttatttttgacctggatatttcctttcgttgcttttgtgtgtgtgcgagcgtgcatgttcgtgtgtaggtgcatatgcagtagaggcccaaggttaatgtgaggatccgccaccactgatggatgactctcccttagtctttgaggcagggtttcttggtcgagctcagaattctgtggtttggctgggctcagtagccagcttgctccagaatccagactctgcctaaggaggctggtattccaggtggcccttcacagctacctagcatttaggaggctactgagttttgaaagttgattttgtaccttgccactttgctgaaattatagaaggtttttggtggaatcctgggtgtcctctccataaggtatcatgtgagtcagcagttacaggtgatttgtcttctcctgctgtctgtattctttccatttctgtctctcttctttccccagctctggctggtgattctagtgctaccttgaaaaggagtggggatggtagacagcctgggctgcttcctgttgataatgagattgcttcattcttttcaccactggaaaaaaatgggtttgtcataggtaatcttcattttgttggggtatgttccctcctacctaatttccctcaggacatttattataaataaagcacattggattttgtaaaaggctttttttaacagataaatcatgtgtgttatgtctaagtccatttatgtggtctattacatttattaccttgtatgtgttga

SEQ ID NO: 24169 - DNA, 2981 bp, Mus musculus
cagacactttggttcaggtctttggaagtacactttttagtaataatacactgtgacaaaagtaaccttatttaattatcaataatgatataagccacaagaaaaataggtctaaaatttctttccgtgaaagataagaatttattgttcttttgatcaaagatcttaagaagtagggttttgatgtgttgtatgagtccaagcagaatggtcacatctaggcttctatataaatctcaatttgaatatttaatctaaaagacatgagcaacattgtcttaagaactatgtcactgaagtgcagatgcctgctgacgatggaaccccgtcatgctttgtttactaagtggctagctttaggtgttttgtttgatttgtgggcaaaaggcaatctcaaaacctatagagtatttaatgtagtctgtatccgtaatctggatcacttggcgtgctagaggcttagcaggttctaggaatcttacactggtgcttaaggcttttggaagcattgcactcttgttcattaaagctctatgtatgtacattgtacatagggggttgtctgtgaacacctgtattcacatgaatattggtcatgtgcacggctgattgtcaggtatataaaaatcacagctccttagagaatttggaagataatttttactctatagaggccatgtttacttttgttactttgatatgttttaaactttttacatttttatatttacttcatggtttctttcctactggttaaaatatttcaataatacaaattgattttttcctataaaagtttattaaaatacactaaatgtctttatgctacgagtaaactatgaaatagtacttgattatacttaaacatttagtatttaaccatgtgcctgataagagctctgtgtgtgtccctcccctgccacacacacacacacacacacacacacaacacacacacggctgtcgatatataaagaaaacattaagtgttttagtagtaactgctgtttctgatagtcaccggtgtgtgaaagtttaggaagaaactatagctactcgttttacattaatggatcataggacttagaataagtgtagaacttgacaacaatgtagccaagtcatatgcaaaaatatttgatgtgattttgataaagactgttagggcatataaatatagtaggtcatatatggaagtaataacataaaatatgagagaggaaaaaatggcacacatactgagtttttaacctagaatctagagtattaacagattttctccttacttgttcattggaagtgacctctcagaaagggggtgtatttctcagatgatttttaacactggattcagttttcttcagttttaatataaccgtaatactttttcttccttgtttttttttttttttcctgccaagttaacttactaggtgatggctctcattgccattcagtaaatcatgaaatagactttcaaagaaagactttcagtggtatacttctaaaataaaactaaattctgtcttattttcttcattctcacatgagcttctgtgcctgtgttttatttcatttgtgcacaacccactttcatttcaactaacatttagaatgccattcggaatcgcaggacttaacaaactactaatatcaggttaaagatggaattacgtaaacttttaacagtgcctataagtatacatgttagccacattgacatgttaaccattgtgcagtttggtttaacacgtatccattatttgtattcattatcaatgatattcagaaatatttgaaaaattgcatctgcatcaaacacccaacttgttcatctcacctcttcttaagcacgacatacaacagttacacagaatttacaacgcactaggcatgttacgtgatctgaagatgaaagtctgtaggaggatatgtacaggttatgttcatctagaaggttgctagggatttggacatcactgtaatttgacattttggaatcctggaaccattgtgtatagagaccagttggtttttattttgaagtcagctcattttaaaagacgcttatccttgccatgtagcggtgtttacttactgcttgtgaactgttttggatagaaatcacactataatccacttcctctttactgctggttatttttaataatggtatacattcttctaagctgtttttaaagaacaagcagccatttcttcaagtagcatgcactttgttttgtttgcttcatggtatacacataagaattcattcatgagagcaccttcataatagtggcaccatagcccaactttaaagttttggacacgtttctttctgcttacatatgtctgtcgtcttttatggtacatccagatttttaaaatatgaggatgagtagtgagattcagcctagttttacaaaaggttgcactgtacgtctgttattggagctaggcagtaggtattactggcttactgttcagaagagtaacgtttacttcattgtggaaaggaagtagcgttccgctgttgtagctgtacaccatgatggcagcagagacagggagaaaattagaatggtaacagtgctgcagaagtcattcttaattcctgacaacaatccaaagccttatttccttacatgcatgatacttctgtatagatacatcgatacagaaattattccatttcagttaccagaaatgtctcagggaaaacctatttgtagatttgtttgtttgtttgtttgcttcaaagccacctcttagttattaccaggtcactgtcactgatgttgcattgtaagcctgttattctttctgtcattacctcactggcagtaaatccttatccattctaaaagataaagtttgttcgaaaaaccagctgtagtattttttttaagtttctatggtaactataccaaaaatgagtatttctctaatttcaagcagtaagtattcacatttctgttact

SEQ ID NO: 24170 - DNA, 1187 bp, Mus musculus
atcttgctcgtgtaagtaagcacccaaggtgctgcgtttccaggtctgaaacttactatgtagattgtgcttgctaatctcaaacttggagccaaaaatctaccttctgcctcctacttggcattatgccacactaatatgtttttgtgcgcctttgggacggccaggagccaaggctcacctagagattctcactgtcctgtctctattttcccagcctgagattgcaggtgtccccccaggcctggcatagatgccatgctggggatcaaacttgacggttcatgcatatattcccaacagatctttcttgtctgttttagatcttagtaccttttcctggttctggtctctgatctgggtatgacacaccttgtaatcccagcacttgtagtgtagactggggtggatgattgagagttcagggcaagcctgatctcagtcagaggtggggggggtggtgaagtggaaaaggaagacataaataaatgaatgaatccataaatacacttgttttctaggaacaagatcttgactaagagcctcgaaggataaaggacagatctcttgtttgagctagctgctggcgtcactcactcttgtggtgtgatcagcagagctgcggctgacgctgagactgatagaaatctacatctctgcctttgaaggtgcctttctcatccagaacttaagggatagtgtaagttagttgatgcttaagttcacgcagtttgaaaaaagccagcgaggccacctctgctcgctgtgatgactgatcactgagagtgaactcttactcttttgtgaagataaaaatacatcctatgtgttttgctgcaagtaggtcctggggcaggaggatgatatctccagataacaatagttgctagtcctgtcaccagcacaacgggcgtcataaccagttcagcagtcaactgtaaagacttggcttatacctgtagcctccgcatgcatgtcctcttccctgggttgtagtgtgttgttagtgtttaatacttgtgtttgttttctgctgttgtaaaatattacactaaatctggcttgtggcttttgtttttgttatctgaatggttaaatttcccctgagttccttctgcccctgtctggatgccatgtttgaaagggctttggaacaatgcttggagcagagggaagtagggtggggg

SEQ ID NO: 24171 - DNA, 1109 bp, Mus musculus
gctagaggaaacggatatctccaagggcagtcacccagactaaaagacaggatcaagtcagccgaggcggatcaatacttcaagtctagactgtgctacacagcgagtttccacctcataaaaaagggttttgtaacacaagatgaggcaatacaagagcaaagtgacttccagctgagtcactaaaccagggaagctggcttagttttcctgagaggaagaggtttggctagtcacaatcctttgtttgcaataagcgtagccatttatttgagccaatcacagtcttgcctcgtagcatcaatcccagtgattgaagcttgtgtcttagaccagtcataactttacctcttaacgccaggcatccatctgctagggcatcttcaggtcagtgcttccccactggccaggcagaaatgattccagagtcatctagaaaccatcagacaggacttgtgaaaacagaagtctagaaccaactgtttccagctcgctttgatcccaatactcggaaggcagaggaaggaagatctctgtgagttccaagttagccttatctgaactcaaaaaaaaaaaaaaaaaaaaaaaaaaaaaaaaaaaattcaagcttagactgccagcagtcagaaaccagacaaacagcagacattcttcagttgtctcaaggtatgcatggaatgttcctaaatggctggtgctgacctaagaggaaactatctgtctatctgtccttttgcccaaggcatccagacttgtaagggagaacctaacagctgctatatttggggagtcaagttactcccccgaaaaccatctttgcctattagaaaaatggttatcaggaatgcttactaatgcaaatttattttatttatttttttaaagatttatttatatatatgtaagtacactatagctagctatcttcagacacaccagaagagggcatcagatctcattacagataactatgagccaccatgtggttgctgggatttgaactctggaagagcagtcagtgttcttaactgctgagtcatctctccagcccactaatgcaaatttaaagaactaatgataaacactaaaaatagtgaaatttaggcaaa

SEQ ID NO: 24172 - DNA, 1134 bp, Mus musculus
ctgggtttcactggctctcctggaacttgttccatagattaagctggcctagatctgcctgcctctgcctcctaagtgctgggattgaaggcctttgtcattagtccccacccctaacccccagctcagtgttttttatggtaacagaagtggatttgtgtctggggaactttgataaggcgctatacaaatggaaaaagaaatccttatttctagtttggaagtattggtgttgagatttccataggagaaggaaggggaggggaccaaatcttcaggaacttcctccaggaggtgtcactctctagttgatgccttgcttttctgagcgtttagaaagcccttccacagtggtttggtagttcccagccgcctgcttcctgaggttatcttctttatttcaacactaagactctgatggtaaatgaattcagcagaaacccctcactgcttctctttgcagaaccaatctgaggaaaacttggatgaagaaagtgtgattttaacgctggtcccctttaaggaggaggaggagccaaacacagactacgctacgcaatcaaatgtttcttcttcaaccttagaccacacaccaccaggtatctatcatccaatgtcagaatcctggcgaaaatagtgtaggtttgagatggatttctcagtaagactctggaaagccaagataaagtatacagttttgatacaaggaccactccctccgcccaccaacacacctccagttttacctccctgcagctggttaaaggtgcacaccaccatatcaggcaggcttcttaaacctcactgagattttcaaattccactcatctcagttgttaagccctgtgaactgctttatttaaggtgggaattgggcaaggtacctgggaagctgtcaccccacagctaggcagaagttcaaaaacactgatccacagtagtatgactttttccaaaaaaaaaaaattgaggttaaaggacagggctgtgggggctggacatttgcctagcatataggaaggttgagagtggtacactctctttaagaaaaggttaacttggtgactcagtgcctttaatcccaacacttgggaggcagaggcagagtatattaaatatcttgcttactaaaag

SEQ ID NO: 24173 - DNA, 1243 bp, Mus musculus
ctgagcagccttgactgtagctcttcattcatcaatctcagcattcaggcaagccatctcagggactccagaaatggaaaagggtctcttatttattgtatgtgctcattttgcttgggttttgagtcaaaaagtctaggctggcttcaaagtctatagagatccacctacctacctttgttagtgctgggattaaagatgtgccccaccgcccccagcttttgtctctgttaagggaaaactctggcttctcccccttgcaactttaaaaaatgttttctttaacatttgtcttacagcaacaagaagatcctaagaaactttaaaattagaagccgtgcaaagaaaaatgccctacccccaaatatgccgccgtagacaagattttactctgatctaaagggaatggaagaatattctgtgatccctataatggctaaaaacaaacaaaacaaaacaaacaaacaaaaacctggctgtcagtcatcagaagcccctcctcctgtctcccagcagagtggagactctgttgacaaatcagcatccatctctctaacaacagcccgttgcattttaacatctctgactgacagctcctcatggcctcgtgctggatttgcatcactctaacaacacctcgctgtatcttaacatctctgacagctcctcatggcctcgtgctggattggctaaatgcttagctacctgagaaatgattcggttttactgggtttgttttgctgtactttttttatataaatttttttttggaggggggagatggggagcagtttcaaattagcaaagcagaaagtactttttttaaaaatatatataattttttttgagtatggctttatcatgtagcaactccagtggacctggaaattctaggtagaccagacacgtgttgggttttacatgcctgtacaataccacttagccagtactgatgtatgtttgactagtatagagttcattgcttgtgctaaacaacctgggtgttgacaagtgtttatagagtgccatacatttgaaatcatatagtatgctaccgttcagattggcttttacctagcaatatgcctgtgagaaatatccatgtcctcgattgatttttcttaatgttgagattccattgtccaagatgtgccttatgaattgatgctattacatatggatatctggttggtttttatatatccaagacagggtcttttgcagcacaggctggtcttgagta

SEQ ID NO: 24174 - DNA, 1224 bp, Mus musculus
tttaaataacctttctaaatacaattctagggccctaaggaaagcaagaactctctctctgttctttggagtgaacacagaagaccaacaccaagctggaatgttcatttacagtaataaccgattgatcaaaatgtacgagaaggttggtccccagctgaaaatgaagtcattgtaagtagttcatttctccatttaaaggcagtatagggaggccacagtccatttctgtctgtggagctagatgtatgattgactataacaccagtaggtgtcctgttcttcactcactcttcctctcactatacaggaattgatatgcgtaatttataatatgatgaagctgtgtgctgtctccatgagaaaatcacattgtaggaaaaaatattgtttctaatatatgaccttatgtctttctattccttatgacatctcttcatgtttctaattttaccaattaaaaaagtactacaaattaaagaaatgttaacagagaaaagaaaagccaaactctaatcttgtaaggaaccatgttatggattccgtacctcttgtcttgtcagttatctaagtgtgtgtgtgtgtgtgcgtgtgcgtgtgtgtgtgtgtttccagtctgtttagaatctagattccattttctggtgctaaagttccataaattgctttgacagttatgtggaatcttgcaaaggcatcagaggaatagagtgatggtccaaatattaaaaaggttaatctcacaaccaaaaagtcaaagggatagagtcagacaagatgtccaagagtggtagaaggactcagggggggtctttggtcttcttgccgccttttgctcaggggagtcgctcttcattcattgttcaggcaaaagcaggtgtgttgctatctcatgtgctaagctctatggacacgaaggtcaagggcactcaccttttgctgaggatcattagtgcactttaatactgtgcacggacagtgaaaacaatatttctttattatcagttttaagcttaacatatacagtggccagtttcatcatggcatcttcatgcatatgcatcactatagtttgttttcattcatccccatctccccgtgctcttccccatgttcctgtcaccatgttcctgtcaccatgttcctgtcccttctagtgaatgccctttctcctcccccagccccccccccccccccccggcctagtgagtctgcttttctgct

SEQ ID NO: 24175 - DNA, 1164 bp, Mus musculus
ggatataagaaagcatactaactgggaatggtatgagcttttaaaacctgaaatagggccgggcgtggtggctcacacctttaatcccagcaattggaggcagaggcaggcgaatttctgagttcgaggccagcctggtctacagagtgagttccaggacagctggggctacacagaaaaacccgtctcaaaaaaccaaaaaaccagaaatatatgaatctatgggtaccactcacatttgaacataaattggggagatctgggagaaactggtgggcaagactagggggtaaatataattaaactacattacatacataaaaatataatggagtgtcatgagagaagatagtaattcatcataaatgatgcaactacaactcataaaattatgtcttactgtttttaattaaggaaaaatccaaacttgggagaatccagccttcaggggcagacctgactcagggcagtccctcatctgttaagctttcgttcatgcaaagaagccaaaagaggagcacagaggatactcactcggacgtggagttcatctgcatgacgaagattccgaagaagtctgtgaagaagaccgtgaagtacctgcagcctggtcacgctccagctctattggaaaacctcaaactcgaggacacagcccaggcatgtctcccccccccccattcttttctcttattcacaaaatatataataattcccttgttctggaaatagcatgtggtaaaggttttgcttcattttcacatttttagctcactctaattatgggatgtacattgcaacctgtgtttgctggataaggtcccaatttctattttttccctttggttttctactttggaagaaaagttagattgctaatatcagcacaatttggagaactcagccaagtgacagtgccccaaagaatgcctggatgggaaaagagctcacatttgtatttaacagaagagaatgactggagaaacttctaacttatagcagccatggtgtggtgctttgaaaatgcttggcccatgggaagtggcactattaaggaggtgtggcctcattgggataagcgtggccttgttagaggaagcttgtcactgtgtaggcaggctttgagggctcctagggtcaaactctgcctagtgaggaagagac

SEQ ID NO: 24176 - DNA, 1201 bp, Mus musculus
gtagttgtaacgttcatcttgtaccatgtttattgctcgtgctcagaggcactttccctggctggctggctggctggctgtctttctttctttctttctttctttctttctttctttctttctttctttctttctttctttctttctttctttctttctctctctctctctctctctctctctctctctctctctctctctctctctcccttccttccttccttccttccttccttccttccttccttccttcctttctctctctctctctttctttctttctttctttctttctttcttttttgttaagatttatttatttattatacataagtacactgtagctgtcttcagacaccccagaagagggtgtcagatctcatttcgggtggttgtgagccaccatttggttgctggcatttgaactcaggaccttctgaagagcagacagtgctcttaaccactgagctatctctccagcccactggcatcctttcttttcttttttttttttttaaagatttatttatttattatatgtaagtacactgtagctgtcctcagatactccagaagagagtatcagatttcgttatggatggttatgagccaccatgtggttgctgggatttgaactcgggataaaatgtgtagcccaggctggcctcgaactcgtgatcctcctgcctctgcctccttcagcaaatcctacccgcgtgcgccaccactaccggtggcatcctttcttaaggttggctctctctaagcctctttgttttttatgttatcttcctggctcatcagtctgactttgattgtttctcctaataacattctggtggttggaatatgctccccagggggtggcactattggggaggtttggccttgttggagtaggtatagccttattggaagaagtgtgtcactgttggggtgggggtgggttttgagaccctccttctagtcaagtgggaaccagtctactcctggtttcctttgatgaagatgtagaactctcagctccttcagtgttgtgcctgtctggaagctgccatgcttcccaccttgatgataatggactcaccctctgagcctgtaagccagccccggtgaaatgtatacatatatgtgtgtacatagacatatgtgtgtgtatatatatatatatatatatatatgatatattcatacatataca

SEQ ID NO: 24177 - DNA, 1189 bp, Mus musculus
ttagttgatctttatatgtatttattggcttgtgaccctcctgtctcagcctgctgagtactgagattataggtgtgtgctatcatacccagccaaccatgcagttaatagcgtctccgtgacatagtgaaagtggcttcaagtttaccattgcttggttctaccgcttgcttaactgttgacactgttttaggtttcttcacgggaaataaaaaagcagcagagtgagagcctcgtgcaggcaggcaaggcatccactgacgtggctagcagcagagatccaactgtgaccatggtaagaacaacatcatcttaacactctttcacatccataaaaattaaagagtctactaaattttggtaggtaaaacatagcttgaagatgaaggagcataccccaaagacactgttatctgcatgaaccagagagatgataagtattcattctttctttctttctttctttctttctttctttctttctttctttctttctttttttttttttagagctgaggactgaacccagggccttgcacttgctaggcaagcactctaccactgagctaaatccccaacctcttgttattttgtcttttttttttttttttgagagataataagtaaactctgacctatgactcccttttttcacgctgagagaactttgacatatatgtaaatgtgtgaaaaaaatgtacatataatttgaagaacgtatcagaaccccatgtcccaatccaaatcatatgcaattttaaatatggactcttgtcagaaacgtaattcttcttttgatgttctggtctttattatttatttattgcctgtctgtctgtctaacccttgtggtgctagggaccactaagttataacatcagtccctgaagtataattttgaattgacttaaattctccaaaagccctttggagaaatcaattcaggaaacacgggaacattttacactcaatccactagataatgcatcttcattctgatggttggtatcaaacagctatgtatcttggcaactgtgaaatcactttgagtttacgaagccaagagtggcaatgctttggtgttcaggattgattcaaggcctggctatgtcgttgactggtcagtcattgactgattcaaagactggccacgtcttcctttgtgaagtcctgttaaaaccattgtcca

SEQ ID NO: 24178 - DNA, 1152 bp, Mus musculus
cccttgtatgtttggttattgtgcatctttgcaagtataaaatagaacctacgtctcttcctgcagagaagaggtgagtggtatataactctattgttgactaggtgtgataggatatacctaaaatcccagcacttgggaagtgggcaagaagaccaggagttcaagactatcggctatatacgtagtgagttcaaggtcaatcaagtctagataagatactgtctcaagcaatcctaaataattagtgaattatcacaaactgtgtttaatcaatgctatccccaaaccttgaagcaatgtataagactaagttattattgctataagacttttgtataatccaatacgtgggatctctgagtattacattgatgcctgtccttttctttcattgtgtattaacaattcatgggaatgtttctgaaatgggtggaatctaacatggttattcttgacatctgaaatcccagcttgcccggggtgcaaatggaagatttaagtccacgttctggacacaaaatcaactctgtgagtggtgactgtcagctgccggcttcaccaatgccttctcaaagcatgtctgtggaagaaacagcaagaaaactgctgtctaacttaaggtaaaaataattcctagttttcccacatgctgtattgaatctttaaaataagcagtgataaacagtgttttgttttatgttggcttcccgctgatagaggatgtttttgaatacattcagtggaatgattttatgacctatttccttaaccatatttagttagatacaccacaagttaatagtcccttgaaagataacttgtggtcactagctgcccactgtgatgtgacccagcagtatggtggatatacacacataggctactctttccttgaatgtaataaagaagatttttattgaatattatgggtttttttttctactcacaaagatacgcatgacattctcatggcctttgaaaaggattttttgtgggtttagatatggaacttacagaagagaactgagtttcactctttggtgggttgaatttggacatttgtagacatggttactcaaggaatttagatgtcataatctcagctctcaaaggagaagctgggaaggagagatgattctgggttttcag

SEQ ID NO: 24179 - DNA, 1120 bp, Mus musculus
aaacatcataaatctaaattattgtcacttttgcttgaatgcttccatgatgaattaagtaatgggtactggtccatcttcttttattggtatactttcactgtacatagtgatgagttttataaatacattttctttctagtatattgttgggaacaaaataaaaaaggggtaacctggggccctggggaataacggaaaggaaaagatgcccacaccccgccagagtttccctattctctggtcagtcaggtgtgggagggctactatctaccctatctactcatccctaggtgggcattcctctatccgactcttcagggggtagtcaagaggcagccctgcctggggacccccccccccccagctactttgctaaagctaccagggttgtgggagagagggaagaggaaagaagttcccaacactgaccagagtacgcagtggaacttgaaggagcagaacagagactctatggttttagagctttattatagaaatgcaggggaaagagagaaggtagaaaggaggaagagagagagagagaaaagaagaaagagaaaggaaagaggagagagaagtgacataagagagaggtgagaggacaaaggaataagcgagcgaggtgggggctgagcacccctttctaaggtcttcactgttgctaggtaactggggaggagtttagcctgaaggtcagaagcttgggccattgtttacttgactactgaccatgcttctcttgtggggactgtgggagatggtaccttaggcaggggctggagttccaggagcatgagggaacccctaccatgtcatgtaggtgaattatgaccatcggggttcagacctcagctcgactggagaccagcctgcaatttcccacagtatatcatgcccctttcccatgtccctctagacctataaagagtggcccagtttctagatagcacataggaatcttggttatatcaaaaacttaaatatagtagccaaagctgtaaaggctttctgtggattctagaaatatatggagaaatcagagtcaaaactgagtttaaggagcctgtggtattttagatttaagtcatgagctaagtcttcctgagcgtcgcacact

SEQ ID NO: 24180 - DNA, 2643 bp, Mus musculus
cactctcaggtaaatgtttaagcttgtcctgttaacattttaccattaatcagctaagcaagatcactaccttacttacaaggtccatcagcatcctgtgccatttcacagtcccactgggcataactacacttcactctgggtgccatacagaaacgtttaatctgtcactgtatacagtcatggttgtgctactgtttttcaggaggacagcctggagatttaaatggtatacagtatacagttcccatgaacagaactaggagaaatattgattgacatagcaatgagtgacaagactagcaacaaagaagtgccactttaccccgacttgctataaattctacagtgtttgttgtcctgtaataatggcccttctcattttaaagcagaaggctttcttagtaatctctctcagctcttgtgtttacgtgtgaaggtttagatcctggcgtgttgatgctagagaagtgtgaggctggcatatcttttgtgttcttgatatttccatgttattacctggtgctgctgctgtgtaactgttactcatgtataatgtatcgcccaaatcctcttgtgatttgacaaaagaaaagataatcttacaagaagtgttttcttggggattttttcaaaccatgtttcagagatacagtatgtggtacctgatacaaaattgtcttcttcaatctgaagaggtatgaaaaaatagccaatcccagatgtcttcaagatgacacttagccacccagctttcctattttgaaattttgatgtatgatgatttttaaagaaaagtgtttaacagaacttatacccacatcacagtgaacaagtatatgattcattcaggttactctttagaattagttattaggccctaaacatagtccctgtacataatccttttacctgatttggctctccattattcaaatatcaaaaactcctgggtttgatgttaatatgtagagtcaaaacaaagccaatactttatagttcaagattgttgtcattgtcaccatagaaaacaatcagaagagacttttcctccagggagtttcaggattagagccccgtaaggatattggtaacattcatatgcttagttatgattttttaaaatgaattataaatgaaaagaacgaataaaattgacagaagagagactatagcagtcttacccaatatccttgtcaggaagaagcactagtcatttttaaaatagggtgagaccaaaattctagtcaaatagattggcttaaagatactctgcagttgccagctgtgttgcttagcaaaccaaagagggagccacacttagagcagttggctgggctttccagtccaccagaagatgtgatggttggtgtctacagtgtatagagtgatagctgcctctgctaggctaaatttgaaactctgacttgaatcattttgctccttagtgcattagaccatggttgatgcaacagggcacatgccccacctgcagactccatgttttgcaaccagaagaattccctggccaccccaacgggcagttacccaagatctgatacaaggcaggtagctatacctaagatcagctttagacactgggatttagttctgctttttaatgagctaattgtttgaacagtattatgcagcagcatgtgccttgaccagctaatcaaaccaaagctgagtcaaagagattgagacagatctacagcacgtgtaattaaatggaagagactaaagaacatggattttattgctttttgtaagattttccatctgtaaacacaaggcctgtaaacatgactatcagtatatttcttagaatgtcctgccttttcagccttttttcttccttcttattctattgtcttttcctttctctcaagtatgatatattttattttcatgaaatgagtttaatagaacaagtagaagggtaggaaatttctatagactttagttttcttaactttgaaagcttagtattaaaatataattattgtaagttatatttctatcttctgaaatggccatacttgctaagattatggactttgacactggtgaccatacaatggtttgtaatagcttgggagaggtgattattatttttcagacagtacagatcgtttgtcaacttgttgttgccatgcaatttccacaataactatactgtagaaactgcaactaagattctcctttcccccaagagctagttcttaaaaattacaccacaagatgtctatattcccaatatttagcaaaataaatatagaatgaagttagaatttgaaatcaagaggtaataaaaggggcagatatgcaaattaagttatttgctgggataagtaattgaagttttacattcctttgtaaacatactctttggttcttagtcatttacatttggagtaattagaggtttttgttgttgctgttttgttttgtcttcgtctttaaaagtgtctcctttatgtagttgttctggggaagagaagaagccattatatgtattgctgctgcttatgacagagttgatatccactaaggccagttgtctatcaaagcttaagtttcaattcttagacaataaagcctattttaaaaactagtgtaaatacctgtaagtattgtaca

SEQ ID NO: 24181 - DNA, 1149 bp, Mus musculus
tttgccattatgttgccagtgttagtttacttaaataaaatcacagatggttgaaagccttctgggttagaagaatctgcagttccttctgcttaggagcatgctctttttgtctagagtttttgatagctagtcagagagcagcatgtgtattgagcactgaatatggtaaaattctcctgtacttcattccttgaaacagtcctgccctataggaccttagggtgcaatgtgagagactacatagaaaaagaacattaatgtggatttttcgattctccaaattcattttcagatgaagtgcctatcttcaaacttgattataattatttctatcatctgcttcatataattattatttctggtactgacatggtccggcaaatatttgatgaggctatgccacccactcttttgaaaaaagagctgcttatacacaagaatgtgctggaaccctactacaatcatctttggaccaatcaccctttgggtggatcatggcatctgctttaccccccaaacaaggagctaccacagtccaaacagtttgacttatgcctcttattagcgctcattaaacatctgaatgtattccctgcacccagaaaaggctgggatatggaaccaccatcttctgatctctctaagtctgcagacattctgaggctctgcaagtacagggatatccttctcagtgagattctgatgaatggtctcaccgagttacagttcaattcaatttggaaaaaagtttctgatattcttctgcgccttgggatgaaacaagacgatattgacaaagtcaaggagaatcccattgagaatatctcccttgattatcatcagctgtccatttatctaggcataccagtaccagaaatcatccagaggatgttatcctgctatcaacaaggtactaaataattacttacattagccagcaaaccattttttgagtgtctgttctgtgtttagggattctttgttttcctatttagggttttagagccttttttcagtattagaagacactaaattttatgatgttagatattagaaaggaacccttgaagtataatttggaagccttaaacaatacatttacccaaatgttttatatatataaaatgcatgtatatatgtgtatgt

SEQ ID NO: 24182 - DNA, 1179 bp, Mus musculus
acattctcacatgatagcaatgatccacagtttaagtggtggaaaaataagcccagaaactgtgaaccttagtatataaacattctggctttggggaatttgtgcatgaatacttttgttgtatttatatgttggaagtggcagtaaacggaggaaatcgtgacttcaaaacagttatcatttgtttgctatctaacttagtaaagatcataattgcattgatgttttatttattctttgggagatttttagattttggttttttttaatgtttactcttacatattctcatgtatgattatagtcatggattacttaatatcaaccatgaataaatttacataaatgtgctttttaagccctttgtgaacatgctagaatagacacacagctatcaggaatacagggtctttaggctgtatcatcttttgcaactatggtaataaaaatatgacctatcattaactaaaatatcatcaccattaccaagtggtgatatagttgttaagtagttttcttgatccagcagccttacagattaattgattaagatcaacaagtaaaaaatgttctgatactactcaggaagtttttttctaaaggtaacagaaaatagactgaaagaactttattactgcatttaagatgaaacaatatatagcctaaattgtaaatttggaaacagtgctgtagctatcagaaataatgtttaaaaatggagagtatccattatgttaaatgatttcatagtctcctaaaattaaaaattgtataattatttgcaactttcttttgttctttgcttttttttctcacgttctgttcttattttttgctattgttctttaattttgttatttgctttatagaacacagtttctctttctatcctaggctaatcttgagcttactgtggacctcatgtgtcttaactcccagtgatctcctcttgtaatccaggcactaggattacaagtggtttctactatatcagtataaatataactatttcttaaaatgttgtatgttgaaaaacctatcatcgctttcaagagtaattggatttctattctagctaatcagaaatgttatttcttgtagtataatacacatttaacgtattcaattgagccattgaattttatataaaagttatgtatccttgttttggtatttcat

SEQ ID NO: 24183 - DNA, 1271 bp, Mus musculus
cctcagaattgtgtgtgttacctaatacctattagttacacattctgttgagcacttaaaatgtggtatatggagctgaaaagttggatatttaacttattttaatagaagttctactggatatcttgacattggaatatgagatcatctacaatattttgggctgcattcatagctgtcctgagttgaatgctgtccatgggacccaggttagacttgcctaatggttcattttgtttcctatagtttcagttacaatgataaacttttatctggaagatagaaataataatgtttaaattttaaatagcgcatgattctgagttggtgaaatcttctgtcttcccactttattttagatcagttatcatctctttaccatcgtgtctctactgtatattctacttgcaatatggctacacactagtcaatccagttatcaggtcatgttctcaggaactgaaatgctgtattcaactaacccttattttataatactaatggctcttaaacatgcaaaagtagtcagattactatatcacacataaaggaagtaggataagtacaatggtattttaagataaatatgataattaaataaatcactgcatgatctttttataattaatatttttaattgtcgattgctatttcctcttagtaccttatttataaattaagctttatacctaggtataacgctgtgtgtgtgcctgagactctcacactttgagagcagagagacaggtggattacaagtttcaggtcaatccagctgcacatgagcttttattttacatgaggatgaaatggcggaggttgctagaataggagttagctaaattttataagacgtattttgtttctggttctgtgtacttcagattttaaaaccaaaaagtaagtgtgtgtgtgtgtgttgtgtgtgtgtttaatcatgttcatactattttaccatagttgaggatttaaagtatgtatactatgacccccccccaaaaaaaaccaagaaattaattactagttttacacaaatctgcataattttttggaatattgtctaaaatacacaactattctgtttccttttactatttatacttaacaacttgaacaaattcttctgtggtagtttgcataaaaatggccccataggctcagggactgttactactgggaggtgtgaccttgttggtgtaggtgtggtattgttgaagtgtgttgtagtgagtagcctttgaggtctcagttgctccagccatgccagtggc

SEQ ID NO: 24184 - DNA, 1173 bp, Mus musculus
gagagagagagagagagaagagagagaggtgtgtagaagacaagcctctgggcttgactcacctggcctggcctcacattaaaagttaagtagttataatagcagctgaatatttgaggagctcttgctctgaggagcagtcactcacggtgccaagttctctccactgaaaccatttatttcccacagggcctctgccagtgctgtggctattgttccaattttgtagaaagagacaagaagtttgtccacagctacccaactgtttcctggtaatccccgatttagacagtgctgttaaccagtagattgtctgcttgtcttgaatgtctgcgggaaggatggatgggtatctagttcaccactttgagcctatgaaactgttaataatagagcagaatgttggtctcgagtgatgatttattctacccgtaccaacagggactgctgggcactgagcggaaggcttgaggtgtggatgtgcccatgcccattgactttgtgcccagcctattgactttgaggccaccacatggcagtcaattatgttaacaaagaacgaagacttttcctttctggatttctagttcatttttgccgttcattctggtctgtactggaccacaggacatttctctcggtgatctctctggctgtgcatgtgaatctgtgaccatgctgcaagaagaagcctacacctttgaggacagttggtttacagaaagctgtgtcttgaagcacggctcaggacacttgtagcctttcctcagtgatggagtctgacctgagagctctaagctgaaataaaccctttgctctgtaagctgcttttggccatggtgtttatcacagcaatagaaacctgaagatagaccaattatcttggatcaactcaagagttagtcatgctattggctcctggctgatttggggggttcttcatctatactgtgacaatataagttctttcctacattttgatagctgataggtgctttcaagtactgcattgtactgtagctctttcaggcttaaggcccagctctacataaaacactggctgtccattctttgttttcttttcttttaacccttgtcctatattgatagatgatctttagtatgcactcagcagcatggccatgaacctgactgtgaaagccgagctctgca

SEQ ID NO: 24185 - DNA, 2334 bp, Mus musculus
tccaagaatgatgcttgttagatcctagagtctctgaacactgagtttaaattgattccgagtgagactcgccaagcactaacctgagggttagttacccagagatacctatgaaaaacagtggtatccagcaagccttagtaaactcaggttgccagcagctttgccacttccgctgctagctgaataacaagactgccacttctgggtcatagtgatagagactgaagtagaaaaacgaatgtggttgggcaaatcccgtgtggcccctctgtgtgctatgatattgatggcactggtgtcttcattcttgggggttgccatcattcacacacacccctttgacatacagtgcaccccagttttgaatacattttttttgcaccctgtcccgttctgctactttgatttgcgttatgatatatatatatatatataataccttttctcctctttaaacatggtcctgtgacacaatagtcagttgcagaaaggagccagacttattcgcaaagcactgtgctcaaactcttcagaaaaaaaggaaaaaaaaaaaaagctatagttgtaacatatgtattccagacctctggtttaaaggcaaaagaaaaaaaatctacagtgtttcttctcatgttttctgatcggaggcatgacaaagcaagactgaaatctgaactgtgtctcctgcatggcaacacgtgtctccgtcaggccctcgcaaggcccggggagggggttctacgcctcttgtctctttgttgcatgctgaacactcatcgccttcctactgtatcctgcctcctgcagcctccctcttcctcctcctcttcctcttcctcctcttcctcctcctcctcctcttcctccaagtttgaaaggtcaaacaaaactaccacattccctacccagttagaagaaaaccaccgtcctgacagttgtgatcgcatggagtacttttagattattagcacctgtttttacctcgtttgtgggcgtgtttgtatgtgcacatgtatgaagtcggcacatgcaccttctgtatgggcagaggcgtggcatctacagaagagcagatgccaactttgtgcttttagtgaatacattaaaaaaaaaaaaccaacggtccttattgagtggaattctatttgatgcaaatatttgagctctttaagactttaaaactagataatgtgccaagcttttaggactgctcaccagtgccctctgaagaaacaccagtactttttcctgtttgtgtaataaaggcatatttgtatttgtgtttgcatcactaatggttatttcttcttagtccactgaatgtttccatgtgcctctcgtatgccaaactttttgtcatctttcatgtggggaccaaatggtttgtctgtggcaaacctaaacctatgacctgctgaggcctctcagaaaactgaccacagtaccaagatagtacttcgcaaagaaaagtaggttccctccctggttttgtagctgtcgccaatattagcgtaattccaaggagctgaacgcctttatataaatctgatggcacctgatgcttttagttctgaaaatatttacactcggatcatgttgttgatgacttaaacaaagttttgatgaagagagcaaaaaaaaagcaggtggatttggaacagtttcagggttttttttgttttttgttttttgtttttgtttttttttttttatttttgtttttctgttctctgttagaaaagtcaggtgttctctgtcaggctatctttatagtcaattttttttacgaactaaagtagtaccttttaatatgtagtcaacgcccctctgctcggggttcagttttgggtcttaaccagctgtcatgttctctatgctgcctgccacttgaggcactgagtgccctagacagtcccatcggtggtagccagggaaacgaaagacgaactcaactcttgctcctaataatcaactctctgtatgaaggatggcagcattaagagtcctcctgcctgggcattattgggccagttcaccctctttaaatcaaacccgcagtggctcccagttctcgtcccatcagatttaaattgctaacagtatggggggcaccacgcatctgttttgtcccacaatgcgcttttctctcccaaatcccgatttctgctgtcatagcctctattcaatttttatttattgtctgccctccacttatacaatcgtagagagcaatgccatttgtcactttctgcaacagttttttgagcctttatggctgaatcccatttttcttctctttcaaactgtttgctccattgctcctcccgcacg

SEQ ID NO: 24186 - DNA, 1099 bp, Mus musculus
tggtggatcaaaactctaacttcatttaacccccttcttgagtgatcttgtcaccccggcagcctattccccacaagtatgagaaatcattttatcagatgttgcctggaagccatactgaaataattcccacatgatcactgttgtgctccttctggtccttacaattgctggaggaaaatgatgacaacactatgagtggaaggggcatctgaaccatcagggttggagtctgacgtgttgaatcccttgttttcttactaggtcagatgctttgctaagtcataaaaaatgtgtttgcactctgcaatctttggctcagtgtatggaagtgtttgcactgatgtaaatgcccaagcacatgataaattgctatggaacagacattagctgaaaactgaataatgcgttctgtttatagggtggggtggggaataccgcataactctgctctaagcttggtatttgatgttaatgtgaagcagtgggtccatgctgcctgctaaactactgtatgcgtcataagtgttgtgaagaccagcagctgaaggctggaggacagcagccattgaacagaggagaagcaccactggcttatcgggggagaggaagaaaatcagaagaggcccagagtcaccatttgtaagagaaatgttagggtgttacatgacgctgttgagagccacacttgattgcactgctccacagagccctcagataaggccaatcctcatgggctacctcggctttcaaagttaacttcagtaagtctttcacctctaccttcagtgccacgattttccactgcagtgtttcaacttcacaaaaccgacttctccggagagaacaacaccttgctgcgatgggcagtagaagcaagtgcttaccacatttgacctgtaaagtgtttggagtgatggctaggtggaaattggatttagcttctccccacacatccttgttttgcactttatgcaaagtgtactaattgctaattagatgttgtttctgttcatacaggcattcccaaagagttagactggacttggttttgagtttggggattgttaaagtcttacttagattaactaacaacatg

SEQ ID NO: 24187 - DNA, 1864 bp, Mus musculus
acttaaccacctgatgttcacagtgtcttgtttcctagcaacagatgcaaagtgatacatcaaaattaatctgaggctacagactttacagggtatttgttccatagcacaaagtatttccccactcttgcatcacagcacaaactaccaaattttgattttttggatcccagcaataatttttaatagttttcaaactggtggaattttgatagtgctagctggagtttgaagcttttgaattagatctctaaatggtgacagtttacatggttttatctagctttcttatttatacttgactgaattgtaatgttttttttttctaattgtaatttgacctaatagccatataaaatgactctattaatactgtctaggtctagcttctcacggttgtagatattacttcagttccggtgctggaaaatatgtacaacaatactaacagcattgaaaaacatagaggtttgttttgtttgttgttgtttttccaaagcaggtggggagggcagcaaagtattagaattatgtcctcagactttgtttcttgtggggatgacggaagcaggaagtggtgaaaggtgaatcagtagggatagcttaaccccattcgcgtgaagagccccagattttagcatactatttttactatgataacttttaataatattttctaaatttcaaaacaaaaacctgaatgattgaaaattgctgggtcctgatgttggtggctgttggcgtttggaccacttgctagcagtgatttaaacatgataattagctaaccccccaaaaataataacaaaaatagaaaaccaacaattgcattggtgcagaacatgcatcttgacaatggtactaacttgttattctctagaacacattagaatagatctatttttgccagagcaccctccctcagtcctccgatacatttcactagagtcctttaagagattgctgtatattcctgaaagtttttttttttaagaagcaaacaagagataacttttttctacatggttaatatcttacctggtctgcttttcctaaaccccaatggcttttactttagtcagggtgggaaggggagggacttactggatatgactgttttcagattctttaaaaacaaaccttttttgtagaaatgcttaatttttaagcggttaggcactgagagtagcagaaatcctgcaaagctttatagttctccaagtgaggtcttgatttcagtagctgtgcttcttatgccccggctctgctggagaggggtgttggtattttcaggtaacatttgttagcacaaatctttcggtctgttacgttgtccttcttcactctatccgtgttgtcatctccatttcacgtctctccttctggaaactggcgttgctgtgttgctctgatgtgtacttgcgatccgccagcaagcaccatccacactaatattcgtctcacagcatcctcatgaagacaagtcgttgcaccttatgtatatctcaagcaaaccaaaatgcaatcttctgctttgttctgttctaaatcattgtagttatatctttctgaaaccattttgcatttagttgaaattgtcagtatttatgcttttaaccttctggattcaagcctgtatataaaatgttgaaagaagcccttgcccttcgctgcagggctgggagtggaaggctctgtctcaggtgcacacttagtactcttccagcattctttagccctttatttattttaggtattctggtatttccgatgtaattttgaagtgtctagagtatattatagtaactaaaactgcagctctgaagctgagtgaaagaagaaaatactgtaagatgtccttgaa

SEQ ID NO: 24188 - DNA, 1098 bp, Mus musculus
agtgggaagcacagactgcagacaagtgcttggtgccccacacagcccagaaccacttgaagcagaacttagcattctgggcccatgtgttgtttcagaagccacggtttctgagggcagtgctactgtgtgatactgagtgaaagcccggtggcctagacctttgctttgcatggaaggaaggcttttgatggtgaccagtggtgacttggtaaaaggctgcctttgctgtagctcatccagcacctcttttaccaaccagagagcgtgaaactagtttcatatattatctagttattctttcaaaacaaacaagaaaaccctgacgcactgcactagttattattagatattcttagccttttgtacatgaagatttaagttctaagatggtttatataataggttatacctacatttatattgtagaataaatataaaaagcctgtaccagagcctcccaagcagcacgggcaggcagacgtaccattgttagcggtgtatgctcggcctcgtggtccatatattctgcacttttatatttgccaccagagtggtagtggtagtttgctggcagagagagagagagagagagagagagagagagagagagagagagagagagagagacagactgactgactgtgactgactgagaaagagaatattacaattcttacaatctgaatttttttcttagccttgagtgaccaagaagaatttgcttggggcaaattgtggcaaatattttcccagacaggggaagcatcctgcagattacagattactgatgttttcatgccttgaggattcttttatttttacacaggggtctaagtgaccaatggatcgttcatataaacaaacaaaaaaaaagacaaaaatattattcagaagtgaccttagtattacttcattattctaaacacattgaagatgctcacttcatatggacttggagcttcagaccttttacatccatcacacacagaccagacgggtggtgattgctatgcacggcctaataggcactgcaggttttaggagccatttggagtttgtattgttgaggaagtattgagtaaacgaggggggagg

SEQ ID NO: 24189 - DNA, 1188 bp, Mus musculus
ctttatcagggtcatctgaagagactttcaaaagagcaatacttagtagaatgctgttacctcagggctcaccagtgaaaatcaataagttaaaacaatgctaatccacaagtgtccctcctaattgggaccctggactgacaaagatgcttcttcttctcaacaccattattttctataaaactgttagtgtaggctatgtggcgaaactacccttttaggtctgagtgtcttctttagagttaacccagcccagttcacatctgtatgtagaaacacatggtcccacagttagtaaactgcagttcaagaggagatgagtccttgtgtctgtggctggattctctgaaatcttgttatctcaggaagtcagatgatgtttcacaaaccacttggccttttcttttcctaacacaattttcttttcaccgttggaccctgtgctttgcacttcttaccacacgttttagattttttttagcaaagggaaatgagtatgttttggggatccccacctgtgaagtagcagtggcactggggagttgagcagaaatccctccagagtgacaggagggataagcaaagctgaggcttatgaaagtgcaacagacattatttgatgttcattgcaaatccaggttgggcttctttcaccttgtctgaagctttgagttttaaggctatctagtcattaaacttacttgaattattcctaactaaattgtagcaaatttttttattaaagcttttatatttaaagagcttacatatatatttccattggcccatgctaagctaagaagcaaagaaccagtagtctaagcctgagtacctatgatgaaagctattctgctcttgaacctgggactaggtctaaattataagaaggccttttctctgattgtggagtccatactttcgatagtgcttagaggcatgcttaccgggtgttttgaggcagtgctgtgaaaccagtaattgctgccttaagcctgtccccacacagccatttgtgttgcagtactgagatactgatacacggccaaaaagaagtccatactctattttggtggaattgtagtaattttcctatgtgtttggagtatgaatcaacctcttcatttcagatatctatgatttccagggcaaaaaaaaaaaatctctaatttgtagtcctcttttgtcaag

SEQ ID NO: 24190 - DNA, 1177 bp, Mus musculus
tggggctttaagggggaaaacatggtatgtttaaattccaatattgaagtgtctgtgagataagtaggttgaagtactcatttaaaagtaaaatatgtctgggttttggaagagagaaatgggcttgaaatacaaatttgacaatcgtccgcatgtgatacctgaagcccttagatcaactcaggaaaatagaagaatgaagactgactgaggaactccagcccaaggcactgcaaaggacacagcccacacagggaacgcgaagtaaaagcccacagcacaggcgcatgctgtgatctttgtttcttactagttctgctttaggtttattgttgagctatttactgaggtagccgtagactacatattactactactactgcatattatatccatgcctgtcacttgggttttaccccttgttgcttacttcacatggcttatagtgccatagccatcgcataccacagtcaagactcccagcatcccagggacccgggccattgcccgtactgtagactcatccactttctttctcctccgtccttttacagtccctcgaacaatatctcttcatttccaagactttgtcatttcaaagccagtttagaaataaagttccgtagtatgtgggtagtctcttgagctgacttttggactcagcattattttctggcgattcatgcagattgtgtatatcggtagtctgtttcttatggctcactcatattcttaatctggaaacatactttattaattttcatagaaacatataggctaatttggatatggaactatcaggagtgaagttgctgccaataggcatatacattcttttgtcattacttccttaattgatttttgtgtttgtgtgtctgtgtctctgtctccatgtctgtctgcttacaccagtgccatctatttggaaagctgtccttactccattgaatcacttttggacctttcttaaaaatgagatgggctggagagatggctcagctgttaagagttaggttcacaaccaaaaataagatgagaatatttgtgtgattttaattttgggtctctagtatttcattgttctagatgtttctgataacaatgcattcttgattactgtagctacatgtcttaaaatcaagaaggttgatttttttctttattattttttattgtt

SEQ ID NO: 24191 - DNA, 1145 bp, Mus musculus
agaggaggaaggaactaagggagggcagagggctgagcacgaacatttctagctggatgctgtttacctgaaccgtcagcctagttctgtgtactcagagtattttttgagctcctgccatgttctaggtgctaacctcgtggaacttcctaaccttggagtgacaattcaaaattgctttttggcattctctcccagaggagctgtgccattagctctccctctgttagaaaccagccacatgaatgcagtcctctgcctctgccatcccgatcgatcggacaggtacgtgtttatttaaagcagtttcacatctgcacacgaaataagccacagggttctaatttgcttttctaatgcctttgtagccaacgtgggaagttccccatttttttgtcttacaaagacaggctagtctgccgaagctatgcacaactgactgcaagtttaatttcttctcagagatcctcttgcaagtttggtatgatcttcaagtaatagttcttatcttattagtcattgagttatcagatctttattgctaggctgtaaccaacccttattacttctgcacggtggtaaaatcttacacttggtgtatcttagagcctgcactgtgattgtatttactgattttacttgcacttaagaacactctgtgaggtaactagtatgacattattcccattccacagacaaagacataacacttgcttgagattagtggcttgacccaggagactgagtttgtattggctcccccagggcaagatttacatattctagcctttcttctagagagctgcccctgtataagacagactgggtatttttgtgctaagatctttcccccttattttcagcttgtttagattgctgtcacctagaacagtgtgctttaggaacaagtgatttagctgtttatgtcataaggcctgcaaaatatcaatgaaatgaatactacacttccgatttgcttagataagtgtttaagataatgtggatagtttgtctactgataacattttttagagcataagatgggaaattaaaaggactgtatacggacaaagaatgagcttagagtatgtatatgttaggatccccttccccttcccattccccttccttcccctccccttcct

SEQ ID NO: 24192 - DNA, 1121 bp, Mus musculus
gtgatagccagaagctggaaataacccagatgtcccacaacagaaaaatggatacagaaaatgtggatcatttacacaatggaatactactcagctattgagaaggaggacatcctgagttttgcaggcaaatggatagaactagaaaatattatcctgagtgaggtttctcagaaccaaaagcacatggatggtatgtactcactaataagtggatagtagccaaaaaaaaaaagtgcagaatacacaagaactaaaaattttcctgtatatctttatataggatttatttgtttcctctttaaaggcttctaccatctttataagattagatttaaggtcatcttcttatacttcagttgtgttaggatatctaggtcttgctgtagtacagtatctgtcctctgaaggtgtcatattgcctggcttttgtagattgtgttctttctagggctattagccatctgaatggctttggtccctggatgttcctgttgtagtaggtattgggagggcagttaacctcgatgatccttgtgtgttaggcctctgattggctgaatggttcctcttcaccaggcctgatgaagttgaactgagaggtagtgggagaatgggggtgtggtagggattgcaggctgctcagggcacatgggataccctagaagattcagtgggcagagcgtatggttgtgggaagagaatctatcctgtatgcttgcagattaggaggtctgatgaaggtgggtagagatgtggcaaaataatgcaggtcctaggatgctatcagattacttgggacagttgggggtgccccagaggacccagcatgaagggaagatgagtccagtaagggaatctaagttccaaatgctttcttaattgtctgttaactggtaaagagtatagaaattactgttgtttaaacctaggtgcataagttataaaaacatatacccaattgcccgttatgcctgaattaaataaatgtagctgaccagctctgactgaattctggacttaatgtctagtataatgaataagatcctagaagctaggtaccctggatatctcccagtctccaatatgtattcttttgcctaacctgtaatgtcaaaata

SEQ ID NO: 24193 - DNA, 1636 bp, Mus musculus
cctgagcgtagtatcactattgacatctcctgtggaaattcaaggccagcaaatactatgtgaccatcattgatgccctaggacacggagacttcatcaaaaacatgattacaggcacatcccaggcagactgtgctttcctgattgttgctgctggttgttggtgaatttgaagctggtatctccaagaacgggcagactcgcgagcatgctcttctggcttacaccctgggtgtgaaacagctgattgttggtatcaacaaaatggattccaccgagccaccatacagtcagaagagatacgaggaaatcgttaaggaagtcagcacctacattaagaaaattggctacaaccctgacacagtagcatttgtgccaatttctggttggaatggtgacaacatgctggagccaagtgctaatatgccttggttcaagggatggaaaatcacccacaaagatggcagtgccagtgcaccacactgctggaagctttgaattgtatcctaccaccaactcgtccaactgacaagcctctgcgactacccctccaggataaaattggaggcattggcactatccctgtgggcagagtggagactggtgttctcaaacctggcatggtggttacctttgctccagtcaatgtaataactgaagtcaagtctgttgaaatgcaccatgaagctttgagtgaagctcttcctggggacaatatgggcttcaatgtaaagaacgtgtaggtcaaaggtattagacaaggcaatgttgctgatgacagcaaaaacgacctaccaatggaagcagctggcttcactgctcaggtgattatcctgaaccatccaggccaaatcagtgctggctatgctcctgttctggattgtcacacagcccacatagcatgcaagtttgctgagcttaaagaaaagatcgatagtcgttctggtaagaagctggaagatggccccaaattcctgaagtctggtgatgcagccattgttgatatggtccctggcaagcccacgtgtgttgagagcttctctgactatctgccacttggtcgttttgctgttcgtgacatgaggcagacagttgctgtgggtgtcatcaaagctgtggacaagaaggctgctggagctgccaaagtcaccaagtctgcctagaaaactcagaaggctaaatgaatattacccctaacacctgccaccgcagtcttaatcagtggtggaagaacggactcagaactgtttgtctcaattggccatttaagtttaatagtaaaagactggttaatgataacaatgcattttaaaaccttcagaaggaaagaatgttttgtggaccttgtgtgtgtgtgtgtgtggcagttttaagttattagttttcaaaatcagtactttttaatggaaacaacttgaccaaaaatctgtcacagaattttgagaccattaaaacaagtttaatgagggaaaaaaaaaaaagatactacactgtctctaagcaaggctgtacatcaagtgttacagttccagactccaaaatgttctccattttgtactccaggacaaaaaactcctatcagacttatatgaagctaattatcacctatgctaacatcacttagtatgattctctg

SEQ ID NO: 24194 - DNA, 1122 bp, Mus musculus
tttctttgggaaccatcactgttgagaggtgggggaaaacctgaatgtaaaaagcatttatttgtcaataaactgccttttgtaaggggtttttatatactataaaagagcttctcttgttagtttaagttctgtgacctttaggttcccgaactctccctctcatccacccaggagtgtcataatgctgtaaaagtgactgctgcagatgcagggaaaacaggcttgcaggagactgcttgtactccagtaccataatgagatgccctgatattaatgcctgcatcactttcaggagagatggaaaaggggaccaccgcctggaaatatgttaatatgcctttagataaggtcatggacatacatgcctttcccaagtggaatagagcccattttctattttatgatgtcaccctggctcctcacagtgtgggagccccctaaggcactgacgactgttatgtatcactgcaactgcaggccttgtaagttgcaaaactcttagtaccctttctccactcatggtaggagtcctgtttactctgtgggttttgttgttgactgctctgtgttgcccccatccaggcagatgaaactgtggttacttctaatctatggatatcttttgaccatctgtaatgtgcgttgcactcttgtgggctttgaaagcacaaactctcacacatggactccatcatattatttgtgtagatgcgtttggtggtaaatgtctccagtctgatggatgaagcttccaagattggtgtaaggactttagacctctgtggcaatttcaggtttttgggttgggttgggttaggttgggttggggtttttgtttctttggttttttgtttttgttttgttttgtatccctaatagtggggggaaaagaataaaaactatctctgtgcaagaatgcttgaaccacattttgatagtttctaaacattgattttaggcttgtgtggatgtttcttaccactcgttactccacacctagtctcacatacagagatgcctcggataatcacttatcctgacaaatgacaagatagtaagtacatcagacagatccgatggagctgccattgtacaagactcatggacaaagctgtgttt

SEQ ID NO: 24195 - DNA, 2473 bp, Mus musculus
tcctccaagagttttattacgagaatgagcttggaaagaagcagttcaagtatgggacccagttggttcatctggcttatcgggaacaagtggcactgtatgtggacctggatgacatagctgaagatgaccctgagttggtcgactcaatttgcgagaatgccaagcgctactcaagactgtttggtgatgttgtgcaagagcttttgcctgagtacaaggagaaggaggtggtgaataaggatgtcctagatgtttacattgaacaccggctgatgatggagcagcgaagcagagaccctggggcagtccggaacccccaaaaccagtattcttctgaactcatgcgaagatttgagttgtatttctgaagcccaagtagcagcaagcctcgagtgatccgggaagtacgagctgactctgtggggaaattgttaactgtgcgtggcattgtcactcgtgtgtctgaagtcaagcccaggatggtggtggccacatacacttgtgatcagcgtggggcagagacctaccagccaatccagtctcccactttcatgcctctgatcatgtgccccagccaggagtgccagaccaatcgctcaggggggcggctgtacctacagactcgtggctccaaatttgttaaattccaggaaatgaagattcaagaacatagtgaccaagttcctgtgggaaacattcctcggagcatcacagtggttctagaaggtgagaacacaagaattgcccagcctggtgaccatgtcagcgtcactggcatcttcttgccagtcctgcgcacaggattccaacagatggcacagggcttactctcagaaacttacctggaagcccactggattgtgaagataacaaagagtgaatatgatgtctctggggccggagagctgagctcagaggagctgaagcagattgcagaggaggatttctatgagaagctggctgcttctattgctccggagatctatgaacatgaagatgtaaggaaagcactgctgctgcttctggtgggtggtgtggaccagtctccttaaggcatgaagatcagaggaaacatccacatctgccttatgggagaccctggtgtggccaaatctcagctcctatcttacattgaccgtctggcaccccgaagtcagtacacaacaggccgtggctcctctggtgtagggctcacagcagctgtgttgagagactctgtgagtggagaactgactttagagggtggtgccctggtgctggctgaccagggtgtgtgctgtattgatgagtttgacaagatggccgaggctgaccgcacagccatccatgaggttatggagcagcagaccatctccatcaccaaggcaggaattctcaccatgctcaatgcccgatgttctatcctggctgcggccaatcctgcctatggccgatataatccccgccgcagtctggagcagaacatccagcttccagctgctctgctttctcaattcgacctcctctggctgattcaagaccggcccgacagagacaatgacctccggttggcccagcacatcacctatgtccaccagcacagccggtagccccctgcccaatttgaacttttggacatgaaacttatgagacggtacatagctatgtgccacgagagacagcccacagtgcctgaatctctggctgactacatcactgcagcatatgtggagatgaggctagaggcccgagccagtaaggatgccacctatacttctgcccggactctgctggccattctccgactttccactgctctggctcgacttcggatggtagacattgtggagaaggaagatgtaaatgaagccataaggttgatggagatgtcgaaggactcccttctaggtgaaaagggacaaacagctaggacccagaggccagcagatatgatatttgccaccatccgtgaattggtgtcacgggggcggagtgtccacttttctgaggctaaacagcgctgcatatctcatggcttcacaccagcccagttccaggcagctctggatgaatatgaggagctaaacgtctggcaggttaatacttctcggacacggatcacctttgtctgatagccagtttttacaccctcctgcctacaacagagggcatgctgaatgccccctcaagaaaaaatatcattttcccatgctgcactttttttattctgccaataaagtgttttgattgccaaaaaaaaaaaaatacaacactgaatattttataggtgggtgcatttgatattttaatgattctagtaattcttatattcatgggctaagaactgtacattattttcttttaattttaaactggattattgtcttttcacttttattggatattttatttatctacatttcaaatgttatccctatttccagtttcccctgcagaaactgcctcttccatccccactcctccttcttct

SEQ ID NO: 24196 - DNA, 1099 bp, Mus musculus
cttttctgttatctatttatggcaagtcttctacttttcataaatgctttcaggaatatacagctttaaatattatactatctctcttggtaatttttttatgtaaaatattaagattggatttataataataatatatatttttcctgaagtgggaaggggaaagcagtcattggattagtttccattcataaagaaatacgaggctcagttacacggttgtttaatgtatattctttgttttgttttgtttttctttttttcgagacagggtttctctgtatagtcctggctgtcctggaactcactttgtagaccaggctggcctcgaactcagaaatctgcttgcctctgactcccaagtgctgggattaatgtatattcttattttgccacatctgtgttaaaagaagtttattgtagttatgtttttaactttaaatacatagtacttttatttttttgagacagggtctgtctaaaaagccctggttgtcctggaactcactctgtagaccaggctggcctagaactcagagattgtgtttgcctcttcctcccaagtgctgggattaaaggcatgcactaccgtgcccagccgtggcgcccttgttcttgaagtgaagcagaagtagtttgtaaggaacattttcaattttttttttctttttttgaggtgagggtctcattatgttgtctagggttggtcttgaactcctggccccaaatgatcctcttgcctcaacctccagagtagttgggactataggcacagaaacatttaaattgagaattttggtgataaagtctattgtgccatattacagttaagcgtcatgtaaacaaggtgggcctcatagtcctggagagaaactgacccccatctttctaggccgaggcgcttcttattgttaatgggtggaatcacactggactttaattcttttcattaattttagtggatagaggggattgctccttagagtggccttgtcagtacatttctttggatgttttgtaatatttgtgtgtgtggtgctagcatgctagacaaagcacggtaccactttacaacattgcagccccgtgttccagatta

SEQ ID NO: 24197 - DNA, 1194 bp, Mus musculus
tggagaaaggagacatagagttagtcacttggaaccatgctgttcaaatgcctcttttcattatgtactcttttaggctgttgacatttatgtgccaatactttggggaagaagtagatcgtaagaaatcaatatgtattcatcattatggtcttgcttttatttctatatatacttcaccagaagagccaaagctacacttcacagtgtgtgtgtgtgtgtctgtggaccacaggagttacagccctgtgcatgccccatggagctgtgtctcagtccttatttcactcgtgacctttgtcccttagtgaagaacgtttaaaatcctgatagactgcaaatgttgtttttttcctgaagaattttttttatctaatctctgaaaagtgccatattcgaaggacaatgtactggtgactaagaaaagataaatccagctgggcttggtggcgcatgcctttaatcccagtgcttgggaagcagaaacaggcagctcccatgagttcaaggacaacctggttaaaagtaggtgctaatatcatccattattctattaaagccattagagccctttaattgaaagtatataaaaacaaaagttctggtccttccagaatagagttgaggaccatgtggtacttgctgagaggaacagctctaccttatggcgagctgaattcataaacacatagtactcaggttgagaaggcttgcatttcattctcagaaatccagagtcctttgacaaggacatgttttctgggttttataaacagaacaagtcttgagttcaaactatttcctctagtatagatgtgtactattgaatgcttgattgattaaaactgaaaagttaactctgaataataattaccttttataattttgcatttcttttaaaatacttaatttgtatgcgtgtgtttgtgtgtgtgatagtgtctgtctgagtgtatgagaatatgtgtgtatgtgtgagagagtatatatgtgtgtgctgtgtatgtgtgagaacttgtatgtgtatgtgagagcttgtgtgtgtgaaagagagagtgtgtgtgtttgtgtgtgagaatttgtgtgtgtatatgtgcaagggagagtatttatgtatgtgtgtgtgcctgctggaggaagccagaggtgggtgtcagctcccttgaacctggagctgacaggtgtttgtaaacc

SEQ ID NO: 24198 - DNA, 1196 bp, Mus musculus
tcgtcaggtagcgcaggatggcccggtagctctcctcgcttgacatagccgccggcagcgccctcgggggcgcctgtcagtggtaaggagaggcagacagcgccgcggctcgggagaggggccgcggcgacccggggaggagcgaaggcgacgcctgtggtgggcgctctctctctccgagggcgcccgcctgcccgcccgccggcagcgcggaggggaagaaccgaccacctggtaaccagggggaactgcacttcggcagcgcgcgggatccgctggcgactgacaaaatggctgctgcaccaccggaagtgacgcgcgggagcggggcggggccgccaccccgattggagcgcgctacggctctgcgctcccagggagccggcggtgtgacgtcaacactgcggaggacatgttggaagagggaacgcgctctctcgggcagatacgggggtcctcagcagacatcttaagtcttggcagggccctcccccaccgccctccctttcctttcccacgctctctgtaaagccacgtgtttgagcggttcgctgtttgtttccctgagaccctccccgtaaacggtaactgagtcagttgttctgtatactctgagactagatataccagataccgccgagtttgaaactgtagcaattgattgccactgtctgagcctctgggccaaatactgtcgcagtattaccgagcattaagtgcttcagtgttacgaattttctccaaactacctaagtaattttctagaaacatcaccatggtgacgactatgcaggtccagattgcttagatgattaaataacatgcagaagtaactctcaatcccgtttccttgtaatgcccggacgctttgtgcttattccttgaagctagaaggttccaggcttcccaacccaatgactttagttaaagaagctatttttctttatttctgcctagaagacacacacattatctatgacgcttttaaacgtttgtggtaccacaggtaaggagcaagcaggtggcagtgggctcaagaaaccagacagtggttagagtgtttccatcgtctatgaaggaaatgaagggtaaaaatggagagcatctttctcccaagagattcagatacaggtttgtacagggtgtggcttcatgacctttgtactttaaaaaaaaaaaccgctaacgggatattt

SEQ ID NO: 24199 - DNA, 2123 bp, Mus musculus
aagaatggtgtaagactagctttggagccgtttttctttcttctttttttcttttccttttttctttttttttttttttttttaagattgagtggtacactaataaatgagagtttgcaattagaggtaatttatgttttatatacagatttcaagacatttgctaattttgtagtttcacatgattagtttccaagggttacagataataaagaaatcacaagtggtacctttctaagaattgcatatttttttagacacaactattagcacattaagagggaagccaaaagttattgtctgcttcaaactggaagcagttcctctcctgacttctccctcgttacccgactgtccggctccctgcagcagccttaccgagagggagattggcttgagaagccagtgttactgttgtgactgttggctgagaggaagtttagatgaggttcaagtaaaccctttcctgcgggcatttcgttttgtttcgggccattctagctagtactgcttcgctctcagtgggtaccgatgcttgctctgtaaaaataaatttttttcgttaaaaattcttatatgaagaattgagtattatgactagcccactctaacggagtgtgtctccgttgaggaccttcagaggacactatttgctaccaaagtgaaccagtattctgaatgtgcttctcttggtttctgttctagttcctagaagcatttccaccagaacttgaggcaaaacataaggaagctgtttcttttaaagtacaaacaccaccaaaaatatcagtgtacatagtgctttatgtatttggctggcttttattttttaaaaggtttaaataacaaaaaaggaaaaaaaggtatagcattgtatgaaggcagatgaggcgacacacctgtgacatttgaagcatttgtgttactaacttactagatccggtttgaattgaattcacaaggtttcttacttgtccaactccaggcttattttacgtacatacaacctgaccagtggtttcaaaagcacatttagtgactgcaataggacagaaatgcttctctagacacatcttcattgcgagcgtctcatcgcatatgctcttagagttctgaatgtaggatgtttgttttgtatttttgtattgtatatgggctttttaaatgtgacagttaaatgcatctttaatagtcacagacaaaagagatgataaaatgtcctttgaaaatggcaatgttgagtttggaggcagcttcggggagtttcctgggtggcgatgattcactgggcagtttttaatgtagtgacttcaagaagcagcctgcggatattcctaacacttggttcactacagtttagtttacttcataagccccaagtaaaacgatggaaatgtacatagcactattagttcatacatgatttaagtatatcaagatacataaatttaacatttatgtctgcaaactgtccatttgtccattttactgtttgttgaaataacacctctcctacatattctttacttgactcgaataacaaattaacctgacgtcaagatggagagagacgactgagctgaatgtctttactaaaattacaataaattttgtcaaacttggtggtggtcttattttctttctttttttttttttactgtgtctttgaaaatgttttttaaaatagtctgtgtatatggcatgctggtgagttcaaggagacacaaaacattgtgaaaatattgccacttagaagcatgcccccagaacctcttactgctcattagacagtcgtcagaataatgtgttagcattatctgttactctacctgactctggtcggcagattcttgcattccatttacaatgctcttatatactctgtccgagaggagctacactatcagctcctgagatctctaaagacttccttttcctgtgtgtttattgtgagtgtccatgcacatgtagcactgtactctagtagatcagacagagcacactctgagggattctgttcttctttttactctctatgcactgcatctcaactgtgcccccctcccccccccccaacacacacacaacacacacactcctcctagttcgtcccccacctccct

SEQ ID NO: 24200 - DNA, 1162 bp, Mus musculus
cagggtttctgtgagggagataaaaaaggaagtagggaatttagcatcaactgtgtatcttatttgatttttgttactttttaaaggtatatattttaatgcatttaaattccaacattgtaaaaatactactggagaatagggagatgatggcccagttggtcggtttgctgcagtacatacaacctgagttctgatctgtgaacagctgagcatggggatatgtctgtaactccagctctcagttggtgaaaagctggttcagtgaaagccctcattccaagagtaaggttaaaaaaggggtagaggaaacactcagcatcagccttgggcctccgtgggagcactcacctgcatgcatgctccacacacataaacaggttaaaatgcatggatgaaagtaaacttagtgtctgttattttaatggcatcattccctaagtttaagcaaattaatgctttttttttagttaatggccagccaagaccccttgaatcaagtcaggtgaaatatcttcgtcgagaactggtagaacttcgaaataaagtgaatcgcttattggatagcttagaaccacctggagaaccaggaccttccaccagtattcctgaaaatggtaaactggatttattttattttattgtcatgaattcttttttttcatttttgtggggagaggattatttgattgcttcttggagtcaggtgtcatccttaatatctttattctccttgtttatgcttttgtacatgtcaacattccccaactatttgtcaagattactgtaaacttgcactacagtactttaattgaatcatagagctctgggaggacagggcctggaatcccattttgaagtactctctaggacgggggaataactcagtggtagggtgcttgcctgacatatgcagcactctgtactcagtccccgtactgaataataagtaaatgtgcagatggctgcataaggagtgcttttgtgatgatttctttagtttgtctcagtctgtacagtaggccagttttcaaacacttttgattcacggattgttattagtgtgataattaatgaatcttagaaatcgattttctgtagtaaaaactatgtttcaaatgtaaaatacttttagattagtactataagtattatattaaag

SEQ ID NO: 24201 - DNA, 1183 bp, Mus musculus
ggaagattcgcagaagagggacatataaatatttcatgaatccagccactctttaaaaattcttgatccttgatcctttaaaattatttacttaaaaatctataggcagtatcacatctttttaaagttttaaacttattcaaattttaaacttctaacacttttctaaacttccatgttgttttcctttatgctcaaagggcaagtatatgatatagtatgtattgtgttttaaagaagtcaaaacattctggttaccaaatttaagatctctataagtcatttaacttctcatctgaaaattggatagtgatttctaatctgtgggtatatttcaaaaattagggtgaggatgacatttaaaacacttgtcccagtgcctgatatatgataaatgtcaaacaaatgcaaatttttgttttatttttatttgaattgccaatcttatagtaggagctacaatatactcataatccacacagcagtagatttggtggggacaagagatatttttgctgtgtttaagtgaaatatctatttcttgtacctgtaggtcatggggagtttcaaaggacatgctctccctgggagtttcttcttcgccatgggcttttggtggactatgaagaacatcctgaaatctgtctacaaaaggcaaactcgaacctgctaccttaactctaaaacattattacgtcggacagagatttgggaaggagttgttgtgcttttaatgtctctcactggtaaggagaccattcatggatgtattctgttttctccttttgagtatttcatgagcaaaaaaatccattcaatacaatattgaaatgtacaaaatgaattttgtattactatgttgcttagtacttaacccaattacagtttacaactgtcataatcttaggaaagtgacatttcataattattcaaaagcctaatcctttttttttggtttttaaagatttatttttttatttattcatttaatgtttctatgagtacattttagctgtactgatggttgtgagctatcatgtggttgctgggaatttgaattcaggacctctgtttgctccagtcagccctgctcactacagtctaaggatgtatttgattatatctaagtacacagtagctgtcttcagacacaccagaagagagcgtcagatctcattactga

SEQ ID NO: 24202 - DNA, 1194 bp, Mus musculus
gttattggtcctattttacaaaggtggaaactcagacactcaaaggttaagtaacctaccaaaagccacagaggtaacaagtgataaagagttttcagacctacattaatttttaacattttagtatcagttttgggctggagagatgactcagcagttaagagcactgactgctcttctgaaggtcctgggttcaaatcccagcaaccacatggtagctcataatcattggtaatgagagctgatgctctcttctcatgctgtctgaagacagctactgtgtacttagatgtaataataaagaaatctttaggccagggaccagaacaagtggggtcgaccagagcgaacagaggtcctgaattcaaaatgcccagaaaccacatgatggctcacaaccatcagtatagctacagtgtacccatatacattaaatcaatcaatcaatcaatcaattaatcaatcaatcaatcttttaaaaaattagtatcagttttagttgttattagggaagtctgctgtgtggagggtgtggcatgatgcatatgtgggttgtagaatcacaagggttctaggatccaacttatgttgtcaggcttgggtggcatttgctttcgcccctcatccatatagtcctgctctctctcactccattttcaccccattattttcactaaatatattactggttatttgaaaactgtacttttagtgtctgcataatttcttgaagcattctcttaatcctttgacttaggtcttgtttttatttgatcttaaatttcaaaacttttttttaaattttaaaacttttaattttaatccagagtcttaagattctagacactcttacaaacacgtttattatattaagaaggaacaaaatgtatcaagatcattaaatcatacaaaattcctttcccaaaaagaagagggggggggcagaggatatataggctgggtgggtttctgaattcttcgtagcagtatttctcaatctcttatggttgtctgaaccagacaagcaggcagaatcaacagctcatgggggttaggttgctaaatgggagctcatcagagcagaaatttcatgtatcattaaggtctacatactttttttagtagcaaagaactgcagttagatgtccaacacatgttaagtaacgtatatggtccaaactatagcacagagtg

SEQ ID NO: 24203 - DNA, 1149 bp, Mus musculus
gcaggctgtgaaattctttatcttttcttgtttgaacttgagttttaaggagattagagcttatgagtctgcctctatcttactctctctctctctcattcagaagtaaaactacttttctcaactatttaatctgtaaatggaatacccttacatattaaaaatttcaggtgatgagatcaatgatattttccagaaatcatgtagaacacgacaaggaaatagccaatgtgaacaaatatgttagagctatgcaccgcagagcatacctacccacagaaacgatttccaagggtttctaagggtcaaaaactccttcttaggagtttggaatggaaacactaaacacaaagctcctgtttgttgaatggagtttcctctcccctgtgacatatgctctgttatggtgtccaacctggactcagcgtgcagaggttaaaagggagttttgcttaagcctctcacaatagagaggaaatgagagcagggaggacggaacacgcgagtctgagaaacgtgctggtgcttttgcaaggctgttagctaacataactggcattgtttgactggtaagacattttgagtgaagacggcttagttatatagatgaacaaggagctctgggcgagtgagaagagatggaggatccaagaggtcatgtcaacatgctgtgactgagaaacacggtaatgaagaaccgtgcaggtgctgtggaggcggaaggatacagagtaggtcgaggtagaaggtaaaaaacaaaggaaacgtggtggtgtacacctttaatcccagcacttgggaggaggaggcaggtggatttctgagttcgaggccagcctggtctacagagtgagctacacagagaaaaccaacaaccaaaaaacaaaaacaaacaaacaaacaaaataacggaaaagtccacttcgagctcaggccgctcaggcccagcagttcctatgctcaaaatccagatctctgtgtcctgttcttccaacccttatatccttcccagttttaaagaaaagcataagcagatataaaaggaattgagcaacacactagaagatggaaatattttccatacttgtggattggaagaattagtattttgcaaaatggccattctaccaaaagcaatctacagattca

SEQ ID NO: 24204 - DNA, 2549 bp, Mus musculus
cttctcagaggagaaggggagagggagtaggggaagagctgttggaggagggactgggaggagaggaggagatgaatatattggggtgtaaggtggattcattagtgttttcagtatgctgtgctaggcctttttattatgaaagaaacgttttattagaattacaatcgaaggcttcatgcagcacagttaaactttattggttattaagaactgcttgttgaagaatctttgaatttttgctcttttagaggaaacatggagaaagccattgacatgttcaacaaagctatcaacttggccaagtcggaaatggagatggctcatctgtattcactttgtgatgctgcccatgcccagacagaagtagcaaagaaatacggattaaaaccgccgacattataaacacaggggaaacagactgactcttttcaaagaagtttaccccctcttcaactcaaccctgaagacactgtcataaattgttgaacggtggaacttagtagtccctttgtgatgttgtcattcattacatctgtttcatgtttaggtgtagtgggcgtggctgttgaaggaagtttgcagtcttgcagcttttattccctgtgcaacaaaagcttagaacctgttaaagggatattaaaacaaagttgtagaatacaaacagtaattggccatgcaaataaaaactttgatttgttgatttgttttttttttttaatattggggtggggattatgttctgaatgattttgtttttttatagctgtttgtataatatgtgagtattttatagtatgttagtttttaacatagtaagtgctgtaaaatatacttcttttgtattcaattaatcctttttaattttttttgaaggatgaaaagcttcaatgtggatttcagtaaaattgaaagactttaagctattgtcagcatgcacagtgcctctgattctgtagaactttagtaaattatgcagaagcaaaatattctcattgatacttgtacaggaagacttaatgagggactgaacaaggcaggtaagatgaacaagacatgtatatacttggccgtgcctattccatagtaagtactatttaatagtatgcttttaaatgaaagtgggtgtatgtgagcaacccacgtacaggtggagtacatgtgatgatatataggagtatttaattagcttcaattttctagtgacagaaatttggtaaaggttctaaaggatgtcagtcctgaagccaggacatacttgtttgaaatggaaacctcagtggtgtagctgtggctgctaacttagggatttgagccagtatttccagagctgtccaatacatagagtacttctgtattgaggtgaccttcacctctaaggacggatggcccacatccacatctccagggatgctgacagttggttctgttcattttgatctgtacctcatcctcttttgactctctaagctgtttctcttcctcactttcacagcctatccttttacttacttatctgctggagttttctggttggggagggatgtgttcttactgagtctgtttccaagatccaggacaggttgaggtttatttaagtaaaatgattttttaaaaaagcaagcctgcttataattatagtttacattgttgagagtaaaggagcattttacactcttattttaaaagggtgctttatcccactgaaaccaaaatgattttgtctacagatgctgtctttttagaaaatattagaaatgactcctcttataaagtcagtttttggacgatgctggttagcctatggctgatatcattaggaacaattaatgtaatttaaggtgactgggataatggaaagttggagagatcttcattttgttgtgaaataattctccaatgatgataaccttaaatacagaaatgtcctacatctctgaatgtgacctcttcgcttaaaagttttttatttgcatggctgtatttacattaatagggacatcttctactcttctcccttctttcttggggtagggtaggaaacactgaagcatgtgccgttcaatactgtcattccagatactcaaatgttttgcttgttgtgaacatgtttgaaactgcactgaaagctgcatctgtctgtatctttacttttgtaaatggcttcacatgtaaattcacaaaataaatactacattcaagcttttctatccatttttgaaacagaaagataggaaatttgtttgtttttttaactgaaaccctcttcagtcagtttcttgttgattcaaactaactttgaagatagatatatacaaggttttattggtgtggtcatgaaatttcctgcgaggattcattctttatctgtgtcttagactcagcctagaaagccatctgtcatatgttatgatggagctacgttctccgtgctgactccacacggtagtttaatcatagtctcaaccatggagagaacttgagaacttaagtaagctaaagccataaacatcagaggacacaaaagaggacaacttcaaaaggaaata

SEQ ID NO: 24205 - DNA, 1341 bp, Mus musculus
gaaaataaacggttagactaatgattagctcactgttctgttcttaaaaagattgaagtctgttggatggaatggatggagatcatagcaactcaaaacacagcccagagtgagacaccgaaggtcagcttccccatcttccttcctccagtaggtaattatccagagactaattgcctcagagatagtgagcctcaccccaagttgctaaggaacagttaacagcactagaagtaagtaggcatgttaaggttaaaattagcatttgggggacagaattgtatctgtaaaaatgtccttggtctttattacaaatgggtcatttggtctaggctgtttcaaaatgctttgccacactgattatcctccttgaaatgatcacccgtgaccacactaatgtccagtttttaaaagaaagataatcagagagctgtaggaatttcccattgtttctctatcactttctaaaagttccccggtttttgccgtcgcagtaaagtttgcgtggttggcacttgttccatccttactctctgaaagacggacgccgtctgctttgtttcgcagcttgctcagactagtcactgtgctgagagagccggaacagcttccgaccatgggatgatttttataaaatctgtctgaaaaatagtaaatagaacctgccatgtcataacatgtaatagattttttccaaggggttggttgatagaaatatctagatgtaccccaccagtagccagtgttttaatttgcttaatggaaatcaagtgaatggtaacataattaaaagaactctattctgatatctaaataaaaacaatgtatttgagtggttgaagacatttgcatgaaattgcaccttgtacggtacttgatatttataactcttcccccaaactgttgtatttcatttcttccattttctcgacaccctctttgagatgtcctgaagtctctcagctatgggactttttttcataatattaatgtaaagatgtttgtgttactgtttataaattacaattgtaaataaactgatacaagtttgctcaaaacttctgccctggaggatgtctgttctctttatctgtattttgcctgcagattaaacatttgtcttatatatgtaccttaggctaaaaccagtggcactaggtgggtgctggggtgctcatagccccagctattgaaggaggaaggaggatcagttgagctcagggagtgaggtttctgtgacctttcccccctctttctactagagctgtcaatagatctgtcaccttagacctggctttgtcttcagtagttgccatggctaccaggccactgcagtttcta

SEQ ID NO: 24206 - DNA, 1199 bp, Mus musculus
gaggtacctccttcccccatacctgaccacactcccatagggcatatcttttatctctttatctttttataaacacatcagtctcggcatatcttcccacctgggctctagcctttagcatgtatgattagcacatgattgtattctgcttcatggcttgtgatggtattaaatatacattaggctttctctctacctgaaccatacactgtctgtgaatatgcacaagtgcccaaagtattaaaaaaaatcttatttacattttaaaagatttattttatgtatatgaggtttgcctttctgtctgtttatctgtgcatatctggtgtggaaggaggtcagagaaagggcagatgtcctgtaagtggagttatggatggtatgagccactctgtgggtgctgggaactgaactcacatcatctgaaagagcagccaatgctcttaacagctgagccatttctccggcccatagtcctgacgaaaatgttaaatttctaatacaaatattttcatatgtgattgttagctttagcagaaacttcgaaataaaaagaatgacctacaaataaacggggggggggtgttatgaactgtatatttctccattcctttgaatttgctagctgcagaatatagtctgtttggttaatctagttgaaaaataggtaatatatttaaaagtctgtatgcccatgggaaatattaaaaatatcttgttaatcaaatactctgaatctgagttacttcttgttccaaaaattatttcatcttttgaaacctttaacacaaaatgaggtcatctcgtcgccgtggcgtgaacacattagccgtttccttagtctgacatttttcggttccaaagaggaaactgctcttctgaagtaaggatggtagctctgtgatttccattaggggaacagtgaaagagaaggatagccgtccaagctagccagtcttcagggctgctgggatatgaggtgacgccaggtctgtccccctcagtcccagtgggtcactcagcctgtggagcagaggcaccaggacagggctgcatttttccagctccctggggactagttaaaaaccacatagccagatgggattggttggatttttccaaaagaggaggcaaggacaacgtcctttttcgacccatggcaacagtatcaattacaaacagaaggttgctcagctttc

SEQ ID NO: 24207 - DNA, 1195 bp, Mus musculus
tgatactcatgcattatactatcagtgacttcattgtttctcttggcaattttaaaatacatctgtgcatggcccagagatacagactgaggtaaagaaagatgtatttgcaatggtggtttaggattgtatgagtgtcatttcccaaaacttgcagggagggtggtggataattgctttttgctttaaatactaaatgccaaataatggtgacttgctgctttctgaaagcaccaatactatgccaccttaactgtccttcatatgattgtgacctttgagttcatagactgagggtcaggaaacctgacttctgcttccagttcttcccttaattaggcaggcctgacttcctgcttacaacatgagaaataagatcattcaagatggaacaagaaccagggttcttccccttgacctctgcttttgtttcttgctcaataaataatagatcccctgacagcagggccggggcctgagactagatgaactctaaagtcttggggcttcccgcactgaagttttgtgattctctgttgtcttgtatctatggatacaaataccatgtagttggcagtgagaagtagattggattttgttttcatatgtagtgacctcggtctgtttttctttggtttaagctagttgaaattatggcatattttggtaagaatgtgtcaatgtaagagaaggactacagaaaatttgcaagccttttttcttaatttaattgtaggaaataggcatatgtaaatagaaacttattctattcaccaagtcaagcccttacccataaaactttttgaagtcactttattaatcttatacatcaaagtgtttattccacataactgagtagttattcagaaatgcgtttagtattaatgtatgattagtttcacatgtgaattatgaaagaaatatgatgataatattttatttgtataaagtaacttgggaaaggctccaaaagtcagtttgggtctttttcatttaattgaatattaaggtaacgaatcaaacgtactttgagttaaaaaataatagtagcagtgacaactaacatttagtgctaaccctgcaccctattcaacatggttttcattaattaactaactcaatcagtacaatactatttatttttcctctctccattttgtggggaagaaaactaaagtttggaattgttaaataa

SEQ ID NO: 24208 - DNA, 1184 bp, Mus musculus
cggggaacttgaactcacagcacacagaatcctggagcaagccattcctgatttgctgggtttgctgtgctttggtctgttagtgaactgtttcctgacgttcaacgctgccacctagttccttctcgccggcctgtgctcaggcttcacacccactctaccgctgactcccatgtccctgggaaactatccctctgtgtagttctgttgtgaacatgaaggaactgaacagatacaaggcttgtctgcagttcctgaagcaagtcacaagagaaggaaggctccttcctgtcccttgcatgccttgcttggtgccctgttgctgtctgaggcactgctccctggcctctatgattcagctttccaactaaggtcatggtatgtaagcgctttcttcagtaaccaataataatcctggtttttgagctttttccatcacgccagtggccatcctttgagttctatgtgcatgtcatcatttaatctttatttacaacacatttgagataggattatccatcgttttcagatgaacaccttcagactgaagtctcttgacttcaaagttatgatgcaaggacttaagcaattttttttttggcataatcttggacttactcttcagaggcttgctcagtgatgtctgtcattggcaggggactactgtgatttacttgagacactcacaactgtgttttacaaactaggtaataaactaggacagctaagtaagagtctgcctctgcacatttacaccagtgctactctacctgtgcatgaactaacctgtgcattaactaacctgtgcatgaactaacccatgggcattgtgtacactgcagacggcatggaatcgtgtatgcgacgggtttctaggaggtggcaggaaccggacatgggattttcttataggtcaaacattataagaaatggactttctctgacacaacagccagctgttgtatctgcagactccaaccagccatttgttgtgcttcactgactctcaagaactgatgaatagcttttcatttctttcctttctatgaaatttcttcttgaactgtggctcttgttcccttctcacatataacttattatgaaatagtcgagctaggactactgcacttcaaaataggctgagaaaatttcacttccttgcctagttctggctaattagcata

SEQ ID NO: 24209 - DNA, 1152 bp, Mus musculus
gctgaataaaccctttcttcccaaacttgctttttggttatgatgtttgtgcaggaatagaaactctgactaaggcaggtgcatatatatcactatcattatatatatgttcttgatggattgttctattaatatgtgttggccttcttaatcccatctcattagaactagctggagatgcttccttagatatgaatgtggttgctgcttgctcccatagtcttcttctttctcctataatccttgtgcatcattgcacacaacatatttttgatacattcagtatgtttgcatcttttaattggacaaccgagactatttatatttatggtgattgtggatatactaatggtcctcccttcatttcagaggtatccctgtttactgcatttctggctttgtgctgttactcattgcttatacactcagtctttggtacagttcatttattcctgagctcttatgcttgcatatttcttatttgattctctaaatgaggttgcttttttttaagtaaaagaaagcaatatcagaaagaacgtgagaagttggaagagaacatgagttaaaacatgattataaaatagaggaaaatgcacaaataatagataagaggcagaagaataaaagagaacagaaaaaaattaaaaacaaagaaaaacaaccttaaatatactgaaaatattaaaacaagaagtaaaacagtcacaagtgttggcagaggtgtcttccaggacctctagtactggaacctgccaggtctgctgtgggagggcaggagatcgtatctgatgctattgtagttcctctgtgttgtagggctcttcaagtgtgtgctgtcagcagcaaagcaagcttcattgtacgttcttaaattctttgcatgtggggctggagagatggctcagcagttaagagcactgactgctcttctgaaggtcctgagttcaattctcaacaaccacatgatggctcacaaccatcagaaatgaaacctgatgccttcttctggtgtggttgaagacagctacagggtacttatatataataaataaatctaaaaaaaaaatctttgcatgctaagagttgttgttggccctagtaagcgaggccagacaggttcccattaacttgggaacttcccagtttgtg

SEQ ID NO: 24210 - DNA, 3309 bp, Mus musculus
tgcacttcagagaaactgaaaatcactgagtatttattaccaatgctgcaggtacattaatgaacttgaggtggttctgtaagccttgctggcaataatgcatggtactgttcttgaaataccgaatggcttgaaattctccctttgtgaaagtgggtactatcacgcgtcccttctcctttaatcctgtagtgccgtctgcattctttttttttttttttctcacatccatcagtgataagcattgctctagctgtggccacatacacttctctgtatttccctaggaaggtgcagagttagaacagcctgccttgcggtgagctggaggactgactccttgtttgatgacacttttaacagtattgacaccgcctcatacagggcttggtctcagctctgctcatccctgccacccttggtggccttgctccaacctgtgttcataaaccctggcagctcctatccagcagcagtcacgggaagccagcccttcccatctttaagtatacttctccacagggaactgggagagaagcaacttacgatgtagaaaagctataaagggagtcctctgcgtcactaaagtaatctgtaaattactttagggacaaagttaagggggaactaaaatttaaccttctttgctttctttacacacaagcccaaaaatttgcaaaattttttttaaatttcaattaaatttttaaatttaattttaaaccattgtaagaaaaagaaagccaacatgagccaggtctgatggctcaagccagcaatcccaactgacccaagtggacccccaaggtcagtgctttatagtctacagagtgagttcaggattaacctaggccgctcatgggataaggggtggagctcaggctccggggtttagtgctccagtataacaagttcaaggtcataggttcaatcctctctactacaaaaagaaaaacgggcaacaggcgttctccaggtctgtgtgatttctgccttctgtctggggagacacttaagtggtcctttgtgtcagacctggttgacagagatgctgtgcgatcggaattgtgtggaatccttcccagcaacttacttgtcagtgcttgacaaccgggctgcactcacgtcaggtcgggtaaattaaatgttacagcggattagcactgaagcagcacatcggatgaaaacacaaacttgatccctcgccacaaacctgtgtgtaggtttagagtacactcggccttcaggtccccagccgtttctcagcttgtaccatcctggttgtagacctgccacacttgtctagatttggatagccttgaacagtgttaactgtgcttccttccacaagtacatcagcgttttaaaacgtcgctctgcactggtggcaggctctctgccacctcctcagacagtttgcatcgctttcattataaaccgcctttcgtcttgcagagtctcggacacagtctctctccttgttgaaaaaaatcagtgcacattttgtttcaaagttcttatgaagcaaaaaaaagcacagatgctgtactaaaacatgtaagaatgtgtagagcacaagatgcagttgtcctctttcaggtgggaacaaagcaaacctttagctgtttcattttcgttcacgcttagtgggcagagggtagccttttctttgagtcacctaaccattggaagctttaagagaccctttgaagatgaagttgttttcccaaagaagcctactattctaactgtgtgtcccagaactgtttcagaacagagtgaggccatggttgttgatgcgttacacattgtgagacttgactcctatggccactgctctccttgcactctaccaatggttttcataacatacctagttattgttatatggttttctcttgcagataaagagctgagcctgattcaaatgattttttttttctggttttgtacttttccttttaattttttgtattatagattacatgtctggtaaatctttggaagacaatcaagtaaaatgtgaaagtaaccattgctgaccaaaccccttggttattttgttttgctttaattctttgcttgagatattcaatacttaagtcactgtggcttagtgggtttctcttttcctgatagtacaattgattagagacagcagtgtggcaagggcagccttaggagatttcagaaaagttacactaacttggctgtcacttgatccttggaaccagcacagatattatgaattctgctttgcatttattttaaatgctgtttatagatcgtagtagttcctgttgagagtaacaggactagtccagttatttaattcatgtttcactatttgcactttccactgaacagtgggttgatttgctgttcacacacagaatttatccagtagttacagctatcatgtgttctgtgtatgctcctcctccacctgcccccagggatgaagcagtaaaagtgcttgtagccatttccatgccttggctccacgttgtcacccagagagcagtaaagggagtaggaaagcaagatagaaaaaagacagacaagaccactagaacgaacccagaaattatgggggggtgggaggttccaaatcctctacggagcagaactaacggggctccgctgtatggaaaggagttgttaattctaccttttgggttgaacttgaaagtccttgaactgcaaaaactctaggaagttggatggttgtagggtatctaggttaactgtggcaccaatctcaattagaccattttgtgtgtagtttctctcgtttcctgtgtttggcactgggaatggtgaaaataaaacttactcaagtacagaagaagtggaagtggctgagtgtcagtgatattcccccagaatgtatttttcttacctcggcatgtactgtagtcacttgatatttgtatatgttgctagaatttaggctgttgaaaatagtgagattctaatgtgtttttaataaattatatgtgtgtgtcttgctcagatttttttggattaaataaaacaaccttgacatcatagtccagaaaatgccaaatttctcaaagttgacaacagtcacattttatgaccagtattatagtgggtatagatagcatcattggtccccctgccactgtccctgccggcaactccacaaccctcaagcctaccttatggaagtgaatctgggcagcccagctctgtgtggctatagagtaaaggggcacaccccatcagcatggagagccagccagtgccagcgtccccatcagttaggtgctggacactgccagc

SEQ ID NO: 24211 - DNA, 1283 bp, Mus musculus
acattgtgtttccaggtctttgagataagggaatgtaaatactatgataggtaccaggaaactcttcattttatatgttgcttgaagttttagtttttgctacagaagtttatcagggaatacattttatcttcattagttcagtcaggatgcccttcttgggaactttggaatgcaatttgaagccagtccgtggtgatgtttgcctttaatctcagtattcaggaagcagaggctggtggatctctgtgattttgaggccaggctattctacaaagggagttctagtccagccagggctacacagagaaaccctgtcttgaaaaagaaccaacccccccccccaaaaaaaaaaacgaaaaaaagaaagaaaggaagaaagaaagaaagcaatttgaagaaacatgtttttctttgttgcttttgaagtttctttgacgtaattttcatgtatctttctctatattccagaatattataaaaaaatactcattttttttttaaagatagctatttaagagctctggaaattttctttagtcagtttttgtattatataatgatgacctagtttacaactgcagatggcattattattatttaaataagtgatatcttcagtggtaaggtttttgtgagatcataattagctaacattaggattctatgtaattttgaaagtgaaagcttatatccctggattctgatacttaaaagttttatattttagagacttagatatgggagattagcctaaggacaaatgaaacacattttttttctctttaattaaagagaatggagtctaacctgggcattttatattttttatttaaaaaatgggccaatagaaattgtgttactttttaaattagagattcttcaacttttatcttttcttttaaaagtcacagcagatttctttttctttctttttttttaaaaattaggtattttctttatttacatttcaaatgctttcccaaaagtcccccataccccccccccactcccctacccacccactcccacttcttggccctggcgttcccccgtactggggcatataaagtttgcaagaccaaggggcctctcttcccaatgatggccgactaggtcatcttctgctacatatgcagccgatttcttaatgtgtggtttacttgtctaaataatagtctgactgcgctatgttacttgatttataatatattgaatttgtaaagaacaatatttaaatattatcctggaatatgttggatgtatgtgattgtgtttgccac

SEQ ID NO: 24212 - DNA, 1804 bp, Mus musculus
gaactcttacatcagaaagtagagctgcccaaggatgtatctggagaatttggatggtccttctgcctggcctgcgtctcggctcccttacagttcatggcggccgctctcttcatctgggctgcccacaccaaccggaaagagtacaccttaatgaaggcttatcgtgtggcatgaagggaggctgcctgcttaatgattaatatttttcatacattttttttaactattgaggttttcccttgtcttcctctcagtcgtctttaatttttatttttgtggatatgccattgtattctaaaagccccttttatttatatacagtgccactaaataccatttaaaatgtgtgtggttttcactgagtgacttagtctttttttaccacactgatctaggttcagagttcagacagaaagaactgtagagatgtgacccaagtttgtaaaagaatattagcagtggcaaattgacccaaaacagggtctgctaacgtctgctcagtccagtagtgcagtaactatgaaactagaaatgaatttctgtatgatatctgttatcactgtcagacttcatctttactttcctgttgttgctagcagaaccagcgttcctcaagatgtgtgcacataaaattgggaaatgagctaacatgtgtccctaaactttggtacattactttatttgaggtgaaatatggcagctgtttatactgtgattgtctacaagaaaaaaaaaagtgaaaaatgatgtttacttgaaattgtgcttttaatttcacttcagtgaggaaagttgactaattgtactacactatacctgtttgttttttttttaaactgaaactcatcaggattttcagtgccaccaaaccattgtggatttttgctgctcccctcccccctcccccccacaccaggcttattaaagagtactttctttttaacagagtgagagaagagtcacagccaattcctcaacttctttgttctagctgagtactatatgggaggtcctaccaatatcgaccccccagaactgggggtactaccaccacaagatctaaagctgtagctgccacctactaacctccatttatgggtctttatttcttgtggtgaaatgatgtgcctttccttgcccaaatcccttcctggtgtgtatcaacattacttaatgtcttctaattcagtcatttttttataatatgtcttctgtaaacattgaacttaaaaatcttatttatttactccattattgtagcatttcacagattcaaaaaagtgtaactcagtaatttcttaccaaatcctaaatctgtcttttttaaaaaaataaataaaaaagagaatcatgtagagtgtctaaattgtttgagatcacaacatgaggggctaaatgatggaggtctatgtggatctctgtgggagatgagttattcctctgtatatttctttttgttgcagtgataaaacaccatgatcaaagcgttttaggtaagagcgtttatttcagcttgcagttttgaggcagagtccataatggcaggaggttactggagcaggaggctgagaaatcacaacttcacctgcaaacaggtaacacagagggagaacaaactgaaagttagacaaggctttaaactcacagcccacccccagtgatagcacttcctccagcaggcactacctcctaccggtcccattacctccccaaacagcactggggaccatatggtcagatacattagcccacagggctcattcgaattaccatagtctactgcagaaaaaggaaagcctgt

SEQ ID NO: 24213 - DNA, 1103 bp, Mus musculus
gtggtggtggtagtgggggacatgtaaaggccagagactatttctctccatctctttccatcgctctgattttgatggcaggacctgtcactgaagctgtagctccccccttaggctagactgtctctgcctcctggagctggagttagaggcacgcagagtgggtgctggggattcaagctccgctctttgtatctgtgtggcaggtacttcactggctgagcactggccagccccggaaaacttccttttccataggcttttcccagctcagtaaataaaagtcgcagatcatggatcaagtcaagaagcagcttgtgtctcttctcctcctctattgcagagtcctctccaattccacagtgtgtctccaccttttctcttatccctgccactctgtccatcccttgtttgtgctgcttaatcatagcttctaaattagtcttgaatttctgcagtccatcctataccccaaagtgacggcaaactttaaaggtataaattgacttgtttcttctagtttttcatgtacctgctcacatctgttagatacctagagtgtgcacactgcagagattcctgagactcgtactgcttaactgtctgccccatgatgattgtacagcagagacgtcctaattgaatttactttcttatttgctattcacttttttctttgtcaaaggatgagctgtggcggatccaggaaaagctggaatgttactttgggtccttagtaggctcgaatgtgtacatgactcctgcaggatctcagggcctccctccacattatgatgatgttgaggtaagaggaacttcgttgtacaggctggaaaaaacaggctgctgaggccagacttgttcagttgtctgggctgtcttcatcactctcgggcactcttaaaccaggtcatggctgttcttctggtccttcctgaagatcctgaccgcgtctccatgttgggatgcctgcagactggcttcctgctccttctcaaagcatgagtattgctgatgaaagactcacacagtcttcagaaatagggtttttttgtttgtttgtttttggttttggttttgtttttttaacacttaaaaaagaa

SEQ ID NO: 24214 - DNA, 1237 bp, Mus musculus
tttgtagctttggtctaatttgacttaaccatgtactttctcatttacaggtaagaaagaaataaactcaaaatatatattgaacccagtttccatatgtttgcacaaaaatagtttatcaaagtactatgtgtgaatttaaatttttctatgtatgaaaatagactcagacctgaaaggggcctcccactgaattatctgagctgtactacacctgcctgactgctgtctggaatttgacatttcccgacttcgtggtgaaatgtttaagtgcgtgcgtgcgtgcgtgcgtgcgtgcatgcgtgcgtgtgtgcgtgtgtgtgtgtgtgtgtgtgtgtgtgtatgtgtgtgtgtgtgtgtttgggtggtttgctgagatcgatctcctgcatgctgagcaaagtctacatggatagtagtatctcaagcctgaatgagacacgaacattaaacccaacgatacatgaaaaatacaccctaccaaccagaagcacatgttctgagtaaaacatctgtgagatccactttcaagtagtgtttctggtttgttctgtgaattttgatagtgtttgcaagctgtagaaaatttgtagttttagaagtttgtgcttcatgttcattgtgaagcctacatcttgtttgggactcttctctcgactgaaatgtagtggatcttctccttaaaacagggagttccttggtgcctgatgctcccagtaccgtgtgcttttgcaacaggaagccacctgtgacagccacctctgtgggccaggggagtgccagggttcttactgcccagattttggcagctctttggtatcagagtgaacaaagaatgaagctgttaagaaccagatgccaccagaggatgagggtgatggcgagcagcctctgctcagggagccttgtttctgatggctgcattggcaggactcctgtgtgcaggtcatttattacagtgcactccttgctaccatgcaaacatgtctgtgcggcagcgtgggcctggggccaggcctgttagagtctcccgaggatggtgagatattcgtacatagggtgcagacattcattcattcattcattcattcattcattcattcattcttttgattcaaggcctctagagctgcagtttagttttttgtttgattttgattttgtttttgtttttgtttttcccagttcaaagggggaattttagttgggatttcattctctcttttaccatgacaaa

SEQ ID NO: 24215 - DNA, 1173 bp, Mus musculus
tgtgttaatcctccatttttttttatattggctgaatttcaaaataatacagaatagttagattgtataaatgtcacttgtcttttgatgcaatgctggaatggaaccaaatttcttagccttactggtacatttaccaacctttgtccctgtgcctgttgaggcagatccagagaacttcccaatcatgagtcttgttcggcagaagagagattttggaatcacagctgccattgttactgctattgcagtgtccgccgcatcagcggttactgcaggaattgctatggctaatcaagttaatactgctgacatcataaatcagatagaagaaaaaacgtctgaggcattgcttaccctgcaaagagtggactctcatatcgcctcaggattaatgttaagatgatggatgtcatacatatgacttgtgtggcatcaaccccacatgtgtgcattactcccgttaggtatattaacaattctttcattaaaagtacagatttatcaaattatctgaaggggaactggtcgcaggagctggaaaggttgcagaccttttgtctcatcgttttttcactgacccggtgaggcggggggaggggggggcgagccccgaggggctctcccttctggcaccaagtgtcagtcctgcacatgcgggcgggcgcgacccactccggggacagtgccaggtgtggacaatgccaggtggggagcagtgacggatggacataattacataggcctagtccagcatcattttattaaaataaaaagggggagatgtgggaagtggcaaacaccattacaagatggcgctggtttctataagctgatgcccatgaatatgggtaaacaaccaatgtgcacatgtacataagagtgttttgccgagtcactgcctgacccaaggcatattaatgaggtactggtagcatagccaatcaggtatggacacatcactcctaggcctatataagcagcgccatttctggggctcggggtctttttgcctctgcaatcaagctctcccaataaacgtgtgcagaaggagcctgttgtggtgtctgttttgccggctagtcgggcgcacacaacaaacaaacataaaaggagagaatgatactttgaagtaaacttcatttcaatgtgttttatttacacaatggaata

SEQ ID NO: 24216 - DNA, 2591 bp, Mus musculus
gtattgaagggccatgaccaatgccttttaccatttccttcatggtctcccttcatggtcctactacatgcttgaatagctccagggacttggtctgactggggcagcgaaggaatgaagaaatgagagacacacagataccccaaaacactgggattagctggactgggttctttgatggagaaatctcagcattccggaagcacagcctattttattacatacagttgaacatggaagtgggctgactgcatacaactcaatgaggaagtgaggttattaaatacagataaacaagcactcattgaacatactgcatttgacatcatttacatgacagacataaagttaaaaaaaaatccctgcctttaaggagttcaccatggagagcgcttttccagagctattgaatttctatgttagagtgaagtaaaattacgaaaaacaaaactattgaaagtttaaggacgggaagcgaacgtcgccgcggcgccgggggtggaagatgccgctgccggttcaggtgtttaacttgcagggggccgtggaacccatgcagattgatgtcgatccgcaggaagaaccgcagaacgcacctgatgtcaactatgtggtggagaatcccaccctggatctggagcagtatgcagccagctacagtggcctgatgcgaattgagcgactacagtttattgctgaccgttgccctccactgagggtagaggccttgaaaatggctctatccttcgtgcagaggaccttcaatgtggacatgtatgaagagatacaccggaagctctccgaggctaccagggagctgcagaatgcacctgatgccatccctgagagtggagtggagcccccgcccctggacacagcctgggtggaggccactcggaagaaggctctgttgaaactggagaagctggacacggacttgaagaactataagggcaattctatcaaagagagcatcaggcgcggccacgatgacctgggtgatcactacctggactgtggggacctcagcaatgccctcaaatgttactcacgagcccgagactactgcaccagtgctaagcatgtcatcaacatgtgcctcaacgtcatcaaggtcagtgtctacttgcaaaattggtctcatgtgttaagctatgtcagcaaggccgagtctactccagagattgctgagcagcggggagagcgggacagccagacgcaagccatcctcaccaagctcaagtgtgctgcaggcttggctgagctggccgcacggaagtataagcaagcagccaagtgcttccttctggcttcctttgatcactgtgacttcccagagctgctgtcccccagcaatgtggctgtctatggtggcctgtgtgccttagccacctctgaccggcaggagctgcaacgaaatgtcatctccagcagttccttcaagctgttcctggagctggagccacaggtcagagacatcatcttcaaattctatgaatccaagtatgcctcatgcttgaagatgctggacgagatgaaggataacctgctcctggacatgtacctggcccctcacgtcaggacactgtacacccagattcgtaaccgggctcttatccaatacttcagcccctatgtgtcagctgatatgcacaagatggctgcagccttcaacacaacagttgcagctctggaagatgagctgacacaactcattctggagggccttattaatgcccgcatcgactcacacagcaagatactgtatgctcgagatgtggatcagcgtagcaccacctttgagaagtccctgctgatgggcaaggaattccaacgacgtgccaaagctatgattctgagagcagctgtgctccgcaaccagatccatgtcaagtctcctcctagagaagggagccaaggggagctgactccagccaacagccagtcacgcatgagtaccaacatgtgaaaggcattcccgtgaccgtcagaccatagtctgcacacctactctgcctgtggaagcagcacctgggcctcctgcctgctttcctcaagacgagagagaccccagactgtgtgtggttcattagagcagtctggccactggggtgccagttcgttggccttccacgctgaggtaccctctgcagtggtaggcagcctgcccatatggccacttgggcctgactctaagtttctgccccagtgaaacagaccatgtgcaattcccaggtaagggtacctcagacccttcctgtccatgtagttccgactgcagcagtgtcttaactgagtagtccattaaagtacaagttgatcattgaaaaaaaaaaaaaaaaaaaaaagaaagtttaaggacagagccataaattttgactcaaggaagtgtttcattgggttaactgaaactttcaatatacaaatgtgtaagattccatagagaatcaattgtgtgggaagcaaagtagtactaagaaagatgtttttatgaaaacatttatagacacatacctccactaacacacacacacacacacacacacacacacacacacacactgcctttttattcttcatctgtttgggga

SEQ ID NO: 24217 - DNA, 1164 bp, Mus musculus
taagatatatgtacatgaaaggggaattcctgggaaattataatctaaattttaactatttttatatttttttctaaaccttttgtttaagtttgctattgtattgactacgctctttctacagatgctctgtttaaactgtctggatagaaagttgatttactgtacacacttgaagtgtacaagcatgtatgctttgtgataacattgtttctaaaatgtacactccatcttgatgtaattttaaaatagttactattttaaaaagcaaattctcagatctttaatctaccaaattacatgatttgagagtggtacccaaggagagaattcagttctgttgttgctgttcattttccttggtgatgatatcaataaatgttaagatgtgtgaaatacctttaagaaaataactaaaattgttaaattagaaaaatgtatcctgtgggataatgattcaaaatcctcacccccccccccccaagggactagaccttctctgagttcagggccctctctgtgctctctgtcagcagcttcattgactgcttgggttgttttctttcgtccatgccttgaaattaaaggtaaaaggctcctgagggtctagagacttcaggtttccagccagcatggctgtacaaataaagatgttggtgcaagtcctttcataaagcactagttctaacatgacttcttaattttagatgacaatattctgctcttgagtgccattgataaggttctctgtccaacggccctttaccaaaacttgtagagatattttagtaatggatttataaggtaatattcaattggaggcatgcctttaagtcaaggtgaaaataacaaagatcaagtcccttctcaccctgttaagattggtaccatatactggcaatgaacatacactggtttctgaatgtaagtccacctaaggtagattgatctgatcatttgccttttaaatgtttataatgtattgtgttcatatttgagctccttggacccggatcagtcaggtcacatgatgctagttggccctggtagtgtttctgtgagtttgttcattgtacttggcacagtgatggggaaaaggtttaatttctatgcaaaacatatatgcaaaattagcaggtggctcacataagagaaccacaagac

SEQ ID NO: 24218 - DNA, 1141 bp, Mus musculus
tggggtgcagttggacctggatgaagccatttctaaacataaggacattagagctcactcgtgcccgtcagtgaggaagatccagaagaatttttagactctgtttcctgttcttctaatatctcttttctcgttgtaattatgctcacattcctatcaccagctggcaggtgttacctgtgacgtgcaatgtttaaatatgacgtggtactttgtccttcagatttttgttatataaatcacatttttgaaaagtcttgcactcattgctgtctagaaattaaataatgaaacacatgaaacacttaaatttcaatttatttcctataaatgacactgctttttttgtttttttgttttgttttgtattgttttgttttcttttaaaagtaagacttatcatcatggaactagtatttaaatgtcctgtttttctcagaagacgaatcagtttaaacccaaacaaaagtccacgtgactaaatgctaacagttgcagggaaacactgtatttttgttgttgttttttgtctgtgaaagtggcagagctgatagcatatcacaggtgaattgaatggaaggtctcgaagctctatttcaaagtatttcctttgactgaggcgcgtagctcctttaggcttcatttttcttttacctggctttccacttgagccaacaccttcactgaaatatagaacaagggcagattttccacgggagcagcacatgaatgttgtctcaatcaggtttctatcagagacatcaggttatgctgtaagaggtgtgaacattgggtggacagatcactcaacctaagctgctgagagcacacaaggtcagagtcagaatggcggccatccttaatggtgggaaggagggtgaagccatcaagaagttcatagttgtctttcatattgggttttaattactataggtggcttgaatgtgattgttaaagttaaaaaagtgatggaaagtagagtagatttttaacaaaatgataataataatagagatgctggataaagttacatgttctatctttgtaatgaaagaagttacagaggtaagattgtccaatatttgatgatagtgcattgcaagtggctggccgctttgctgttcttcctggattgatcgtt

SEQ ID NO: 24219 - DNA, 1182 bp, Mus musculus
gaaatatgttttagtgtagactaaaatggcccatggtcccgtaggaccatgacctttctctaatgatacaatgcaggcttcagcaatcctgaagatgataggtaaataaaaccaaccagcacttccctttcttaaaagggtgggtaactgcggatatagaaggtcagcatagtggctcattgttgaagtgaatagaagtaaatttggttttcttgagttacaatgctggaggaaaaactaggcaggaagtcatactcccgccccccactacctgtttatagagggaaggatcagggtagagactgaacacatttctttggggaaatattttgagtattacaaatatattacagaatatttggggaaaatatttagtgaaggattttctccactcttagataccttgtgtaagtggcacatgaatgaacaaagtgctgtcttgaagagccggttattttaagactatgaggttatgtggctcttgtacaaacagttcagttctacagagctgcttatctcttcaccgtcatctcggtggtttgcctactgcagaaactgttggggtttatttaaaaccacatccaaatactgtggctgttaagaaagagtactctctggagctaactgacaggcagactgagagaccatctaaggctatctatggatagatttgtttcttttcctgtacataggtgaccatattattgaaagagacggcctgtagtaaaaaatatttacatagattgattactaagaaagccaaactttatagagttacctgagaaacctgactccagaagacttccgagaggccagcagtttgttatttcagggccgttggagcgactgacagatcagccatgttgcagcagcttctgctgtccattgacttctttttattaaatgtattgtctggctagttagctaataatttgactacctatcatggctggaatcttggattgagtgaaaatgagaaaggaggagccagagaggtggctcagtagttaagagcatttgaggctcgtgtgaaggactagagtttggttcctagctttcaaaattgcctaccactgtagctccagggaacctgatatcttcttctggtctcttcaccatcatcttggtgttttgtgtactgcagaaactgttggggtttatttaaaaccacattctctctct

SEQ ID NO: 24220 - DNA, 1257 bp, Mus musculus
catcgatatactttcttaggtttcaagtatcaatataaatgccctgagaaaagcataagattaaaaacaatccatgggctatttgtgttactgctatagaaaggttttttaaaaagctatctttcatattgaatttttgaattcttaaaaagcctaggggaggaatagatttctacacagctttaagtcaacttgaaaattttgaagtattattaatagattgagaggattggctacttttttcaggttaatatttcaggtgggatattcttacaattgaagcaatctaacaaagatatacagagaaataatgaagaaaatgttcagagaaagaaatctagaattgaaatctgttcaagaagtttggaaccaaaagtaaagtgcaagtgtatatgttagggaacagctgaggcaagctctgttttgctgtattctacctagctaatacttgaaaaaaatctagcaagtaccactctttgcatagaatatggagtgattggtatgctgactcattttatatcaatttgacacaagctagagtctgaggaggagggaatctagattgagaaaaatgtctcaaaggtggagctgtagagcattttcttagggattgatggggagggcccaacccattgtgaagccaccctggtctgatgttcttggtttctacaagaaagtaggctgagcaagcaggtaagtaacacccctccatggcctctgcatcacttcctgccttcaggttcatgtcctgtttgagttcctgtgccgacttccttcagtgatgaacagtgttgtggaagtgtcctgaataaattctttttcaagtgactttggttaaggtgttgtgtcacagcagtagtagccctcactaaccctaagacagttagggtttcagattcagggatcttctgggctttgctgaaaactattttgcccatagcctaatagcagggtaggtacatggtgaaatactcctgtaagactctggtaagtcttaggtacctggaaaccccaagtgagccactcggagttggaaagttggagatcgatgcaaaagcgagaggagtttattgttccagcatgctagggccgtcctgcacccaaagaaagaggtggcgatgccagggcggccccttcttccagtttttatacagtttccagtggcagattagagcatcagcaatgtgattggcagaacagtgtgacttttaagctgattggtccttacggaacgaggtagctagggcttcccttatc

SEQ ID NO: 24221 - DNA, 1933 bp, Mus musculus
cctacaggatcgcccttctcctcagcatctttcagccttccctaattcaacaacaggggtcagctgcttctgtcaattggttgggggcaaatatctgcatctgactctttcagctgcttgctgggtctttcggagggcagttatgatagatccctttttgtgagtgctccatagccccagtaatagtgtattaaaaattttaaagcagatagcataatagtttttaagttatatttagtaggaatatttttgtttttccaggttgaagaagaaggcctacaaatttgtgttgagatctgtggttgtgctctccagcttgatctccatgatgatcctgaaactaaatgtctaatttataaaacaattgcacattttttgccaaatgatctagagattgtcagggtttgtgctctctcagtattttttcttgagcgttccttagatgcctaccacaccgttgaagagctttacagacgtccggatgaagagtatagtgaaggcatgagtactgttcaaaaccgtgttcgttttgaattacttccaattttgaaaaagggattgttttttgatcctgagttttggaacttcgtaatgattaagaaaaactgtgtggcattactgcgtgataaatcagcagtgaaacttctaaatgaaaatacactggaaaatccttcaagtagtctaaaaaagagagtggaccagcagagtgtggaagaagatcagagcactggagagactgatcctgatgatgcgtctgtagtgcaacctaaaggacaggttaatgtgaagagaagcctgtctgctcttaacacctccaaagtggatcatagtgtcccaagacatcggtgcatgttatgcaacaaggaatttcttggtggccacattgtaaggcatgcccaggctcatcagaaaaaaggcagttttgcatgtgtgatatgtggtaggaaatttaggaacagaggacttatgcagaagcatttaaaaaatcacgttaagaagattcagagacagcagattgctactgcacaacaggatgatccagaagtcatcactttggaagaaataaatggttccaaatctttaatttcctttgaaaatgggaattcaaatactaagggcttggaaatagagacattgacggcttccagtgagagaaacaaagaggtcatccgtgaacacatggctgagttcattaaaattcccattgctataccagagaatgctatagaaaacattattgaaaatggcaaaccagatgcttctttcaataatatctcagaatctttacctcagtgtgatgatgactatgaagaggaagagaatgaagatgattatgaagatgattatgatttgaatcaagaaacatcagtgcttcacaaaatcaatggaactgtgtgccatccaaaagatgtatatgctacagaccaagaaggcaacttcaagtgtcctgctcttggctgtgtaaggatatttaaaagaattgggttcctaaatatgcatgcaaggactgtgcatccaactgatttaaatgtgcggcaaactgtaatgaagtggagtaaaggaaagtgcaaattttgccaaaggcagtttgaggattctcaacattttatagatcaccttaatagacacagctatccaaatgtgtacttctgtttgcatttcaattgcaatgagtcatttaagctgccatttcagcttgcccagcatacaaaaagtcacaggatatttcaagctcagtgtagttttccagaatgccatgagctttttgaagatcttcctctgttatatgaacatgaagcccagcattacttgagcaaaacaccagaatcatctgcacagctgagtgaagtggttcctaaccatcaagaaatagacccatttagtaatgagaaccaaactattcatcatccagtttctactagtaagtcaagga

SEQ ID NO: 24222 - DNA, 1117 bp, Mus musculus
gaaatgtttgtgcatggaagaacttccttgcattgtagccctgttgccatgtatggtttttgttttttcttgtgaggttacgtaatgatttggattgagaactagcctagaaaactgaagctgctgccaggctatacctctcacaggaccttaaagaagctcacattcttttcaaagtggaatagtaggccggaaatgttcttagagcttgagatctctaggagaaatgactgttcaaattacattctacttgtatgtgaaataattgcttaaccttcacttccttgtggtcgcttttaaagacatatttagtagcagcttcaagtgactaaaagactaaaatctctcttagtgtctttgacaaaagccatgggggattttgcagtgatgagattttagtcttcaactatgaacaaaaattttcaaaccatagttttcatgttaagtagcatcctggatttgcaaacttttttatgtcttggtattaagactattaagacagtcttgtagtcttaatttaaatttaaatacactgtggttctgttttctctttttacagggaattggttactttttggctgacaacaaataagaaaattgctttctatacattaatttttccataagattttataagagtttatttaggtaaatagactagaaatgagttttaaaagtttcacctttactgctttgcctctggtgatgcaggttttaaaacttggatgctaaacagtgcagaaaacgaggcaagaactttatagtaaaataaagcaggatgctgagtcaggaaataatcagctctgtcaaaggtcaaccgtgtttaggttttctacacctcactcttctgtaagcttattaggagtcatttagctcagagaagtcctcttcatcaaatccggattatattttttaaaagtttagtaactgaagacttagattagagctttaatattaaaaaaaaatcaaatagttgaaaacattgaagttatatttctattctaaatcagtggcaagatgccctgattgtgacttggagttatctttgaggtcattgtgccacaaatttccattaaacaaagccaaagttaatagaaaataatttgtgggttttgtg

SEQ ID NO: 24223 - DNA, 2302 bp, Mus musculus
ctcaagacccacctgcctctttccctcgtgagtgctgggattaatggcgtgtactatcacgcccagcaataatttgtgtttttaagaacatcttgtcttatgggtcttacagatttaacattcccaattcaggttgtcaaagtgaccacttgtttttattttaaaagcctgctatggaatttaaaaaaaaatagttctcaaaaattgcagtttctattttctcacgtttggttatattcatgtagcacataaatgcctagactagttgtttactaactgcaattggtaaaacacagaccagcagcaaagtaaacaatgattgcttccacttccttaaggaatttgcgggcaaccatgtttaaattgcctaagatggtaggatatctaagcaactaaaataattgagttttgtaccactattttcagaagaaaaacgatcatttaattttccaagattccttgtgattcgggctattccctattgtctgggactatatgcgctgtcagtcaacatggcagaacagcttctagcagtcgagtaacatgttggacggtgcactaggaatataattcacctttgcctttcttacagttattactgatttcaccgttacttagttcctctagaactgtttttccaggcttatttttgaatctctaggggcagagtgcattctgttagggttgtatcatgtccttagaatgaggtttccgtccccttgagggaaagttagtagtaatgtttcttcaccgattatgaacatttgtttcttggaactggttaaatttgtctcgtaaataataacagtggttatagtagcctgtgcaaactggtaaagatttgcaaaactatgattggcatgttagataacaaatgagaagtgtctaaggcgcgtgctatgtgagagaggcaaagtgaacttatgtacagaagctttcaatcctccttatatagtggtagttgatgctttactattggaccaatagcagctcctgttaattagttggatgcattatcacaagctttgtaatgtttcatttataaactgccttcagcacatgcgtacctgttaatgttttctcagtgtcgtaggatgtcttccagactctcactgtatcctgccagtaaatagttctagcttgttgaatttcctgcttatttttcattatctgtggcatatagcaagcctaaaagataattgtaatcatttttttttcttttacagagtgagaagttagattgtgtatgaaagcctatagttattttatccattatctttgattaaggctttctaatattatttagtaagtgttccttccagttaatgcctgtggccctactgaattttaagggaacagacaacttttaagaaataaaccttactgttttatacagtaagtttgtctgattgggaatgttctgaagttggacatacaattggccagattcccaagctaaaaccttggcctgaaaggctgtgtacatgaatgttaacaagtacaggaaagcaaattaaacttaaggtgacctaaaacaaaggctagaaacaagttttcattggattcttagtctttgtaagggctttctgtttgacttacctcaactgccattgagtgagggtaaatcaccttaaaatgactgatttacctggaagggtagttgtagtttccatccttagcttgcttttgctttggtcggcactgatgaaatgtgaagtggctattctagaccttggttgatctcagcccctactcccagactgctgaggtaactacagtccgttacctagtgctattctccttgtatccagaacactattaaaattttattatgttaattttcgtactcctgtgcttcttttttacttttgctcatgcacgtattttagtatgaatgtgttgcttttttaaaagtttgtgatatttagaaataaatttcaaaaaagtttctaaagtttttgaaatcatattttgttttgtgagccagtgactgacattttataatttcaaggttttacctgctgaattttgatttttctaccaatcatttatttgtagtgttaaccttttaagctactgtgacatctaggcttcaaactgccctgtttgaagtcttccaaaacactagccagtgggtaagttcagtcaacattttaatgggaacattgtacttctacaagtcttatgaaagggctaggatgtagcttagtggttaccctgcaacctataacttcagctccagaggatctgatactcttaaggatttctcaggcaccagcatgcaagtgcatataaattcaca

SEQ ID NO: 24224 - DNA, 1148 bp, Mus musculus
ctggtggtaccaccatgtacccaggcattgctgacaggatgcagaaggagatcacagccctagcacccagcacgatgaagattaagatcattactccccctgagcgcaagtactcagtctggatcggtggctccattctggcctcactgtccaccttccagcagatgtggatcaacaagcaggagtatgatgagtcaggccccaccagcgtccatcgcaaatgcttctagatggactgagcaggtgccaggcatctgctgcatgagctgatattgaagtatcgatttgccctggcaaatgtacacacctcatgctagcctcatgaaactggaataagcctttgaaaagaaatttgtccttgaagcttgtatctgatatcagcactggaacgtagaacttgttgctgagttttgaccttgtattcaagttaactgctcccttgatatatgtttaataccctgtgcatatcttgatttagtccttagttcatgtggctcggtcacttggggcctggggaaagcacgctgtggacgagaaagccccagcctggtggatctctgtgagcaccacggagtgatctgtgcaaggtattaaccaacagcagacttccaggatttcccgaggctggcaagggttcctgaaccagttaccactccttcttgccagtctaacagggtgggaaagtccgagccttaggacccagtttgcgttctggtttcttccctcctgaccgccatcggttgttactcgccttgaggtgggaacgtttgcatcgacacctgtaaatgtattcatccttttaattgatgtaaggttttttgtactcaattctttaagaaatgacaaattttggttttctactgttcaatgagaacattaggccccagcaacacgtcattgtgtaaagaaataaaagtgctgcagtaacaaagagagagagagagagagagagagagagagagagagagagagagagagagagaaagacttgttttctttgtaggtttttgggaaatgtgaacttggtttgtttgctcgcttcgacctcgaactcacggcgatccccctgcctctgcctctgcctcctcctgcctctgcatcctccctgctgcctgtttgctttttgagacaaagtctctctatggagc

SEQ ID NO: 24225 - DNA, 1831 bp, Mus musculus
acatctttgatggctctgatgatgaagaagaaagccaggacatcgtgaatcaagttcttgatgaaattgggattgaaatctctggaaaggtaagaatggcttcttctcataatgaaaacagcagcggccacttctgttggttgtttgcttggtttcttctgctatctgcatggctgtgtgtgtcagaagagagtgcatcctctgtcgcatccacgtgcttgctaacttgtttttctcccatttttgtctgtaatgtagatggccaaagctccatcggctgcaagaagcttaccgtctgcctccacttcaaaggctacaatttctgatgaagagattgaacgtcaactcaaagctttaggggtagattagatcaaaagccatacatactgttctcacttgagtctaaagtgagtccggtgtagattccttttacaaaacacattcattttgcaaaaatgaagaccatgagtgaacagttatttcctgacccatggctactttgaatcctttgccaaagagtgccaatgatgcaaaaaacaatgggagcagtttggctcttaggtagaagcaccctggtctgaggggtgtgcaagctgagttcttttgtgcatggcatagggagacgacggtgtcactgcttagtgttgggttgggttctaagttgttttacactgaaatcagacttcatgtttaatgccattaggcgtcaacgtaaagagacttgtaaaaatattaaaggtatatcgttaattctgtatctgttgcttgtcctttgtagacagttatgttaggaccataggcagtgcagctgccaagttatttttaaaccatctaaaaggagagtgctatttaaacatctgtcttaaactgtcctgagcttctacttttcttccatttaccccctttgggagaacattctagttggtaagtttattacctttcaaaatgtgcttggcacctgccttaaatagcacgaacatattgtgcacatctttaaattaatttaactggcaaaaaaacaattacattttaaactaaaactgagactgagaacagtacccaatctgtcttttaaagcttataaaagtgaatcgggtacaattagcaaaaagaagaaagaagacactgaatttatgacgttttacagtaatgaagctatactttggtctttcttccaagaactgcgatttttctctgtatgaattataacttagtctgtgttggaactttgaattgtgtaatatacacattaaaccatctaaattgaagccattcttctaaaggaaggactgctactttgacagtacttgatccagatttctaaagaaaatgtttttgttttgttgtgtttttggtaaataaactgcaactttgtcagaaatgactgcctaacgcgcatcattgtctctgcagtatttaaaggtaagatagtcagcggtgccacgtagacagaagagaaaggcgaggaggccaagagttagaggtagaatgtgagttaggttaattttgggattctggcacatcctagcacagaaactgtagaaatcctgatcagcataacctggtgaaaccagggcgatggagctctgggctgcccgttagcagaggtgaggtggatggatacacactgactttaaacaaggcgcaataggtgcaagagcagaggctggtccctctgcttcaggttccacaaccgttctgtgctcagcactgccattctgaagtgcacacttcacgtcactcctgaatgggcatggatccaagcattgtactgtatcatggggtattgcacccaaacatggcttggatatacattctaattttctctaac

SEQ ID NO: 24226 - DNA, 1192 bp, Mus musculus
tcctccctccatctgcctaatactgactattttattcctccttctaagtgagattcaagcgtcctcccttgggccttccttttatttaacttttttgggtctctggggtgtagttcagatatcctgtacttgatggctaatatccacttatcagagagtacatgccattcatgtccttttggttatgggtttcctcactcagcatgacattttctatttccatctatttgtctgaagatggttttagtgcacaactctaccagactttcaaagaagagttaatatcaacacacctcaaagtataacacaacatagaaacatgaagaacactgccaaactcgttctatgaggccacagtcaccctgataactaaaccacacgaagattcagcaaagaaagagtatttcagaccaatttcttttatgaacaatgatgcaaaagataataaaatactcaaaaactaaataaaaaatcacaacataaacattattcagtgtgatcaagtagacttcatctcaaggatgcagtgatagttcagtatacaaaaggttgtcagtgtattccattatataaataaagtgaaataaaaagaaattacaggatcctctctctctctctctctctctctctctctctctccctccctcccccctccctcccccctccctctctctctcttgttttttttttttttttttttttagacagcatttctctgtatagcccttgcttttggcctttgaggactcttcctttcatcataagattagagagaaatgagatttgcagagacagagcactgaaaccattaaaatccaaaacaacagtattcagcttctgactcattttgctgattctttttggaatcagctgactgcatcagacctgtccagcatttaccacatatcaaggtgtgatggttaaagttgatgttcaatttacacatctaggaaggaagaaaatcaactgaagaattgtctccataagactgatatgtgattatgtacatactaatacattcatgactgctagttgatgtaggagagcttagtccactgaatgacataggcagatggaactggattaaataagaaaacttgtgagaagtaacaaaccaggaagcagtgtttttctgtgtatcctacttcagatctcagaagagtgtgttttagcctcatcagcctgcatgtgt

SEQ ID NO: 24227 - DNA, 1184 bp, Mus musculus
ttacaatgaattgcttttccaatataagtatttcaaaggatttctgttattaatgtgattttaatttcaaacatctttttataatttatctgtactgtgcttcctaggatgctatggaaagccacattttctccgagtttggtatttccagtgtttcacggttttaattttatgatagtcctaactttgcaaaaaaaatatctatctgattctcctctactttctcttctacctcctctctctcctcctccccccacgttcttttctgcctctacctcctgttcctccacctcctcttctgaaagtataactaggtaaaaacagaattctaggcctttaggcccaggcttggaaatgtggcctttgtaaaggtatgctaatcataaaagagatagcgacattcctctacccaccagcttcctgggttcaaagagtgctcattcaaaaaaagtcaccctggccattaccagaacctgcaatgcaaatgtgctattgttagaggctcttaaaagctgtcttgagagttaacaattaccaggtattccttgtgactcttgtaactttacacttccttgtgactcttaattggtatctttggtatcttccaacaacgccctccccacttccttgagtttcggtttcttcctttaaatacccccttacccagctactcagggtgccatggtcctctacccctgcgtggtgtatgaccatgggcctgagagcgctcttgaataaaaatcctcttgcaatttgcagtaagacccgtttcttgtgggtgattttggggtgtcgcctctcctgagtcagaacgtgggggagccctcacattgtgggtctttcacttcctcttcctcatctttcccctgactgccctccctctttttcttttggtagatgattattaacatgaagactcctaatggaccaagttacatagaaagagacactgttgaaagctcatctgtaagtgggatatgcatataacattgtttggccacatttcagaaattgctttagaaagggtgtagaacaaaacatgaggtggcgagtacaagggaataggaacatgtggacacattagagcacttgcacaaatagcacacaaagacaaggaagcagcatctcccaaacgtgtgcatgcacaaacaaaccacattttaacacaaaggcaggggtgaata

SEQ ID NO: 24228 - DNA, 1208 bp, Mus musculus
gcgggggcccgcgctgaggacgtgtgtcccgggctcaccctggcccgctccgccgctataaagggcaagtccccggcggctcgcctaggctcgcccggctccgccctgccgctcgcactccactcggcccactcgaccctctcgggcctcggctactcgggctgctgcggcgaagatggcggcgccggcggctcctgcggcaggggaaacgggccccgatgctcgtctggaggccgccttggccgacgtgccggagctggcccgactcctggagattgacccgtacctgaagcccttcgccgcggacttccagcgcaggtacccgggggaacccctccaccgccctccgcctgcggccggccttcccgcgtgcgcgcgcgcgccgcccgactcccccctctccgcgcggccccgccccctcgcacgccaatcatgcggtgggcgtggctccggcttcccgggggagttcctgaacttttctgctgcacgtccgccccgtgctcgctcacttgctcgcagtccctggccgcgcgtcctcccctacgtgctgggacaggcagcgctgcagccacgcagcggcttccgggactcacaggccacccccctctggtcctgggagttgcagtggtcgtgacccagggcgtgtgtgattttgcttttccaactttgtagtctacttccgagcagcgtttgtgcagtctttcaggcagtctttcaacatcttgcaccctcctgtttgctcttgtgagttcattaatctgcgtttcactttaatcgttggtcagatctcttctcccttaaaccaacatcgaagagcgacctttgcgggtgtttgaccttagcttccaggagagttaacagggcatggatggcttaacttgcagagcccaattcaaaaagtataactcctctcccaccaggcttcccacttatcagaaatttataattgcaatctgctcaggttaagattgaaaattaaagtagctagtatataaattagagtagttatgagtcgattgcaagtattttgctgcagtcatatttgtcatactagtttcttctttaaagcctagatactacaaaaatcaaaactaccttggcaccagtcaatttgtcatatttgtcatactagtttcttctttaaagcctagatactacaaaaatcaaaactaccttggcaccagtcgatagactcttttttaatcata

SEQ ID NO: 24229 - DNA, 1195 bp, Mus musculus
aggacccagttatagctctctcttgtgagactatgccggggcctagcaaacacagaagtggatgatcacagtcagttattggatgggtcacacggcccctaatggaggagctagagaaattacccaaggagctatagggaactgcaaccctataggtggaacaacagtatgaactaacaagtaccccggagctcgtgtctctagctgcatatgtatcagaagaaggcctagtcggccatcactggaaagagaggcccattggacttgcaaactttatatgcctcagtacaggggaatgccagggctaagtagtgggagtgggaaggtgggggagtgggtggcggaacgtgtgggggacttttgggatagcattggaaatgtaaatgaaataaatacctattttttttaaagaactactgagttagtacattcttaggtggtaacgtccttacattttctcagattaacacatccctccctctttgaggtttgttttcctagattaggatttacatgtgtataaaatatattccatttttctctgttcatcaggtcaaggtttttcgggtgactataatgaatattttggactacaagtagatgaagatgctttgatttatctcatgttggcaaatcatttggctcacacgttgtacccagactcgataacaatagcagaggtaagtctataatgaagtcatcccatttgactcccctttaatagagaatattttgttagcatacagtatttgaatagcgaaactcatgtcatcaataattgcaaaaatggacttatgccctgacgaaggtccaactagcttgtaaggatgacacattatttggaattcactgttttcctaataggggataatttacactaattacttgtcactattccattgttagaaagaacatgccagtggttagaaagtaaaatgtcctaatcagtggacaggtccttctgccccgagaccttcagcggtgaaaagaattgaatattaatgtgcatctgtcaatttatttatttatttattttccggtttaatcattagagatggcatggatcactgcctgcccacttttctgagcgttccatgttctgatgcgattacctttcttgtttatgttactgttctcaggctgccaaatgtttcctagttattcatgattactaaaagttcatgattaactgtcc

SEQ ID NO: 24230 - DNA, 1172 bp, Mus musculus
tttagggtgaagtagaaatctagtgtaatggaaatgcccaggaaatctattaaggtgaccttagccaggagtcctagtaaggtgagatacaggccctcaataagccatgtcctatatatagctaaacaacatttccagtagagggcatgggtcaccaacccagtcacaaactgtcaacctacaatttgtcctggcagtttctgtaaaggtggcacaggagttctgagactggccaaacaacaacttgtacaacttgagaaccacgccataaaagtacccccaacactgcctggagaaccaaaaaccacaggacaggtagcatagagacctaggataaaaccaaacattactgggaaaaaaaatgtcgatgaaatgatgcctaatgactttctgcttttctcagagattggggtctaagccaactgtcacttgagagtttttgtccagtaactgatggaaacagatgcagaaaaactgccaaacattaggcaaaatttgggaaatcctgattatgaaggggaggagggatcataggagtcagagggctcagaaatatgacaagaaaacccaccgaattaactaacctggactcatagggtctccaagagactgaaatgacaatcaaggagtatccaatggtctaacctaggccctccacatatatgttacagttgtgtagttttgagatttttgtgagacttctgatagagtaaaccgggtagaaggtgctatttctgaaccctttgcctgctttgagcaatgctttcttccaacagggatgtctagtcctaccctagtatgagagggtgtgcccaattttattgcaacatgatattccatgagtgtttgatatcccttggaaggctgttcttttgtaaatggaaacagatgaggagttgatggggagaaaggaagcaggaggaaaaggaatggagttgggggtggtagggatataatatactaaaacttaattaataatcttaaatatttaaacaccatgaattggtcttaaacatggaaaaataaaagacccagagttacataaggtaagaaggggatggtaagtggaaattactgagatttttgagggatggattgaatataatcaaaatgcgttagaaactcacaaagaattagtaaaaagtatatacttatatatctgtatatatgaa

SEQ ID NO: 24231 - DNA, 1150 bp, Mus musculus
catgcttccccatttataaaattgggaaatagtcttatcttcagatatagctcttgctctggcagccatgctgttggcagtagaatataacttagcacagtggctaaagaccaggctttgaagtcagttggatacacttagacccaattcctgcctccaccattccctggttgtagcttgacaggttggtgtattgagacttgttttctgtgtgaaataatgattaaaactgttcccccccccaaaaaaaactgctgttaatattaaagcactttgaagtatgacatatggtacctttgccttacaaaaatactcaaaagtctttttatatgaatgtcaatatgttacaggtatgctcatttgactatgggcaaataaatatggctttaggatgtacatcataatatgtgatacaaccaatgagaaaaattggatctcgaggactggagagatggctcagtggttaagagcactggctgctcctctagagggccgaggttcaatttccagcacccacatgatagctcacaatggtctgtaacctcagttccaggagatccaggaccaggcatgcatgtgctgcatgtatctgtgcattcaggtacacagatgcataaaataaaataaatcttaaaagaagatcaaatatttaaaaaattagatttggcttatttgaaagcaaatttgatgtagaagatgggggagttcattttatcagcttagcaattggaagagggatttttgaataaataaaagtaagcacacttcatgaagatgtcattctgtcatttcctctgctcccttattctgttggattctaaatgaggcaaacaagccatgtgtacttgcatagataggtctgtagattcttgcggctctggacacatacaggcaggtagggcttgatatcttgcatgattgtggccgtagtttaatcggcttcaacatctgctcagagagcaatttctgagttactgggtttacccagttttattttagtgtgtatgaatataatttgaacagggcatgaaatattgatattgtgtagcacttcctcttccctcccaaaagttttccagggttattcttaactgccaaaagggaacaactgaatttcgggctcagtgtcataagcctattgatacactgg

SEQ ID NO: 24232 - DNA, 1162 bp, Mus musculus
caatggaggaattctgtcattctggagctttttttctgatagaaatatttaaaacgacgtacctaatgttctgaatacagaggagaaactggaaacttagaagaattattaaaacgtcaggtagggtgggacctaatacctagatggtttggaaagctgtattctctgaacaccaaccagacttttaaggaaaggagggggaggatgaggaggaaaaggaagaaaagtagaaaaacgtcacatttgagagagattatgacttatcttttagtgtctcaagagcctcactcttgttatgaaggtttatgatgggtgggcagggctcaatggagcagagcctaaaggtgataagaagattttaagaaagctcagattttctgtatggatgctgagataactcaagatagtagtatagcattgggagtggaatggtgagaacgtaaagggatgaacttgcctattctatatccacagaagtgtgagctgaagatgagactggcaatgggctgcatgaagactccacttatttgagtaggggatgttttttttctcaagtatattatcagtgggctgaaagttccaacgagctcaaaaaatattagtgttttactattgttctataaagcataggtcatttcccaagccttctttggttagaggtttgatttaagaaaaggatatgaaaaggttgcaaggaattggtgaaataaagagaatatcatgtatgcctgttcagggatctactgttcttctgttcgagggtatactgtctactgtccaagtataatagaagacagggaattctgagaccctagcaaactggtccatcatttgtattttaaagatgtggtttgcttttattggtatgtgaaatataatccacgctgctttaaatgtcagtcacaaatcattactctgaacccattacctctttattccaaggcgctgagagattatgggaaagtcctctttcttactcattaaaagattgctccatacttgaactctaatttcatttctaaatttgagccaaaagctgaaatcagcttcaaatgaatgcttttgaaatatgaacactattatcaatatcagtacccgaccttatttttttataatactttgtcattaaaaccgataatcttacctttattaaccctattgc

SEQ ID NO: 24233 - DNA, 1984 bp, Mus musculus
gaagagaacattcatagtcaatgactataagtaaacataagacaattgaactttggatttggtttcaaattgaacaacaacttcatctcttataggaaactgaaagctgaagacaaccagagaggcttacgatgctaatgtgaaaaaccatcactcaagaggcctcctcccgtctgatgacacacaataccagatgaaattgttcagtgcaatcagaatggacaagttgccgtttttattcctcctgttgggataacattttttaaaagtttcttgggtttttagtgttgctgattgattgcctaacccttaatgaacctccccctgccgcgacgctgttacagccgttatccttgacttccaacactggaagtgtcttgaatgcttgcttcagccatcagccagcaaggaagaacagaccaattctttttgcgatttgcccctgagatatggcattgcactgcttatatatcacgctaattgatagcaaaatattgatcaatgatataaaggtgatgactcaacctcatgccaagggctctcaaagtataattgttctatgaccaactgctaaggccaattgaagcatacttcattttacatgattttaggatcagtcttttataccaccctttgctggcataaactaaaagtctatcacatacagaactacagtctaatttcaatggggtagaagcattgtaaatatatactctttgcaactcctggtggtactttattttgtctttatttcaaccattgaaatatattcttggaaatgtacttttggataagtagggctgagccagttggacctctggttgtctagtcattgtgagaagtaaacctagcaaaaatcttgttctatttttcaatcaaaaagcaactacaaatgcatattccacgcaaatggatgtttttaacgaccaattgagtaaagacatccctatcttaactggcctaaatttcttctggtagtgtcagatcacctttcagaagtgccacttaaggaggtttgtttgattttttttgttgttgttgttgttgttgttttttgtaatgcactgtttttaatctttttttttttggttttaaaagcacaatcactaaactttatttgtaaaccattgtaactattaaccttttttttcttattgaagaaactgttgagaagtgtttctagcctgttttgttaatgctctgtgtttgtatttgcaatatttgaatggtgacagctggtgaggtcacgtacagactttatcgtgggctgtgaaccaaatggttccaatttttcctggacttaaaaaaaaatttttttgttctaagtttttcgtggccaatgttgaatcttataagatttccttagaagctcataagaggaattccaactcggaattgccaagtgatgctctgtgactgtaggtttctataattttttttgacattttaagaatttcattgactttataattggtgctatttgaagaaaacaaaatgaatctttagtcatgcataggtatcaggcttgacccccacaaagccaaacaaaactgaactacaaaataaataaataaataaataaataaataaataaataaaagcaaataaaaacaaaaggctggtattcacctaaaactaagtgtattcatttagctaatttgaagaagccccatgtcccatagaaaggatgtgcagttctaagggaacaatccacgtgattaatgttttcattatgttcatgtaagaaacctctttatttttagccatacttttgcatactgaaaattcaataatcagaaaagtaattttgtcatattatttattaaaaatgttctcaaatacatcatccttccttgtgttgattttttttttcattgtatgactatcagatttattccattaaatcacaaagttgttttgtcttcgcatttcaccaccacattatgaaaacgaaggagttctcagttttcctaatgagcatcca

SEQ ID NO: 24234 - DNA, 1099 bp, Mus musculus
ttacagatctgttatagagctgaaaaatactgcaactagagacaggtttttccagtaacaaacgcaatcccagggattcacagagtaatcaaatatcctgcaacaactcttcttccctggatttcacttaatcctctgtgcctatgacaatctacctttccctccatactttaaagaaaaatatgatggcctcaaatcaataacccagagaaatcttctaagttttggatccctcgtttaataacattttcaatgaacaatttactccgaataagataacattcataacttaatggcattaggatgaagatagtcttttgtttggttgtgtgttgtttgttttgatacagcagatgtcaacaggggaaaaaaaagctagattcttgtaaactagaaaatctcagcctagcagtgtttggctgacgacattagttttcctccattttgcaggcaggagagaggactttaaaggagacaagggtgaccttgtgcttctccgagctgtatagtcagggcagacggtttctattgctcaaagtcactggacagagttttaagggactgactggactcccttctgctgggtataggcagtcatctagcccctgtgagtgcatcatatcctttttaagaggaagggacaaattttacattttatgaactacttcagaaggaaagtgattggaagagttttctgccagggaagcttttctgtttcatcttagaaaaatatgtccttgcagcaaaatcttgctagtgtatgcaatggtgtcagcgtttggaagctgattatgggatggatccctggatatggcagtctcaagatggtccatcctttcgtcacagttccaaactttgtctctgtaactccttccatgggtgttttgttcccaattctaagaaggggcaaagtgtccacattttggtcttcattcttcttgagtttcatgtgtttagcaaattgtatcttatatcttgggtatcctaagtttctgggctaatatccacttatcagtgagtacattattgtgtgagttcctttgtgattgggttacctcactcaggatgttttgcattcactagcaagattttgctgaaa

SEQ ID NO: 24235 - DNA, 1238 bp, Mus musculus
cctgtgtccattgtaatatttaccttttaagtttattttcttgtgggattccattgtgtcactgtcagatataaatgatctaacttagaattcatgtagaattctacatgcatactatgctttgcaaatgcaaggctggcttttctgtctcagagaaagtatatttcaatagacaaaagtacctaggactaaacagacaatgagacagccatacctctgagactcctaatgtattttaaaagaatatgtatattcttttacacacacacataatttaaaatttaaggaatacattctctagttataagtaaaaaacaatcaataacaaagtggtatctcaatagcaaagtggtttcatctcaagacaaaaaaaaaaaaaaaactgagtgaggttggttaggtggttacccatcttcctgattagtttcacctccttattcaggaccagcacagactggcgcaccctagggatctctgggtgagtatctctttgagcacctcactctcaagcacgactaggagatctctgtgccttccaaggggctccccctctgctctgcaccagcctgccttgggacctccacctgaatgaacctctcaagccactaggcagctttgtaactgccctggagcctctgtcaagtcttagaccaagtaaaagtaaagctttttgagacagaaaaaaaaaaaactaagtgaaaaataacaacaaaaagcaaaacaaaatcaaaactacaacaagaagaaaacaatacatatggagttttgtcattttgaaatgaacacaatcagaatgagccaaaatctagatcttttttaaaaacatccaaattcattgatcatttaaaatgtctttgttgctcatcaagaacagtcaaagactttgagaatggttgaagatatgatcaagaaagttatctttaacagctgtaaaagtaaaaaaaaaaaatcttgacaaaaagtctgagtattaaaacttaaaacacaagggtcctcataatgcccaggttttagaaggttgcagtactaacatttattgctaataagttggtggggtaggaaaaataaatgtgagcaaaagccaaagaaaagagattaaggcaaacaaaagacgaagaatttaagttctgtgatgagtgtgagtctgttcatgagatgtggaaggttatggaatatcataccttccatttcaaaatttatccatgactcagtcttataattgattcctagataaatca

SEQ ID NO: 24236 - DNA, 1434 bp, Mus musculus
caggcaatctcttctccagctcaagcaattccaagttcttttcacttttgttccccataggtccatttgccaacactaattattttggttgctcttccctggttcatttccaactttccaaatcacttaaaaaaatatatagaacctcaaatgggacaaagccttccacggagctggctggatctgagcttctagatggtgcgctggccactgcagcattttctgcttagtggagaagggagagcaacctcgtgttatatgagtttttataaccagaaactgacaccggtgagccttctccgccgcagcctgctgtaatttgcacttctgctcctacaagatgcttaagcgcatgatgttgtcatggtgctgcaagctaggcgtttctcagtaagtgttggttgatattgctctatatttttttctaagtatttcacatcatagcttattttaccgatggtttaggctaagaaattttgttcattctaaaacctccagtttatgtagacaaactttcatatttaaagtgaggtagtgtagcaagtaagagtacttgcgctctttcttgactccatcttcgcggtagcagcagcggcgtccgcgggctagtagccaacatgcagctctttgtccgcgcccaggaactacacaccctcgaggtgaccggccaggagacggtcgcccagatcaaagatcatgtggcctccctggaaggcattgcccccgaagatcaagtcgtgcttctggcaggctcgccgctggaggatgaggccaccctaggccagtgtggcgtagaggccctgaccactctggaagtagcaggccgcatgctgggaggtaaagttcacggttccctggctcgggctggaaaagtgagaggtcagactcccaaggtggccaaacaggaaaagaagaagaagaagacaggccgggccaagaggcgaatgcagtacaaccggcgctttgtcaatgttgtgcccacctttgggaagaagaagggccccaatgccaattcctaagtcctattgccaccctgccatgctaataaagccactgtgtccagaaaaaaaaaaaaaaagagtacttgcaaagcaaacttgacaaccttagctcaccccaagcatccatgttcaggtgagaggaaaaagaatctacacataaagttgtccttgattatcacaggggtgcatcgcacccgtgtacgccccatacaaatgatgcccacgcaataataacaataatttaataatgattaataataataataatttttaaaatgacatgtaagttgtccgtgtaatcttttattctatacccacacattacattggtttggtaacaacaataagagctttgtatatatgaagagttcatattttacagtgtttgcttgtacagtacactccagccatccactgaacaatgtttattgag

SEQ ID NO: 24237 - DNA, 1226 bp, Mus musculus
atataaatcttctataagtcacaaaatttgtcccctttgatttctaatttttgtttgcttcatgtctttaactagaaaggaaaagtaggaaaaaatgtcttttccttgagttttatttatcatcttccatacattcaactctacagtattttgaaagtgattgaattttatttattctttttaaaacattcaacttagaagaacatctcttattcattgcacacttgtattccagttggttcttctagtattaaatggcttgggaatgactagaactgactctgagcaaggatgtaaggtacttagtgggtgactgggagcatggatcagggaaagtggtgtgacccaggggttacacacaagttgtgtcaagtgcctgtagctaatcaatagctccacagataatattggcaatagcaacaatagtaatcattgcttggatacacacatatccattgttcttaaaattattctctgtaccatctatcaaaaaacgtttctagccatatatggtttaaacatttgggatcgagttaactgaagaatatagtattacattgtagttcaagtttaaacagctgcatgttgctagtagctaatgaattagctggattttggagcggtgaagtttctgtatgggtaaaacttattctttgaattgattaaagtaaataaacatatgtgctctttgtttcctcagaagtgccgatttatcacattttctcagtaggtcacaagggattaagagagtgatgcttgtctatatgaagttgctgtttagaactatctcaattttttaaaaagcttattcaggcctaagctcagttaaaactgggaaccctctcttatctagactattaccctctcatctacctaactgtccatctacagataatctatattttattattaaatatgcattttttaaaatattggtcaaaactaaatataggtagtatttaattaacaaagaaaatgcaaataatgagccaaataaacatactgaaggatattgaagacaaagaatggaatgttttaaaatgattcaagcaattgcatagtttaagaaagtcactgtaagttatgcttcaccactgagacgtaaagtattaggcagatgataaaagtaaagatcgattcactagagtacagaggcttcctctggatcagcggaaactcaaaaatagaacattgggtgtgctcttacaaaaactcaaaaacagcat

SEQ ID NO: 24238 - DNA, 1154 bp, Mus musculus
gatgaagggaggatctgcatgagggggtacttggaggagagggggctaaaattggggtgtaaagtgattaaatgcatttaatttaaaaacaaaagcaaaagccacaccattctctctctctctctctctctctctctctctctctctctctctctctctctctctctctctctctctcctctcctctctctgtatctcttaggctctatctgtctctccttctctttctcatctctgtctctatgtttgtttctgtgtacttatatctttctgtttctctttatttctgtgtctctttctgtcttttttttttttggtttttcgaaacagggtttctctgtatagccctgactgtcttggaactcactttgtagaccaggctggcctcaaaactcagaaatctgcctgcctctgcctcccaagtgctgggattaaaggcgtgtgtttctctgtctctggttgtctctctctggctgactgactctctgtatctctgtctctctgtctctgtctgtctctctgtctctctgtctctctgtctctctgtctctctctctctctctctctccctctctctctctctctgtatatctctctctgtatctctctgtctctctctctctgtcttccccctgtggatgtctgtaccatgccaggacattccctacaatgatggccatagaatgatcctttgaaactgtaagcaagcaaatcccaagtgaactgcttccttttataagttgccttggtcatgttatttcatcccatcaatagaaggcatgatgatcaggattttctggcactcagaaaaatttctgttgagtctaagcttcttcctcgtacagcacaggcaccatgatctgtcaagcttagagggctccactctcagctcaccaaatatgatccacctcatactgtacaaacacacatttccaaagctctccagtagtttgaaaggaaaatatggcattttagtttcatctcagtttttaaatttgaaatattaatttaattacatgtctccttttcttctttcttaactttatatgtgcttcctgattatcttcaaattcataggctctgttttcactaattgttagtggggagaggtgtctaaatataatctgttgcttgtataatgttgcttttattca

SEQ ID NO: 24239 - DNA, 3520 bp, Mus musculus
tttttttggttattgtgaaacaataaaggcttaagagtaatagcattgaccatctggaaaatttggggtttcttaccaagttgattttaaggcccttatcttatatctgaagaaagatatagcactttgaatatgatgtcatgggtgaagaaatttgtgagtttacacacatcccaagttgattcttgaatcatctgaaaatgatacttcgtagtttctaccattattttcaggatatctgtctcatttattgatgaacatcagtatctctcaaattgaaaaacaaatccatggaaaaactgcttaatgtatgaatttgtttttatagtctgagaattctaagtgtatttggttacctgtaaaagtaggagacatgactgttttagaaatgactagttttctttctaagtcattcctaaacatctatgacacgatttctttcctgtctttttttcttttgttgctgtttggagatagggcctcagtgtgttcgttgcctaggctggcctcaaatcctgatccttctgctccctgaatgctgggctctcaaggctgtatggctgtagaacagtttcctaagcatttaaccggtacactacagaggtagcaggaagcaggaagctttagtgcactacaaaagaagcgtccgctacacagagctgaaacccttgatgctgcatgggtcggggtagggggaggatcgatgaggacagtgtctgtgcctcgctcggggcctgtggactgctgcaatcctgagcaggcagggtgagggtggcagatttatgggtctgtagctaaacactgcccttctactgtaagtgatggttttgcaattggaaaggaaggaacagagggagggaagggagagagggacagaaggaacgaaaggaaggaagaaaggaaagaaaactgttaattcacttatctggatgagaattctcaaattactgatttttaaatgtgtgtttttgttttgtggcagaccgtactgcacattttatgttgtaatctaggcttttgagttgtagtacggttcctggaggctatttttttcctctaagagtcagtgaacaaagagatttgaggcaagttaagtgtcttccctggtcctgaattccagacttgagcaatgtgcttgctggcccgtggccgcacctgcctctctctagctgtcagaaatcaagtctgagtcttagttttgtgaaagtgacttactcttaaaagaaattttaaaaggagtaaagggaatactcctacctgccaaatgtattaaatatagttttcgtaggaaaaaaaaagtgaatttattgtatatcccttaagattgtgagggagtgtgtgtagcgtgtattgagccagcatttcctttatagtagataaggtctgtaataaaagatttcattaactgcaaaacctttcccctagggaattggtccctgctaatctcttcaggtgctgtgctggtaaatgctacattataaattaatgttggcatgcatttacgactaagcagaataatgtgtatacttttaaatggtgaatttaaactgaatgtccatgtaatggattcgtgtacagttttacatatttggaagcattttttttaaactaggtttaaacctcacgtaaaatcactttttatatttgtgttgtcttcatctgtgcctttttaggtaaatttaatttctacaatgactttctggtgcctatgagctagctatcacctaccttgaaggtgcttagaggtgaaggtactgttttcaaaagcacatcactgtggctttctacccttagagtccccctctcgccttctctcctctgcttttcttgatgtcacttaaataataccactgtttattaggatttaaaagaaagtcacaccctcagtacgctttgaccgtgcttctagtttataaccatagccatgtttgactttcagatgtttggcatttttataagatattacaagaataaactggaatgcagcttgtaatggtttcgagaatggtaatgaagattatgctaggtagaaaacactacaaaagcagatgtgtggaatcttttccttttcctagactttgtatttatttaaaggcaaacaaaacctagagtatcccgctatttttagtctagatctgtagcaactataatctgaaagagaaacttgtttaaaaaaaaaacaaacactgtgaaccccaacaggcctggaggatcaagaatcagagacatagttgattttttaggctttggcctgcagcgcttctcattgttagcctcagtttcccccaaaggtcagacaagtactagcaatttcccagacaacctcactgattttagtcaaccaaggagcaagtacttgctctagaatcaatgttggtaatggtcaacagctcatcggccgtgctggcgcatcttaacgtagagccagtgtgagttcagggccagcactgtcttcccagcagacctttctgattccgcgctatacacgagagacttattaacccatattgtgatgttccaagaacattaaaacatctctggagtgaaatgacactcgtctgtgttctgaatacagaacagtttatgagtattaatttattgataatcttagtagtattttcctgttagaaagcctccccttctgctcagaggctggcatcaatttttgtgattttgtagttacatagacaagtacttccttaaatttgagttatctaccaaggatttattagtatggagacagactgagtgtgtttagtggggaagatccatatagactatggaaatgcctaatttctggcacatgtgactgtgcacatcatctatgatccctgaactcagaggcacaggacgatcatggctttgaggccagtagccagttcaaagcaagcctgagcttccccgagcgacctggcaccgagagactggactcagtagtacagcattttctctagaatgggcaaaaagaatgaggtctgaatctgaattcttttaaagaaatgaatttcagactgtaccctgggaattagattacgtggagaggcaagtaagctttttgattaaaaagaactcactgcatggagttggctattctttaatgtgtgacttatgaaataactactgtctctgtgtgtacagcatgtaaatttgaagctatgtgaatgttcattcataggtttctggggtttttttctaaaatatttccaatagtgtttagagtgttctcagctgccttatttcagtgtgaacagataacattcctattttatgtggtgaatgctttaaatgtgtcacttacagagtagttgtagaaaacagctggcacgattttaagtggtttgcgacattatatattatatatgtacatatatgtttataacattattgtgtttcatagtataactgttctgggcaagttttaatatttcaaatgcctctggatattccagcaataaaggcaacatgttctgcagtcaaatttctcgtttgcctactttgacactaaaataatctgtatttg

SEQ ID NO: 24240 - DNA, 1123 bp, Mus musculus
cagtttaaggaagcaggaacttttacaagtactggtttcttctctgtttggctctttcaaagttgttgtgtgttttgagaaagttcagaagaaacttcacacgtgatttcatttaaaaacaacaacaacaacaacagatgcactgctagtgagcccgtacgtagaagcccgagcttctacgaggagcgaagtgaagttttgtcatactagacttcatagttaaacaaggtgcatattttaaaaattagacttcatagttaaacaaggtgcatattttaaaaatcagaagtcagatgtgattttaacacatatttttctttaaagattagtgtttttatgtgcctagcacatatcaggccctgagttattaattcctgtcaccctagtacatatacaaaggtttggtttctggtttgggttctattatgttgcccagacccaagcttagtggccatcttaccgcttcagccttctgagtggagacatgggggggaggggaggggattgacatacattgccatgcttggcttaaatactcctgttgtccattcttgtagcatttctccagagattaccgcctgattctcgcattaatttctaagttagttctttggaacgggcatccacttggcacgccacgctgatgatccaaacagtccgcttgcttcactgtgtgcttcctgcgtgtagcactggagtcaaggaaacccttgcgtttccaagtcccatgtttgcctctcccattcttatataacacttaatgattatttttcaaaacgtgtgcatcctggcaagtgatttcaggaacatggttgaagaatacttcgttgccatcttgacaggtagcttgtggtttcttggactcttgctgtttcctatggaccattgagaaatggcttttaccattttgtttgtttatatagaactcaccttggtgtttattcttttaaggcttgtcaggtttttgttaattttcaaagtcatcctttttaatcagtttgtgtacttaagtgagaatgttaaagatctcgctggccttttaaagggttcagatgtgtgaccaggcaaaataattccatggacatgagctgttatttaatggcggagtatagcgttcctgtca

SEQ ID NO: 24241 - DNA, 1203 bp, Mus musculus
cctgctgactttgtcactgctgacaaatttgatgagaatgccaagactagccaagctactgtggcctctggtatacctgttggctggatgggcttggactgtggtactgagagcagcaagaaatatgccgaggccgtggcctgagctaagcagattgtttggaatggtccttttgggttatttgaatgggaagcctttgaaaggggaaccaagtcactcatggatgaggtggtgaaagccacttctaggggttgcatcattatcataggtggtggagacactgccacttgctgtgccaaatggaacacagaggataaagtcagccatgtgagcactgggggcagtgccagtctagagctcctggaaggtaaagtccttcctggggtggatgctctcagcaatattgagtttttttctttcctgactttggttcctgtgcacagcccctaagtcaacctagtattttccgcatctccatttggtgttagcacaagattcagctagtggctgagatgcggcaccaggaacccttaaatagttgcacagcatctcagctcatctttactgcatcaggatttgtctgcgttcttcaagatcccatttaaattccttagtgactaaaaccattgtgcattgtagagagcgtctatttatattttgtcactctcagtgatctttgtgattgtagtttctgacttcctgattgcccagggaacacttacgatctaatatctcaaacaccaagaaaggaagggctcacttgtacacccagccatacctagacaatagcaaaggtgctggagatttggctaatgtcttcatgtttgtagaggataagttatatatgctgaaacatctgccaagtacttataatttgtcttctttaataaactgagtgtaggtttatattggagggagaggatgaggcatggagggaagaagaaaattaaggagataaaataaacatacacagatacatggggggagagagacagaagagacagacagaaagacagagacagagacagagacacagacacacacacacacagagagagagggggggaggagagaggagaggagaggagaggagaggagaggagaggagaggagaggagattttgtaatctaaaacctgggaagagaaggaaaagacctcttgtttctagtgcttttgcagagtcacaggtataaaaaatgtaa

SEQ ID NO: 24242 - DNA, 1208 bp, Mus musculus
ctacaacaagaacaacaagaagctatatatggctcagcaaatggcacctccgagcccaaggaatagcacccccaacagcagcggtggtggcagaggcggcaggagcggtggaaacaaccagctgagcaaaaccaaccggtatatcggaagactgcagccaggcaccgctgaccaggaccttgtcaagctctgtcagctgtatggcaagattgtctccattaataccatcctggacaagaccacaaacaagtgcaaaggctatggctttgtggacttcgacagtccgtctttagcacggaaggctgtcactgcactgaaagccagtggtgtgcaggcaggaatggcaaagcaacaggagcaagaccctacaaacttatacatctcaaacctccctctgtcaatggacgagcaggaactggaggggatgctgaagcccttcggccaggtcatctccactcggatccttcgagacactagtggggccagcagcggggtcggctttgcaaggatggagtccacagagaggtgtgaagccatcatcacccactttaatggaaagtatataaagacgccccctggagtagcagcaccttctgaccctttgctttgcaaatttgctgacagtgggccaaagaaacgacagaaccaaggaagatacatgcaaaatggatgggcctggccaaggaatggaaacacggagacatgggcagtatggccttgacctatgaccccagcgcggcccttcagaatgggttctacatagccccttacagtattgcccacagcaggatgcttgctcaatctgtgttagccctgtatcttccatctcgtgtgtcttcctgggatggaccaccccattctctctccagcctgcctccatgatgggacctcttacccagaaactgggtcacctgtcactcaacagcctgggcacgttcatgttagcagctactgctatgctcagggcttacatgtcccagtacccagctgtgccttcttccagtgtttctgctgaggagagcaatggtcagcagaatcaactggcagtggagcccccctcagaccacggggtctatcctttccagttcagcaagtgatgaggtccagacctgaggagagaagcctaatgcactcctccttgggctccttcccgttgctgatggaacctgaggaaccacgttggttttttgtttgtttgttttttgctt

SEQ ID NO: 24243 - DNA, 1432 bp, Mus musculus
gttagatgaacttccagatgacaactaagaagccaagagcccagaacacaccttaactctctaaggggttggggggacggggaggacggacttgaagccagaagaggctaagcctgatgataaaatctgggacctgacttgcaacttgagtgatgcctttgtcccccgccccctccgcccctccccaccccccctttctagaggcaggggctgagctcatgcccctatactttaagagcgcttcgccagcggttttgtccgctagatagaaattttccaaaaaatatctcccacgctaggcaaaacactgaaaaggaagtttttttgcgccaagaggagagacatggcgagacagaccgagccactaccgctcccaacacacacacaccctgcccatcccacccggctgcgctcctcctgcccccagctcctcgccctggggacagctggcagcctagcgcgggactagacacaaagcggatcagtctgggggcggggggccgacctgcagggttctccctcaagaggctagtcctctgccgccactcgcttaggaccctgcggacaccgcgtcccgcgtccacgccctcccctcaaccctcttccacccttcaaaagaaggactgtcccagacaccacgtcctagggccagaagacctgcccccacgacagtcgctggagacaccccagaccggagagactgacatcgggacaggacccgcccctctgcttccacctctcagggacctcctctgctccgccgccgggcgaagtgctgggagacccagccgcctgtcgcgctcctgcagggggaccctcagctaggcagccagctggcgcccgcgtagatggcgaggagcccccaaggcctcctgatgctgctgctgctacactacttgatcgtcgccctggactgtaagtctctggggtaacagtcctttccaccctccggtctggctataccagcctccgggaccctcgcctgcaggcatggcgctcagtgctagggggtctgtctcggggcgccaggctttgcagtctgggagcacggagggtaatctggatgagggcaggctctgggcagggagactgaagtcctgtgcgtcttgtaaatagtgttggatctgggcagttaagaattgaagaaaacagacgatcctcatctccttgcaaagtccgaggaagttttcaaagacaccgggacgtgatcagaatgcaaaactctctaagtattcaagatgcgaagagcccaagaaagatggcatccggggttggcgaaggccactcttaagtagctgcggctgagggatcagtggttacggtcccagctgccccgggcaaggtgctgggtaaagcactttagaggcggtagcggggtgaaattagctgagccccagtagcttttcgcctttacgcctgcaaaaccggctta

SEQ ID NO: 24244 - DNA, 1872 bp, Mus musculus
tactgttctggccagttgaatcaaggtcttcatttgttgatggcaaggcaggcaattggtggagtatttttttaaagcaaacatggtgccaggtgtggtggcacacacctttaatcccagcacttaggaggcagaggtagtaatctctgagttcaagaccaacctggtctacttagagagccccaggatagccagggctacagagtgagaccctgtctcagagagagagagacagagagagaaacagagagatggagacaaagacactgagggaaagatgttttaaaatgtcctacaaaaatatataaaatgaacatgtaagttcaaagtttaaaattaagttgtttttttttttttaaccaggaaaacaaatgctttagttttaaacaaaatgactcgaggaggatactacatagaaagttgcttgattatttctaatgttattgtcttttgttcccccccccccccacaaaaggtgactttaaagaccgtgctgagatgatagatttcaatatacgaatcaaaaatgttacaagaagtgatgctggagagtatcgctgtgaagtcagcgctccgactgagcaaggccagaacctgcaggaagataaagtcatgctagaagtactaggtacagcacacacatatgtaacggctgccagctgtcccgtcctcgtcccccagccccgcggaaagattttggctttgtttgtttttcagcagcctggatggtattacataagtttcctgtctctcctctccctttcatcttcagtctaacagaggcatactggatcctttttgtactttgaattactagacacttccttcggtaattagccagcgtgaaccctgaattttaaaagtccatgctagggtctggaaaaatgggccagcagtggttaagagcatttgatgctcctgcagatgacccagtttgtcccaaggtcatttcccagcatctacatggtggttcagaaacttctgtcactccaggtcctgaagatcttctaccctcttcttctgacttccattcgcattccatgcattcggggcatatacatacattcaggtaaaacattcatacacattaaatatacataaataaatcattaaagccaccatgttgtgtggtcatatccacatttctatattaccgagaatggatttgaaatcttaattatatcttccagatttcttcatagtactttataaatataatcttatataaaatatataaatataattttaagtactgagagaccatgcatgtatactgaagatgggaatgttgtgggactgccaggattctgcctaccatcttcagtcctgaattttcaaggagattattaatagttatctacggtcttacttagggttttcttgctgtgaagagacatcacggtcatccaactctttgtaagggaaagcatctaattggggctggcttataggttcagaggttcagtccatttatcatcatgttgggaagcatgacagcatccaggcagacatggtactggaaaaggagccaagagttctacatcttaatccacagggagtagaaggaaactatgtgtcatactgggtgacctcaaaacccacccccacagtgacacacttcctccaacaaggccacacctactccaacaaggccacaactcttaataatgccactttctatgggacaaacattcaagcacagagtctgtggagatcattcctattcaaaccaccacacccactacattctattttagttcaagtctctaagacccaatttccccaatgagacccttcttttttcctttatttaaaaagtactatataatataatatgataagataaaagaccccacttcttaaagtctccac

SEQ ID NO: 24245 - DNA, 2510 bp, Mus musculus
agcaaaatgttcttgccatcactaaattacaacctggcatcttgtgtctgacctaaagtgaaatgtctggtaatattctgagtttttgaagtgcaaatgaatgtcagtttggagttgactatatcacactgactgtaaggctaatccaagaagcaagaatatactccatgtgttctctccatgcaagaatggcttatgtgttcaggaaatactctaacgaatggaaaccctgttcacaaaattcctaccagaatcctcttcttacctctaaataacttgggttccattgtcctgtgtctctatatcccagggctgggtcttacgtctaaggatttgcactttatattttctttcacttctcagaaccaaaagcagcatgaagggagctgctactgccatttccttggaggcttttggagaggctcagcgacctggacattagaatgcattactagagcctacacaactccacagacaccctttttgtgcttgagtggtgacctgttatctgtctctaaaagcaattctgaactgggctagttcctccccggtgaagatgaagggttcccagtcagcttatgatggaacaggggcacaggggagagaagcatttgccccataaggcaaaggtagatgaacaagctcattttgactcttgatccagcaaaggcacaggagaaaccatagctgaaatgagatgggtctaatgtcttctgaactggttatccacaaaggccaccaaccagctagtgtcagaattggaaattcccagggctcagcaggaaacccagtcctgttggggactactttacccatattaaaacaaacaaacaaacaaacaaacaaacataaacgcaacctgggatgtctagttctgggtaaataagcatgaaaggtcatttactccctctatcagctttgaacatggtcaagttggctttgcacccaaaaggcaaggcagattctcaggatttgcaaacagggcaagtggtcagagagtgcctggtattgatctggtcacaggggcgatgcccactgccataatcttcccctttaactttgtggccttgagtccttcctaaccagtagacacctttccaaagggctgacttgtgtaaaatggctcagccctcaagctcagattcacacttgagctagcaagctacaaggaacgagacagtacataattcaacccacatggttcttgttacaaccacttaatgtagagtacaggtaagtgtgcccacagatccaagctccttgcccctggtagccaacaaacacctgtggtgtataagaaatcagggtaaatgttgcctaggctgggactatgagctctgctttgataggaggactgctatccttctgcagtgccaagcagacagctctcaaggatgcctcttcaggcccacatgcctcttcaggcccacatagcatcacaaggcccctgcatcaatttaaacgacacaatccaccccatgagaggacagttacgtagtgccttaccttcactaacacatgagaagcttccttgtaagacactgaagcctaaaggttcactttatgcggtgcgaacatctaacaaagtctgtgccaaacacctattatacattcttagctaagctactgtatacagccatgcagaaatcattgtattaagaatgctttcttctacacaaaggacctaactgcacactaatcttctagttattaagtctatccgggagtcactgccatgaagacctgtctgtctgctgttttctgtgacttgaactctaacaatgtgtcaaaatctaattgtagtgtctagatgttgattttatttttcccgcagtcaaagtgcagtaagggtctagaaactatgtgagcgagttttgttttggtactgttgctgttgtaactagatccagctcatttttggtcgggataggggttaactcactcaagcactaaggctgcatgtttgttttccaatacaactttacaaagaacttccttcactctacaactcactttgtttgattaaagttcacgctacaaaaatagctatgcacagctcaacgttttagtctcattcaccggagggggaagtcactcacctattgttcaataacccaggaaactcctccctcccttccacctgctgctgtgaggcagctctagcagtttaaaatcaagtttcacttgtctctacgcttggatcccggccaacttctaaagtcagagaacacagagggtaaactacttactggctgttttgtgtatggcagaggtggggttgagggagtgccaaatctccctcctcttccaagaccttgtgaagaagagcctgcggtgaccgcttgctttgcagtgctgtgttactggaggagctgaacacagccaccagatccacagctcacactttcttcacccacccccatccaccatggtccccaaacctatctttgtcaaactttagcatttaaaaagaaagatgcaacagaattttatacacaaccaacccagga

SEQ ID NO: 24246 - DNA, 1155 bp, Mus musculus
gtcttcttttcactctgtgcactgcctttttcatgagcgttgggcatgtactctgtcagatctttctgattcatcactttgtctgccactgtattagacatcacttacaaacatgggtgcttccctctacgaactaacaactttacctccattgtttggattaaaggtgtgtcctaagggcatgcctttaatcctgctaaaggaattaaagctcagggctgagccacactacaactagatacagcccctccccccaagtaaatgactcacagtatgatcaaatatcctgaacaccaacaagttccaatccatagagtaatggagtcaccatctcaggctaacagatgccactctaaacaaactggcttataaatgttgtatgtgagcttttacatatagagagtacctctctccctctgatgtaattcagttttggtctcttgcagatcatttttgtttgtatacatgaagtttaaaaaacaaaacaaaaactctttaacatttacctcttccaggactgaacttttgaacgtcttcaaccatgactaagagagaagcagaagagctgatagaaattgagatcgacgggactgagaaagcagagtgcacagaagaaaggttgatgtttctgaattgatcaattttaatattatcagtatgccacgttacagctgaggagtaggccagtgtgcttgtttttaacctgacctcacagtttagaggactacatattgtagtttggtttttgtcgtccccatctgacttcgtagctcagagaggaaggcatttctgaaatacaggcagcagtgaggttagttgatccgtatcacatggttacagtagtctgcacccaccccatctaaggatactcttttttttttctcccatttaagtgctggtgacttttatgacaaagacagtttaattcaacctgaacttacttaacaatagttatttatggataactgtagaggatgactagaaaggataggctgctgtgcttatagccaaaaatatgccaatagtcctcacttagtcaaaaaaaattttttttacattaaccaagtataatattattctaaaataatattatcattaactttaaaataatattatcataaactttaaatgttttaagaaaaaaatgtgatgtat

SEQ ID NO: 24247 - DNA, 1207 bp, Mus musculus
caactcggtttcattcattttgactgctgagtagcatgtctaaaaatgctgcaaatttcactagatttaagatggtattaacaatttctattctacccttccatttcaaatgagctaacataatcgcaggaacgtcagttttattgattgcatttatttctattttctgtattagaagaaaagtatattcttcttttttccttttagctgtgcagattattccagcctcagtgcctcccgctacaccgactacgattaaagttataaacagcagtgcaaaagcagctaaagtgcaacggtccccaaggatttcaggagaagacagaagttcaccggggaacagaacaggtacttttgcatgaactggtgttagtaaacttgtcgatttagatatattctaagttggactagttctctggcagtgttaagctaatatttataaattgagaagtttgtttttgctttggttgagattggaccagagggcttgtgcactgcctttacctgtgttagcttctaacatgacctatgcttattctgcttacggatttaggaaacaatggtcagatccaactatggcagtttttgctagaacttcttactgacaaggatgctcgagactgtatttcttgggttggtgatgaaggtgaatttaagctaaatcagcctgagttggttgcgcaaaaatggggacaacgtaagaacaagcctaccatgaactatgagaaacttagccgtgcattacggtaagaatttgttttttgttttctaatatcatacttctctagaaatgtagcttcttattcttgatataaacctggtagttaatgaaagtaaaatactttaagattgtgtgcatcccgcatgcatgtgtgagcgtgtgcacgcgtgtcagtgttggttgctgaggtggctcagtgaacaaaggttttcaccccagagcctgctgcccagctgaatctcttctctgaacccacatggtaggagactagccggcttcaggttcacacacacacatatatatacccagagaaaaaacagagaacgtgcatttacaagatttatttacaagatttatttacagttatttatgtgagtacactgcagctgtgttcagacccaggcccaggagatgcctcccatagacatggttctgatgggacttgaactcaggacctctgcgagagccagcagccagtgctgctaa

SEQ ID NO: 24248 - DNA, 2755 bp, Mus musculus
ggagctgtttcctctccgctgctttacacagagcctgaaaaaggacattctcagctaaagcatgtgtgcctgtttcatctaatcaagcagagctaagcagtcctatcaaatacaattacattggtaattactaaactatcaggttattaatttataatttacaagaagagaggaagttaactggcagaagaaagtgttgaatgagacccagatttaaagctggcttaactcaaaccactattaatggttttctgtatagattattcattatgtcaagccaaggtcttaaattattttgagagaggcatttaattctaataaaccagctattgcaaaaattccaaaatgatatcattctttctctcagattttaaaaagtatacctcagaaagaaaaaattggtttagttttgacttcctatttttttaaaaattaatctgtagtaccagattattatgcaagaccgtttatatattcccttctgtgtttctgataaaatgaagactttagatcaggcgacatgtttaacgtttgacgtaagttccttgtgagtagttatgaaagggtttgactgggctctgtaggcgatcttctttaaataaagtttcccacttgtttcattttttttcttttgaatattgcatatatgactcttaaaaaatactgtacacatgactagctaaccatttctgcatatatgaagacagatattcaaggggagattaatatttctaacatttttaaataaatcttatatgaaatgccttactgcttgctaacactaagaagaaatgcctaaaaaatttttttcttcatttattttaaagtattatccataaatcatgatatgagagattagcatatagttttcataacagaaaggaattcctcagaacaggataaaggctactttatatacacctctctcatttgtttttctttcagttcatttcccaaattggctttagaagagtttgaggagagaaagtgcagcctgatgatgcagccaggaccgagtgttagggagaagacagagggtttcttacctcctatatcatgacttccagtgctgggctgtcagacttcaacaagggttgctagtttctttatattaagtcctttaagattatacagtaaatagttaaaaagagtaaaatcctatttttttatatttgctctttgtttttataaacaacagtaggcaggcaaattattagtacagtttggtcaccatgaattgaaagagtagagtataagaataatctttaggccctgactttcgacagcaaataggcctgggagccgtaagtcactgcttgagaacagggcattgccgcagtacatcagagcttgagaagctcagacttacagtgtgttggagacattatgttaaagctttagccaagaggacagactttgtgtatcattcggaggaatgtgttttaaggaaaggaacatttatatttgttctaggtccctacaatcaaacatttccaaatccttaacaaaacaaaacaaaacacacaaaacgtgttgtatagctttgcttcctttggaagctggtgggttagttgtgatttgagcacagttctcagatcttaggtggttgttctctacccctcctgcatcctccatgctccccccacacggaaggagacccaagctttctcactctggctccactgagagttcaaagatgtgttgttcttattgaggccccagtttgctatcatctattaaaataactcatgttataaaagaatgttaattcatggtaatccttgctcagttttgtcgtgcatttttcatagagcctaagatacagttgaacaaaaagaacagaaaacggtctgaccatcttttgtaccttataagttgaagaataatgaaatgttcctgttgctagaaaagcgagttttccatgtgatgtttacattgacgtcattttatatctgtgctagcctgaagtctgagctagcctgaggtctgtgctagcctgaggtctgagttagcctgaggtctgagctagcctgaggtctgagctagcctgtagtctgtgctagcctgaagtctgagctagcctgaggtctgagctagcctgtagtctgtgctagcctgaagtctgagctagcctgaggtctgtgctagcctgaggtctgagctagcctgaggtctgagcgttggtgctggcattggaaggtgcagccagttaggcagaagtgctggctgtgactgagctcctcatgatgagttagccaactgcattcattttagtgttgatccatgtaaataaagtaggaaaaattattcagtttttctccccagataaacagtaatgctggagtatggttatttcttttaaagagtgtacctccaagtatttttggcaagttctgtcattttctgcatttgccatttatgctactgccttttataaagaactagtgtatccttgaaatagcacaaaaatgttttaaaatttataattgcaaaacaaacctgtgactgacttaatgtcttcagatctaaaggctataaaaaaaatgttgatattcaatatttcacttactcccaagaaaaaatactcttgagtcttttgtagaagggaggagaatttttgcatacatttttactctttaaataaagacacttatactatcataataacaattatgtatttctttgtttttttgtaattttacataaaacagttattttctatttttactcagataaatatttgtgcataaaatgt

SEQ ID NO: 24249 - DNA, 1148 bp, Mus musculus
aaacaaacccttccgtttatttactcaccctcggcttttgacagctgtgctgtaacacaagtagatgcctgaacttgaattaatatacaaatcagtaatgtattctcgctttctctctttacattctggtctctacattacatgattcatgggttttgtgtactgtaaaaaaaaaaattagctgtatcaaactagtgcatgaatagattctctcctaattatttatcacatacatagccccttagcccgttgtatattattcttgtggtttgtggcccggaaaaaactcctacttgaaatatgctttaaaaatcgatgggggatgcttcttgtgaacgtgggcgtctagctgcttctcctacgtattcttttcctgatcactatgcattttgaacatttttttaagtattccaaatgacttagaaaattctttttccatgactgcatcttactgtacagattgctgcttctgctctctttgtgatataggaataagaggatacacattgatttctttgtgcctgttttatgtgcacacattaggcattgagaatttgaacattttttttgtccatgtatctttggatctttgataaaaaaaaattaaaaaaaaattatccctgttcatcataagcacttttacgggtggggggagggagtgttctgctggtctccaattaccaagaattctccaaaaattaattttctgcaggatgattgtacagaatcattgcttatgccatgatagctttctacactgtattacataaataaattaaataaaataactccaggcaagacgtttctttgaagggtgattgtgtgggagggaaaaggcaagatccctgcatttatcaacccaaggcgcttcgtttaataatactgacagagaatgaaaagccaggaagagagtaagagggaagagagggcaccctgagacacccctgagggtttgtataaaattgtgttttcataggaataccttagactggtatgattgtatggtgagagtttattgcttagtcatctagacccgtgagaacacctcatctggtcactcacacctaacctgtgagtctgatgaggaaattgtgggcgcacacagctcttagtgctggtaaactaactggtggagtttgttgttttta

SEQ ID NO: 24250 - DNA, 1204 bp, Mus musculus
gcgcagttttaagtacagcggaacttagaggtaaagtaagctgtgccttgagccatgggtgtcaggatgcttttgattcagggtactctggcaacacttaaggctatcaggagtcacttcagatagagtctttccttatttattgttcaacttttaatcttctccaggtggtcaaaaattgacaccaaatatagtttagtttttgggaaacctcatcttttcttcttggagaaatatttgtcctttttcagtcaaaaggttttgcttagcaataccatttctagtaatgataggtcagtgtgctactggctattaacacaaacacacagcacacagaggcgcgtgcagaataatcagctaggaagcaagaagctcataagggccccttcacaagcttcgaccccatagtccatgccgcgctgtcacctaacctgtggtttacatcgagcaccagggaattctgatgccacctcacttctgggctgcacgtgtctcttggcagtgtcacttccttttggccatgaggatctattgttcgaactttgtccccttggcaatgagcacacgatgaacagtgttggtgagcttgagatgggtccgcggtgtggaaaggggaagggaagcgttgtgagttctgggcactgccgtagctaggagccgggacaggacccacccgggttttgaggaagtgaccacaaagtgtttgctgagtttgcttggttttggtgggaggtggtgtgggcacttatggagtatggattggtgttaatgtgtgttgtgaaaatgtgaccctcaaggaggaatgtattttagtgctactgacgtaaataaaatgtaaacgtcaaaaaaaaaaaaaaaaagaagcttaacaccatgttttaaactgtaggacaataataataatagcactgcagatgttataactggaagcagggaaaaaggaaattattagtggggcaggtatttctgggcaggggacctacttctaatgacaactataaaggtctaaagtcagacagaaaaacaggataaaatcagaatagatggctcagcacccagaaggcttgctgaacacccagaccagctgggtttgttctctgagatccacataggagaagaaaaagaaagctgtcctctggcctctacatgtgcacacagcatccctgccttaaatgaaataaacatgtgaaaatgtttttccaga

SEQ ID NO: 24251 - DNA, 1236 bp, Mus musculus
tttatgtaacaatttactgtctcttgcctaacaccatatttatcattctagaccagagagtggcttggaaccttttgtaatagggacatttttcaggaaatttttcttttctagacaactgagtcactagaaagaacaaccaggctggcagttagtagtccagttatttataaagggacaccttcacacgatctgacccaggtcagcagaaatcgctagtgtatgacacagcaccttcttcccattcttgcccaagctcggctattttagcaacccagctctggagaaactgcagcctcacatccgggggaacgtgggcttcgtgttcaccaaggaggacctcactgagattcgggacatgctgttggccaataaggtgccagctgctgctcgggctggtgccatcgcccctagtgaggtcactgtgccagctcagaacactggtctgggacccgagaagacctccttcttccaggctttgggcatcaccacgaaaatctccagaggcaccattgaaatgctgagtgacgtgcagctgataaagactggagacaaggtgggagccagcgaggccacactgctgaacatgctgaacatctcccccttctccttcgggctgatcatccagcaggtgtttgacaacggcagcatttataaccctgaagtgctcgacatcacagagcaggccctgcactctcgcttcctggatggtgtctgcaacgtgaccagtgtgtgtctgcagattgggtacccgataccacactccatcggtaccacactccatcatcaatgggtacaagcgcgtcctggcattgtctgtggagactgagtacaccttcccacttgctgaaaaggtcaaggccttcctggctgatccatctgcatttgcggctgctgcccctgcagctgctgccaccactgctgcccctgcagctgctgccaccactgctgcccctgcagctgctgcaggccctgccaaagctgaagcaaaggaagagtcggaggaatcagatgaggatataggattcggtctcttcgatcaatcccgtcaaagcaaccaagtcagcctgcttaatttgagaaagatggaaataaaggcttacttctcttaaaaaataaaagaaaggaaaagaaaagaaaaggaaagaaaagaaaagaaaacacgccaatagtgttgcgtatgaagcacgtgtttttcaagcattttatttacatcaagatatttaacgaaaacac

SEQ ID NO: 24252 - DNA, 1184 bp, Mus musculus
catcccttcaaatgatcagaaattaaaagtatggggccaatcccgatcttccatagggaaccgatggaagcacatgtatttaagaatgtccgccgtagtgaggaggtaagccgtatcagcacgcccccagaaggtgaagggacatagagtaataacagatgagcactggcttctctaattggggaaagtagacctgctgtatcctttgctgattgttctctggcaaagctgtaaaataccatgttcagtcctactccaagatgaaggaccccatttgtctcttatgagtgccctcacgtgctcgggtgaactgaggagccaaaataagccacagcacaacagtgtcttacagtctgcccatagctcctataatgaaatgccacacggtgggtaattaatatctatttctcacaggctggaggctgtggagacatttcaaagagtgtgactggcaaaggccttgctgctgcgttatgatagagacaccacacgctgagagtgaggagacattcataaacacgtgactctcttctccttttcaatatggccaccaggccactatagccctcttgatctcctgaccctagtcaaccatctccagaggccaccagcatatcagtagtgggtgaagcttctgatatacaaacttaaagctcaagaaagagctgtgaagaggacccttgtgatacaaacggttcagtctgggccagagaccagtgagggtccacactgtgcaggccctctgaccacatgcacacccacacacatccgcacacacacatcccacacccacacacagccacacaggaagtcaatcaatttttaaacagggttccggccagtgattccagtccttaacatctatttttaaaaaccattcaatagctggccgtggtggtgcctttagtcccccagtctcaggaggcaaaggcaggcagatctgagttccaggccagccagggctatacagtgagaccctacctccaagcaaacacaaatcattcacttagaggataaaaactgaagcagacagagcccgtgtgcagagcaagagggaattcatggtcatggtttcagttcatacagagaaaacagtcattgaggaaacagttctgagaacacggtgacccacttggcgtctcaatgtatttccagcaagatggctcagcaggtaaaggtgcttg

SEQ ID NO: 24253 - DNA, 1194 bp, Mus musculus
tctcagcacccacatggtagggtagttcacaagggatcctgccctattctgacctgtacctttggaggtcagaatgacatgcatacatactgcaggcaaaatatccatacacaaaaacaaaataaacctaacaagaagaaaagaaaaagatagaaagctgggtcattttgttttcagagaatcaacatatgagtttttctgtgcaagtgcaagtaaatatgtattatatgtataccatattttatatatttatatatgaaggcacgtttgatttagccttagctataatatagcaaagcaatttaattaccctaaatgtccaccagaaaggacactggttaaaatctcagcctagggctggagagatggctcaatggttaagagcactgactgctcttccagaggtcctgagttcaattcccagcaaccacatggtggctcacagctatctgtaatgagagccaatgccctcttttggtgtgtctgaagacagctacagtgtgctcatatacaataaataaacctttaaagaataaataaagtaaaataaaatctcattgaatccattccactgaacatgtagccatgaaacaaggcactgtgtagatcctgcacccgaggctttttggtgaccaggacaactgagtgctaagaggctggagctgaatttcatcccatacacgctattttgaaaagccagccaaagcagtgtatcgctgtgtgtatataacaaagattgggggggggggggaataaaggggaataaactacaggaataaaagaacttcagcctttgtgtagcgtctgttttacctggtggtaatattggactgtccatggactatcacagtccgcatggtaagaacttaactgcagacagtgtaaaggtgagctttcactctgtgaacagcataacgccacttgctgatgctcccaggggttcatcaggaaggcccctttccctcagttacttatgaaggcccacctcaggctagtgatgtcatctaaaagtccagcctcctatggagggaagcttagatgatcatttgcaaggatcgtgaccaccttcctcctctatcacttttaggagtggctactcgtgcattgcctacccccccaatggataatgatactgtacccagcactaccttgactcagagttaatactatatacacagacataattttttaaag

SEQ ID NO: 24254 - DNA, 2078 bp, Mus musculus
agtacaaatggtttacatctagcaacaagtccacttgcccgctctgccgtgagacctttttctgaggtttttttcattggaagttgtcgctgccgtaggtcaagccaaagggaatggattggctccaccttgaagtactgatgtgaagccagtgagcatgacaaagtgccatctgtcagtatgatcctcaaatcaggcaacctctgcagattgctttgtaaatcttcggaaacttttttcttttacaagagactattacatatttgagagaaaatatttatattaatggcttaatctctttgtatgtttaaaattaaaaataaatatatctcttctcaaaaatattctaaattatagaactgaaatttgtgaaagcataaactatattataacttataaaaccatccagttttttggtctgtgttgtaaaacagtccaaggataaggcaaatgaattgagagctgatttacatctgtagataactaagacttgtttgttagtgatgacaaacaatagtttaaaattactctgattttcataaattgttttaatgataaagtgacactgagatattcccaccctcatccagaggtttgaagtgtactgtgaaatttcacatgaagaaggaactgagtgaactctaaggggctctggtgagaattgtgaaattcataacttacatccttgacactaatcttttgcttgtgaaagaattatttccatgttaatgagatttgaattgtaaatgtgttggttgaatctattactcagtttagtgagtctacaaagagtgggaatctgaagtaagcagttttttgattattttgtgaagtaaaatgatagcagtctatctatcaagaaaagaataaatattactaaagtataatcatgtgtggagaaaacaatatttaaaaatcttgtaggaggctgtacattttgcagagtttgctatacttattagccatagttacaccaattcaggaattgggggagctaattatttaaaactatcagcaatgaaggatatagtactaagtaaaattaatttttttttttgcttttgttttgagacaggatttcactatgttgctctgggctgggctgtaactcactctgtagaccagactagcctggaactcaagagatctgcctgtctctgtttcccaagtgctggggttaaagtgcaccaccaagcctggtggaattgtcttaatggattgaagtgtgtaaacttcatgaaacctgcctttggttacagtacctttgcctttaaaaactattcacagtataacgtgtggaagtttggatcacagtcttccatttcatttctagtagttaggatacctaaaagtttagtccatcatctgtgtttcaaatgtttaattagaagggtgcaactcgtgtcaaataaaattactgcttaccatcaactagtcaaaatgactgttattgaaatagtctgaaagtggacaggattacagtccagagaactgtgtgtcggttacaagtgtagtatcggcttgtctgtcttctctttttttctctgtagtagttattatcttacagtcttgaggctcagagacggagtgaagtgtagatagcaagactctactacctcttagtccctcacatctccctcttccctttctgcctgcctctggcacagcagtcacaaggactgtgtgatgcctctgggaaaattactcttttccttttcaagtggatttacaataaaattttgtttataaccttccagcattggttcttgactttggatccaaagccccagtagaagagaagatggagcagagctccggctttttgcggtgtgtgaccttagtagcccctcaagcttgggactgggaacgcattctgggagacttgtgtgcatagctgtcagttcacaccggttgataatgctaaggaaggctttccagaagcaagactgaaactcagaatgccccattcaggttttatttatttagctttgacaacactcatggacaggataccatccctgaaaattttagcataagaggaacttcaaattgctagagagtcaaagccctgttacaaa

SEQ ID NO: 24255 - DNA, 1236 bp, Mus musculus
cttcccaattttatttattttgagataacttaatgttcaacctgtagagctcggaagcatgggtatgtaatgtattggtaaatgcaaatattattttcttccatactttataaatttttttttttttttttttttgtttttcgagacagggtttctctgtgtagccctggctgtcctggcactcactttgtagaccaggctggcctcgaactcagagatccacctgcctctgcctcccaagtgctaggattaaaggcgtgcgccaccacgcccggctatgatactttataaatttaaaaagttcatttcaaaataaattgttcattgataattgttaaattcccggtaattttgaaagttgtttgatgtaaacagacatgattttttcctgaactatggactaaaacagccactttcttttcctcctcttcttcctcctcttcctcctcctctaactgtctgatgtgctgaagatctccatcctgtgctgtttgtggtgttgggtagcaccttgcttacctgttttatttctgtcctttccttagacaaccagtgagaaccaggctctgtactctgttccacttgtgcagctgtttgcctgtgtcagctttgatctggcctgtgatctctgtgccttttttgactcaataactccagatattgttgacaatcttcctgtaaatctcatcagtgagtggaaagagtttttttctaaaggcatccacagtttgctattacctcttttggtaaatgctatcggtaagtgcaaaggggtatgatgatggtaattattgaaaatggctgttgacaaatttaaaataagcttgctttcttagaggcagtctccatgctgctgcctcatagcacaggcacagaatgacagaaaaaaagatggcttggtattgagaaaccaataccaagtaagtttagatactataattcagcagagtacagcactagagccctctagacaactactgcttttctcgtcttctttctttctttatttttttaatttattttatgtatgtggatacactctagctgtcttcagacacaccagaagagggcatcagatcccattagagatagttatgagccatcatgtgggtgctgggaattgaactcaggacctctggaagtcagtgagtgctcttaaccttggagccatctctccagtcgcaaactattgctttttaaaaaagtgtagtagagacctttatgacagttgagggt

SEQ ID NO: 24256 - DNA, 2173 bp, Mus musculus
cctggagctgtttacaacttggagaacgttctgctaagcttctggggaagactgtcagagatctgcaccgagaaaatccgccagccagaagcagatgtgaagtccgttctgtgtgtgtctagcctagtaggggtccttcagaggccaaggagctcactgaagttacacagaaagaaaactgctcaggtcaggtttgccatcaatatacctgaagctcataaaggggatgaaaagtccatgtcttcagaaggagagaacagcgagggctctgacggaggggctcagtctcctctcagtaatacatcttcagacttagtatctcctttaaggaaaaaacctctggaagacttagtctgtaagctggcagaggtgagcattagctttgtcaacgagcggaagtcagagcagcacctgcagtttctctccacgctgctcgactccttctcctccgtccaagtatttaacattctcctcagtgacaaacagaagaatgtcgtcaaagccaaacctctggaaataaccaaacttgcagaaaaaaatcctgcagttaagttcttatatcataaattgataggctggctaaatgacagccagaaagaggacgggggcttcctggtggacatcttgtatagtgccctccgatgctgtgacagtggtgtggaaaggaaagaagtcttggatgatctaaccaaggtacggctgtcatctgactgtcataaacatccttgttgtgtgtggtaaggataagcatgggagctgttcctgcgtcctcactggactctgaatgtcactttaaagacaacatgctcttccctgatttgggaagtactgataaagaggttgatagcaagagagctccttagctgcactgcctccatgagccagtttgttctggatatgtgtagacgaggctggcctcaaactcagaaatctgcctgcttctgcctcccaagtgctgggattaaaggcgtgcaccaccaccgcccggctcagtcatgtttttaaagctgtatttttgtccttaactctccaactttgtctgtttcaggaggacctgaagtggagttctcttcttcaggtcattgaaaaggtattttagccccctctcccctttccctttctttttcaatttatgtgtgtggatatagaaattaaaaccacagccctagtctcatgctggctgtggtcaggtgtctgatggagcgcatcctaacagctgtaaattctaatgagagacccactggagaggccgggtggggttttagctgaggatacagcattgtgctgtattctaaaggggactctaaggtttattctgctcttcatggtctgtagaagttaagcagatgattctagacttgactgcacacatctggaaacgcttttttcctatgtggagggctgtgcaggatgtgagaatgtctcagccctgttcagtttgccacatacaaagaataagaaaactgataataaaggaaccaatgaaatcaaaggatgcaattcagaaaaatctaaaaagactttggtattttttttctagtaatgatttaaatggcatagctaacttttcgactgtaggtgtttctgatgaactacttaaaacacctcctcttagagcatattttactgatctgtctagtttacatgaatttatgtttttctttttttaaagtggtagtgaaaaatctgaaacaaaattagctatcctaagagtttctttccttgttttcctctttgccgtgctggggattgaacccagagcctctgacatgcttagcaagcattctgcccctgagctaggcttcagtcccatggtcagggatggtgaggtatagtcacattattgtctaattttcccaaaactacatcatggttgttagtgtagctcaaaggtagagcacttgccaggtgtgtttgaggtcccaggtttgatttgtaacagtacaaaaaaaatgaaaaattaaacatacaaaaacccctttcaattatgttcatatcattctcattttgccagttggtttaccttttacagaatgtaagtgcagactatgtttcgactgtttactgagacttacagcttccaggcgcacggttacttttatttagtattctgtaagcaagctaattgaagagctagttagctgcttgataggccttgaatcagaacagggag

SEQ ID NO: 24257 - DNA, 1195 bp, Mus musculus
cgtccacgtttacagagttctggggatcgaactcaggtgtcagtgagtgcttcaaccactgagctgttagctgcccagagctgaagttttgagcatatagtttccatatctcttgatgtacatattggatgtttacattggtcagctctgtcacgatcatcggcttgtcacgtattggttaaataaatgattccagtgtttgactagcattccctttattcccatttgcaggaacctttagaagtaaacctcgagcctccaggtcctcttactttagccatgagccagtttctcagtgagatgcaagagaacaaaaagcgagttgtgacacctaaagagctcttttctcaggtctgtaaaaagtgagtatccacttgtttgtgctttcagtgcgtcagtgagatgctgagaaaggtttatgacaatagcaccagcaccaactgcaccagcatggttcatgctgattgaaaagcagcagtttgtgtggtaatgaaatctacctaggctcttcgtacagcagacacaggtttgagaaaactctgacactgttactttaagactttagtagactcatcctgcttttctgtgtgttttctttagagcaacacgttttaaagggtaccagcaacaagacagccaggagctgcttcgctacctactggatgggatgagagcggaagaacaccaagttagcatactctgagaatctcgtttgtaatctcatgggcgcacttgccgtttctggccagtcccagaggccgctgtgcttttaaacacttactttataccagggtttccagccaatgtgcttcttcatttgggacaagtgagcaggattagaatgattctcgtaaatggagattttctgttgactgcagcaatcccatctttaaggactctgatacactagactccgcgaggagagatgcagaacactggaaaacatttctccccagacagtccttgttgcagcatactcttcctgagtatggcttactacaagtgctgagtctgggaagtattttcactttagttagagtcaggagatgcatttttaaactaaacacttttgttaattaccaggatatatagtgcattttggaggtatgagtttaattaattatactagtaacagtaataataactcattcagttttccatttaaaccaggcagttctgtgtctcatatgaacta

SEQ ID NO: 24258 - DNA, 1269 bp, Mus musculus
gcgcatctgtaacctcactgctagggctagaggcaggcaaatcccagtacagtgcagtcataacatagcactcctgattgtactatctgttcaccctcacatctggagatcacagctggctcaaattaaattttaaaacttttggcagttttaaattagccgagaccatttagacatgggggatgggggcttgggagagtgtaagcttaatgtggtatgaatataggctacaaaagggaagtgcaggctcatttattataagtactgtcagtaagtatgaagtccctaattgtttctggaggtgggaggaccagggtatgttagtttctctgctttgctgaagtacagcttgagacagtaggagtgtcctttgattatattgagatgaagactgctgataaagtggttaagcctctctcacacacacacacacacagtttgtggttcttacctccataggtagaagtttaatgtacttaccatgggtttttgttatttagatcatcatggcaaaaccagctggtgggcccaaacctccaagtgggaagaaggactgggatgacgaccagaatgactgaggaacttgtcataggttaagagttgtgtttgtagagtagaacttgcccagtgttttatttttcttatttgtgtttgtactctgctgggtggtacaataaatgtgttactgttatggccgtctgtttaatcactcacatgactgttctcattgtatacttgaccatatctattgggaaagacactttctagtctgttgtttatctcatttccaaagttgttcccccaatcccatggccttgaaagtctggcttctaaatgtttgttgtttatcccatagcaaacaaaaaaagttcagacagtgtcctaattaatataaggcttttcaatagtggctgggccagagtttatgcgcacacactgacaccaagatttcacattgctcccaatcctaatctcagcactagaatagtgaaacatggtgttgccagtagtgggtacagtaaataacaacttaaactctaataaaacaagttttgggaatatcagtttattgatgtgtcaagcactaccacccagtcagagtaagcacagaacttagttattcaaatccttcctaaagttgaaactagaaggaataaaaaccagtatgctaatacaaaaccgctgtaaattattttgcctgtatttaaataaataaacatgattttttttctgtcatttacttaggtgaacataatttatagtttaact

SEQ ID NO: 24259 - DNA, 1161 bp, Mus musculus
agtgaagccaggagtatcactggaacctgctcaccagattgagcaggacacctgagagccactgtgcatgtgcgtgcctggacagtcacatgggcttacggtgtacatatatattgtacctattccaatatgtgtacttttaccatatacaagtaaatgattttaaaataaactttaaatctactagtaataacattgagtagtttccattttaggcattggccatatgcttcgtgtgaatttgtcctcaaaagattcctattgctaagtgttcttaaagccaaggtcctctgagtgacaagtgttagagtaagggctgctatttgtgttgtcatcagagccgtgtagtccatagctattggctctgcatgcatttctgcaagcacttgccatcttatgtgaaaatccccacatttgttggattaccagagtaagtcatgtcaaaagtatgtctactaaaacggttatttttatatcatggtttaggtaatatcggggtatgaaatagcttgcaaaaaagctcatgagatccttcctgagttggtatgttgttctgccaaaaaccttcgagatgttgatgaagtgtcctctctgcttcgaacctccatcatgagtaagcagtacggcagcgagacgtttttggccaagcttattgctcaggcttgtggtgagtaatagtaggttacaaaaaataatccaagctgcactgatctaatgtcactgagatgtcttctctgtggtctaaaaatacgttttatttctttgacagtttctatctttcctgattctggcaatttcaatgttgataacatcagagtatgtaagattctggtaagtttcaaaaaatctattaccatatccaactagatcttacaaggggatcttgttctgtagtcttggggctttgacccagagcctgagcatgctgggaaagccctctgccgtgaaggcacattcccattccaagatcagttactttgcctggtcccctgcttcaaagttgttctactcttttcttaagacttaattgatgtccagtcttttgcctgcgtttctgtctttgtgtcatgtgcatacagttgcatggaggccaggagaggccatcaggtctcctggaactggaggcacgatggttctgagttaccttttcagtgctggaat

SEQ ID NO: 24260 - DNA, 1133 bp, Mus musculus
ctcaggattctgcaggacctcacgggctctactccttgtcagccttacacacatatgagcagtcaggtgacgtggcctttgctggggtgcagagtaaaaccgtgaagacagaaaagcctctgtcgaggccagatgcccaggacgagaagccatcggaaaatcaggatttatatctgaagtctagcatgggccctaaagaagacagcagcagccttgcatctgaggatcggagtagtgtggagcgagaggtggcagagcacctggccaaaggcttctggagtgacatttgcagcacggactcgccttgccaaatgcagttgtcgcccactgtggccaaagacggcccagaacagggctactcgcaaaggcgatctgagtgtccctggttgggtatcaggatcagtgagagccccgagccaggccagcggactttcacaactctcagttccgtcaactgcccttttatcagtactctgagttccgaaggctgctcaagcaacttggaaattggaaactacgattatgtctcggagcctcagcaggagccttgcccgtatgcttgtgtgattagcctgggagatgactctgagacggacacggaaggtgacagcgagtcctgttctgccagggagcaggactgtgaggtaagtggacgtgtgcgctcactgttcacacagcccgttcatgggagatgcagggggttgggggagcgagggaggaagggagagaccatgtgataagctccggctgggtgagatggagtgtgtgcatgcatcacacattgctgtgtgtattaatcatgggggagaacacaacataggcttgagtaacttgtaatcacatgttccagtagggagaagggacagcaagcttttcatctgtggttaatggtaacttttaaaggagactgtcatttagtctgtagtgcctgtagcccccaggttatcaaacctgagcccagtctgatatgtgagccgtggctggctgtgaatagctgcatgattgtggtgtgcaggaaagctttctcagaattaattttcaaagctattgattttatttattgttttggttttctttagccattttaagtatttgtttaatagatatcttaataatttagcatgagttacttg

SEQ ID NO: 24261 - DNA, 1187 bp, Mus musculus
gtggattatgtagaaactgaagagcagagacctatttgttaaggatttgttttacttaggtgcatatgtgtgtccttgtgtgggtatgtgcacgtgtgtgctggtgcccacatagagcagaggtgttggatccctggagctgaggtcacagtcagttgtgagctgcttaacacggggtctagacacagaactcagctctcctgcagggctgtagcaccaggaacttctgaactgttcctccaacctaaggtctgtgtcttttgtaatgtgctaaagtgtctaaaaaaatgtaacaggtgacttcccgtgtcactgacgtagtcagtcttcattgatctttatccactaatgtcttcactgatgttcataatgtgtatttcacattctaggtgaagctgccattcaatgcccaacggataatttcgctctcacgaaatgatttccaatccttgttgaaaatgcacaaactgaccccagagcagctcgactgtatccatgacatccgcagaaggagtaagaacagaatcgccgcgcaacgctgtcgcaagaggaaacttgactgtatccagaaccttgagtcggaaatcgagaagctggtaagtgtgtggctgtctcgggttgctaaagcccagacctttctgtttgtagaataaagagttacttaagttccaaggtaagattcagagttcaaataccatttaagagaaactaggagatgttcaggaagattagaagatctaaaatagggtctccattaattcttttgatttgtatgcattctacatttttagcatatactaaaaatgtgtgggtggggaagtatttctggatttttttttgagttttcaatttaatggctgttctaattcttagtggttgaataaagattaaagtaattatataatactttatgatgtttgattcctgtaagagctattttccagttgagtagaactgcagacctgaattacctgttctggtaccaagaccaagcagatgaaccaggctctgtctgccaagggagaagtctgatgtgatgtgatatggttagagtagaaacctccgctgccgccgtgtcatcctcagtgcacggagtgattgcctattggacctgtctcttccagcttcaaagcataagctcattgcaagattattaatttgcccacatttgtgggagaggacaatga

SEQ ID NO: 24262 - DNA, 1197 bp, Mus musculus
gcttgcttttacatcggttttcagtgtgtctgacgtgcctccaactgcaccacctccctgtgggcgagggagcagcgcggccagccaggagctggtgcaggagtccccgccaaccaccgcagctgccccagagcaggccacgctgttggaaccctgtcggcagagtgctgggatctcagacttctgtcagcagatgtctgacaagtgcactactgacgagtaaaccccacgggcagccttcagcccatggcctccctctgaccttcggcattgtctcgaagcctagcgtggccgtgtcttcttgcttagcagtcctgtgtcctcctggtagctttctgttgagggaatttctctttcaggtgatcctgcgttctccttggttttcataggagatgttctatctcttgaatgatgggaaattggatgtgaaaatatagaatgaccaggtaataatctcctagagttcaaactaactagagcagcggaagccgcagcatccatttcaacagctcggagcatctgcacgcagtcctcgtgggccgtggataacctactgatcaggaagaagagcccttcctatgcggagcagtggtgatctccccagaagtggggtacttcttgtctatgtggaaaagaaatctcctttgaactctaatgtcctgcacctcagctccttcaaagtccagcattggctggtgaccctgaggctgccctggcaggacctaggcagaagccacagctggcctgagctggaggcctctgctatcctcagtattgactaggagttttgactgcacaaaccagaaagtgtatcatcgttccctgttctcagttctgttcctctctttagtctccaccttgtctagactgttaggaactttctgtcccgtggaggaggagctgccccggagagctgcacactgcacaaggctgtcgatcatctcattgcaggtcgttgatgaccatgagggcattggagtcaatgagagggaaatgtctacaatgacctgaagagcagctcattggaatcccagtgaagacttgtagtctgttaaaaaaaaaaaagccgtgttggagacaaacacggatctgaggctctgccggtgtttgaaacggtaaaattcgggctcggttcggctcggtccgttaatgggtttgcacttgagagccagatttaatcctcttatttttttccta

SEQ ID NO: 24263 - DNA, 1099 bp, Mus musculus
ataccagatcatcactctgaaaacatactgaatagatgatatttaagaatatatttatagctttctgctaggccgttctccagtataggaggcagccatggcgcccagctggaatggcttgatcctgaagccccacttccacaaggattggcagcagcgagtggacacttggttcaaccagtcggcccacaagatccgcaggcgcaaggcccagcaggcgaaagctcgttgcatcgcccctcgccctgcgtccgtccccatcaggcccattgtgaggtgccctacagtgagataccacacaaaggtccgggctggcaggggcttcagcctggaggagctcagggtggctggcatccacaagaaaatggctcacaccatcggcatctctgtggacccgaggaagcgaaacaagtccacggagtcactgcaggccaacgtgcagctcctgaaggggtacagctctaagttcatcctgttccccaggaaaccttctgctccgatgaagggagacagttctgctgaagaacttaagctggccacccagctgacaggacccgtgatgcccatgcggaatgtgtacaaaaaggaaaagagtcatcacagaagaagagaagaactttaagccttttgccagtctccaaatggcccgtgccaatgcccgactctttggcatcgagcaaaaagggcgaaggaagctgcagagcaagacgttgaaaagaaaaaataatgcactgttggagagttgcaataaattttccataaagcaaaaaaaaaaaaagatgcatttatatatacatgtacctgtattgatgtaacatcaattaatagaaattaggccatgaatctgtaaaacaacaaggaagagtttatgggatggctgagaggcaagaaaagtgagaaatgatgtaattatattataattttaaagattaaaaattctaacaaacgtgaagaaaaagtagtaatgcatttagtcaaaaatttgtaagcagtaagtaagcacacagaatactccactggaagacaacaaatccacaggagatgaggaaagcttgtctatgaaaaaaagcaaggtgtttaaatcatgtaagtaaacagc

SEQ ID NO: 24264 - DNA, 1099 bp, Mus musculus
aaagacctgaattttatagtagctttagcaattatattttataagaatcagttatgactttatatttccagatagagagttcagaacaccatgctctaaagcctcccccaccccggcttgctttcctgctttcctgacctctctcccccccccccctttcgggtttccagggctttgagcttgatcttttgaaagttttattctattacagtttttgctattaccttctggttttcttaagaagctttagagtggtttctatgccctttgtaccactgcactgttcgtaacatctcggggtcgattgcgtccggatgggaaactgaagcagaggtgtcggatagtcacattttctggtctccctgcaacacgtccatcggaaaaaaaaatactggaaagtctggtgcttagagagggtgccattgtctcttgtatatacggtcatgatgtgtctatgtcaaaagttcttatatatttcttttataagctgaaagaaggtctatttttatgtttttaggtctatgaatggaacgttgtaaatgcctgtccaacaataaaagtactgaaaagggcttcgacttccctgtgccttttttgataaagggctgaagagctaagtgtgggagagagcaagtccaggagagaaaagtcctgtgattgtgtgtgtgtgtgtctatgtgtgtacacgtgtgcttgcactctctctctctctctctcacgcacacacgtacgcacgcacgctcgcacgcacgcacgcatgcatgccatactgtgcctgtggaggttagagggataacttaacagaaatgattctttcttgtcataccacgtaaccccagatactgcagttagttaggtgtagcagcaatgcttgttacctggtgagccattttggtggctgtggggtgggtgtgtgtgtgtgtgtgtgtgtgtgtgtgtgtgtgtgtgtggtgtgggaacagatatggaggcacctgtctgtaacctcagcactcaggaagcagtcagaagctgagtacacgtttgaggctggccaggaatgtattgctagtgagacccagctgcagagtgaggccctgcctcacaatgtaggaaaatc

SEQ ID NO: 24265 - DNA, 1311 bp, Mus musculus
agcagcttcaggctgcctccatcagtcagcgggcccgaggccggagaaccctcgatagccacgcctcccgcatgacacagctcaagaagcaagcggccctctcgggcatcaacgggggcctggagagtgcgagcgaggaagtcatttgggtcaggcgcgaagactttgccccctccaggaaactgaacacggagatatgacttccttgtccctgtagagaatatgtgtgtagatatgatgccggccccaccctcactccgcccaccctcctgtgccgtccacgagaatgtccccttaggtcgcactcttgacacagattttggcagctgacttgggtctgaagccatgtagccacccaccttcatcattcttaatgacaccagagagaatcgttcagaatcccagacaaacaagcttgagtcctttcctctgtgccaagggctttcttttatttattctcaattcatcggggcctgaagatttagaacgaagaaccgatagcgctagaaatcaaaccgtccccaccccagcagtcaaaacagggacaggacggtgtgcacagattgtcccagctccacctctctaaatccagtctcgcagctgaggaacaaccaccttcaaacacacatagagaaacggaacagatggaaacacctgtacagcgtgcagtgttctgactcctcccctcttcagcgtccgagaatatctgtgtatcttaagaatgtgtgaggaaagggtggtcgtctctgtacgatgagcctttattcttattttttttttcttctgttcatgtctatagctggtcttactctgtgtcagtgtctggaagctctagttttgcagagaattataaagatgccaaactcttggaaaagagatccaaatttatcacttagagggagagagaagaaaaaaaagaaacactattttttgtattttccttgagatgcaggggcacaaatagatgagaattttacagtgttaggtgtaactcagtctgaaaatgaggatataaccttttgcagagcaagcggggcacgatgactttatatttatacacaaacggccaacaagaagctcatgctaagaataaacttttctgagaaacagattttttttttaaatgtatgaatctatatttgagatgggagtttggttggattacagggacaggaaatggggcagtgtgtgcgtgtgtctgttgttcatggtgggggaggggagcctcctcatggggttgccatggcaatcattggttttcccatcaaacttgcatcttcatccacagatgacctccccttccctgagagt

SEQ ID NO: 24266 - DNA, 1205 bp, Mus musculus
ctagagttggatccccatagcccaccaaccaactctccctgttcgtagactcgtttttctgtcctgggttctagtgacaagcagagcctgataccatttcaggatccacgtcattgacattttttatgttggaaatctgttaactgaccacggtgtacattttctccttactttgtcttcccattgccttgaaagcccaggtctgcactccagcgtattctaagccctagttccagtctgtggtcatttgtggtccatagttctgaccgaagtccccctgttcctcccttcattcttctttcccaagcacatgtttatgaacacaccaggaagggagccgggacagaacacaagggtaggtccctcagtgcgtgtgattctgggaggatctgtgttgtgaaggggaggcagctatgagaaccggaaagggatgcttggatagagtttccaagaagccgctattcagttcttacgggattccttgtggtatgcatcttaatattttggctcaggtaattctttggtgtgaagttctatatatccctacaagctttgtaagacagtagtggcctgcccaatcccaagcaaaatgccctcagagactgcctctgcccccttcccctgaaaactctgccccagtcgagcatcatgggcaaggtgtgttaaaaggcacacgtgtgcctcgttcagctgtgcatctcagcatcagtgtgggaggaggggtacagagcctaagtttcttagaagcatcttaaacacgcatctattgtgttattaatatgctcgactgccacatcccttttctgtcgtgtgtgctaaggaacgagaggagagcttatttttgatggtggcttcttcaaaatgagtaactattgcggcataggatagagattaagaaatttatcaacagaacaaggctacttgccatagtaattatgcagaaaatcaacttctatgcaaattgtaaggattatcattagcatttgggggtctcctttcagaagttttaagcatatgtttagggccaggaatggtgatagaagcctgtcatgccatcacttgggtgacagtcttaagtaatgtagtaactagaccagccaagactatgtagcaagaccttcttagacacacacacatacacacacacatatacacatacacactctttcaaaagtctgtcgctcttaagttgtgttattagagct

SEQ ID NO: 24267 - DNA, 1195 bp, Mus musculus
cagctttgacttcttggccaagtgcccagatacattatggattttctagtggagacgctgggtagtggggccacgaattacttgcccagcgaagaggatggctttctgtgttctcagagattgaagagattggctggtttagatttagtgtggaatcagagcaggcagaaatctgctggttttcacggaccttcagtgtcattttgaattaagatgctgctaggtaactgacccgtcgctgtcaggaggatctcaagaaaacctggttccatgcagtaggtacagctcaagtctgactggaggacggctaactctcagcaccgcggcatattgtattgccgttttattcattattgttgattttctacagtgattgagctcgccagcttttcatcttacgtcagcgaaggtcccagagtccccatgccgtcactcactgctttgaacactagggtcattgctatcctttgagagggggttatggaaaggtgggactagatggcaccccaaggcaccggtgtcagccctttgcttcttctgtctttacaaatcccaggtggcagcccggactggtgagatcggagtgagaaggcgtactcaggccatgtccaggtctgcaagcaagcgaaggagcaggttttcttctctctggggcctagacactacctccaaaaagaagcagggacgcccaaccatcaaccaggtaggccccagagtcaacacagaggatccactgatgttgcttctgtgtcagtggatgctctcgagtgtgcatgtgtgtgtgtgtgcatgtgtgtgtgtgcgtgtgtgtgtgtgcatgggtctttactgacactttaaatcaacttgagactttagttctgagagacagtttttaataagtagtttatagcccaaacactgagctctgccattagtctgtcatcgacatccttctcccacctgtcctctccccaaactctgcttaattacagacctagtaaagaaagtgcagaattcagagtcctcagaggagagcaggctccacaggaagccaagtgagcattaaatatagtcttcttaggtcgtctctgatgcgggatccaaggcaacctccagggaaagggaccgtttccttgcttctgagatttggaaggtggccttacatgggcagctccttggcctataggaatgaggacccaggaacgtgagagta

SEQ ID NO: 24268 - DNA, 1349 bp, Mus musculus
acccattttttcctccctaatggcttaggggttcctttgataaagttgagccacgggccactgggaagtaagctgcacaagggaaatggattccaagcagagaacactaacatcagaagaggcaggaacaatcctgtccactcagcctgtcctggcggagtgcagccacagagcatggtcttcgtgaagcattctgggagcagtgtggagcgtggaagggagactggcattgaacacccgtgtttctggttcttggtctggaagtgggagaagaaggaagcctttacacatactcgccctggacttggaaagatccacgtcagcagccttgatctccacgaactgacctctcggctagcccaccaagtctgctcagatgatcagtggtcatctccggagggaactcacgtgtcacaggcaagccatgggatttgtcactgttaacaagacgatcgataatacagtgagctctccctgcttttgctgagaattcctggtcttgcgctaagtactttgaaaagctgtcttagatgggatgaagattttttttctcccaggtgttcattttcttctgtctttggtctcactgttgggtgatcgaaagagctgtaggatgttctccatttcccggggtagaccccgcctccatggagcctctgatcacctgggacttcctcagggaacacttgcagaatctgtcccttggagcagttggctatttaagctccgaggcggctttctctgagtcctgcgggtggcgtgtgtccccagtgcattctggaaatcctttggtttgcttgatgcatttgtttggacgtgacctttttctggtttctctttcctgggcttttgcccgctgaggaaatgatcttcagatcctgtccatctgcactggtggcagcagaagagagattttctcttctctgtggtccagatccaaaggccagacacctgtccttcagggactcgtgttattctgatgggtgtcgtttcctgatgtgtagacttaaagatgtctagttctgtaagtcatcaaatgtgatgtgagacagggtggggcgggtccttggctgatctgaggtgcttttattgattgtttactggacacacaatggaatgatttcttacctccatacctccgtccccagccggccctcagtgttggccctgtttagtaagtttttcctgtctgtgcctgattcatcccgagagctttgcagatagatcctttgggaacctttgagtttgagaagaaaaaggacagcgtttcttttaagttaatgaaaaccctctgcaggagaaacgtgtgcatgtgctgtgtctaggctgtgctcacggacacttgccca

SEQ ID NO: 24269 - DNA, 1196 bp, Mus musculus
cctcttctggccctcacaggtacttcacaaccggtgtatatacacggtgttttgtatacacgcagacaaaacacccacacacctaaaaataagtttaacaaatccctgatgtatttacatggctaaatcatctccagcaacaatcacgtgcagccgcaaaacatgctgagcgcgcgcgtctttcaggggctgtgttctcctgcaggagtctgttctcccccagagactttattgagtttcttgactgtcatgctctttagggtaattactcagtgtgtctgggattctagaatatcttaatttcccttacccaaggctttctggcgcgatgagctggttcttgttaattcctgtagcttcagtggggctgcgagtgttcttggaaatattggggagttcccatggatccaaggcgttatcggggaagttgggtttcccctctttgggttcttagtcttgctaatagaagacttttaataatggattgaaaaggaaacttcagggcaattttatgagctgaacaggaaaaccacagggcagtaagctgtaaaggcgtccacgggagaaagatgtagaagacaaacaccactctgttggagcgtggatctggcgtgggggccggctgctgggctgccgtggggactctggaggaagactgatggggaaacacactttgtaggagataaaataaaaaggaaatcagaaaggcgggccagttacccagcttcgtggcagggcactgcatggattgtgctggggagggaacagtacgctctttggtggaagaggtatttcaccattttctttagcctgctgaaggcccaccttcccaaggggtgggcgcattgggtaattgactgggctagagaattggcttttttttagtgggtgccgccagtaagctatctctacagaggtgcaggggccatcaggagaatgctgtgggctctgcatggtgacacgtggctgtcctaagctcactttgttgtttgtttgtttgggttttgaggttttgtttgtttgtttgtttgttttgtttttttgagacaggatttctctatgtggccctggttggccttgaactcagatctccctgcttccacctcttgagtgctggcctcaatacttctcataacatgctttacttaacctatttattttgcctattttgtttttctgcctaggctacctagggc

SEQ ID NO: 24270 - DNA, 1169 bp, Mus musculus
ggtggagggcaagagaagaaatctgacattttcttcatgtgctcgaatcgatgtatacagctgcatactccttgtatgcaacacacacagacacacacacacacatacatacacacacacatacacaccacacacataacacacacacacacatatacacacacacatacacaccacacacatacacaccacacacacacacacatacacacatacacaccacacatacatacacacacacacacacacacaccacacatacatacacacacacacacacacacacacacacacacacacacacacacacagagtctgcttgcaatcacttatactcccaacacttgccaggtagaggcagcgggattgggagtttaaggctagcctgggttatgtaatgagaccttgtctcaaaaaaaccaaagcagagccaaacagacgtcagcagcagggacaaccaaacccaaccaacccaacccctggcattcaaccaggctggaatggcggcaaggagattctagctggtaaacctataaaaccagtgtcttctctagcattttcttcttctgttccccagcgccgaggcaagtctccatgtgtgcctgctgctgggccacacgcactgccctcctgtgcactgctgactggggcagaggctagaccacacacactgccctcctgtgcactgctgactggggcagaggctggaccacaaacattgtcctcctgtgtactgctgactgggacagaggctagaccacatgcactgccctcctgtgtactgttgactaggagcagaggctggaccacacgcactgccctcctgtgttctgctgattaggagcagaggctagaccacaaacattgccctcctgtgtactactgattaggggcagaggctagaccacaagcattgccctcctgtgtactgctgattaggagcagaggctagaccacaagcattgccctcctgtgtcctgctgactaggggcagaggttcttttgtatgtttctacctgcccgttccagctgcctctttaaatggattctcaaattagattttcttaaaactgttttcccttaccctggcaaccaggatgaagctcttttttttttttttttaaataatttaagaatatttcctttgtattattaaatcttttctgccc

SEQ ID NO: 24271 - DNA, 1237 bp, Mus musculus
catgcagggggcggggtggggggtggggactgtctaatctccagctctagtaacaaaaataaaagaagtaaaaaataagtaagaaacgggggtgtgtctagagatagaacatgggctttacacattttagacatcatgagaaaataaagctggaaatgacactgggcatccatcttggcgcatctcaactttcacactgcaaccgaggcgcgctgtgcaaagtcagtgacaatccgcatttccagacacagtgggttcagaccttccaggcgcgcacgcgggcctcgtgttctcggtttccgcggcgactcggccgacgtcacagttagaagacaatagcgactttccccgctcaggctcctcgggaactttctcagtccgcacgctccaggagccggagctaccctccgccccgcccccagcgtgccccgcggccagggagctccacgaagggcgggcggaggccgcgggtagcgattggttccgtgccaaggtgggcgtggtcagactcaggcctataaaagctccgtggcgccagggcctcgtttttttgcgcggtcctttcctgcggcgccttccgtccgtcggcttctcgtcttgctctctctggtccctccggaggaggccgccgcgcgtctcccggggaagcatggcgatgaaagcggtgtgcgtgctgaagggcgacggtccggtgcagggaaccatccacttcgagcagaaggcaaggcccggggcgcggggcgcaggccgcggtgacgcggcgcacctgtgcgggagcacgccacgcccccgccacggcctgagcccgctaagtgctgagtcaccgtggcctggggcaggggctgggcgccgggaagcgaggcccggggcgccgcggggccttccgggcgggcgggggcctccccgcgccccggagcggctgggcctgcccgggagagccggcttggcatccgttatccttctggggctgctgcttttccggtgtccgtgtcccacaggctcagagccccgtggccaccggctgcgattgttgtaagaatatttgaacccggtggtgccagaccggactaaggccgcaggacgcgtttgcggcactttaaagcaaagtcctgggctgttctgtactaggtcagggtcgtgtcgcaaggcggaaagaaagagatggccttggacagccgtcccttgctttgcactccagagagagacccggctgtgggttttttctaccacagcgagt

SEQ ID NO: 24272 - DNA, 2243 bp, Mus musculus
tgatttggttttgtagcatttattgaagatgaactaatacaagtgccaaaaggaaccaatacagaaaatatcatggataacagtactgtcagtcactggcaaagtaaatcattgtataataggacgctaatgcagataatgaaaactagttgagattccatttgtatgtgaaaccttaggaaagtcctaaataaagaagggctagcctgtttttagaatgggggcctgggagcaaacctttgctaactcaggagctggcatactttactaaagccccagattatgactcttctcagagcactacctttaaacttgaagaactgtctgtcaaggtatcctgtagctacctgttttgaactttgtgtttccagacctttgccggtctggaaaagccatcatagttgataatgtatgtgtactttttcatccactcatacgtatttgacttagtcagattttaacttagttattgaactctagtgatgtgaaatagacatcattgttcatccacctgatgctgttttaatgttaggcatgttggagacctgggcaatgtgactgctggaaaggacggtgtggccaatgtgtccattgaagatcgtgtgatctcactctcaggagagcattccatcattggccgtacaatggtggtaagtttttcatataaggatatatacataggatttcttctaacatagttatgtaccttcccatgactttatggtggttaaactagtttctaaagagtcacataaattgttaagagttcagggtaggaaaaaagttcttttattggctgtgatagtaaagaattaatttgcctaggtcagttaagaacactgttgtgctgaaatgcagtagaaagcagttacatttgatgagactggatctgagttgaggatacaatagtctttagtctaaaacagccggattttcttgccatgattgcccccccccttgcaacatttcgttgagtctaaaatctgcgatggatggcagtattcaagtctgtaggttatcgcttggttaccatatgggagccgtcttcccaagttaccctcgggagatgcatctgggtcatgcagaacaccaagtagtaaaggctcttgcccacctcgggcagctaacttttcagtaggcacttccttccttgcagttgaccctttatccttagaatgctcttcagccctattggtgaagcagaacagtcattcataagtgttgtaaaataaagctttagagtcttgttgctaagtagagatacttagaattgcctcttatgtgtaggcctatagttctttcaacatgagattttgatagagaaatttgtaagaatgactactgtgtagttggggaggagctaagatcagcatgtacctggtagttacttgggtcttagtatttcatctagaaatagccactagcaaggaaaaacttagtggtctgctcttaactgctagtatttaagtctgtagtattgctgggaagaagtactagttacttgatcattcaaacctaaatgttcttcttttcaaaggtccatgagaaacaagatgacttgggcaaaggtggaaatgaagaaagtacaaagactggaaatgctgggagccgcttggcctgtggagtgattgggattgcgcagtaaacattccctgtgtggtctgagtctcagactcatctgctaccctcaaaccattaaactgtaatctgaagagttgtaactgtgtgactcctttgactgggctaaggacagcaatgacagctgatggagactgtgtacaactcactgaattcaaatctgtttctgtgcctttccatattttgccagactacacaggtgataagctgaaattctcatttgagcctgttagtaaatatgtgtggcacttattttgagcctattaatgtgtacaaaaaaaaattttaagttagctctatacattgagcatcaataacagactcaatgatgctaactcatagtatttcattttgaaagtgttttatgtgataccatcaaaatggtgggtggtagcccaaacaaaatttgagcagaaaattttctgccccttatcagagaaattattgaaagctctcaagattcagagtacttaaccttatattttaaaattgtattaggattagatgtcatgatttaagaaaaagccctttagtaaacttgtatcaaactcatagaaggcaaacatggagcctcagctagctctactagccaagtgaagttggta

SEQ ID NO: 24273 - DNA, 1142 bp, Mus musculus
gtgcagtgctgctggatgaagtgtgtgttttaatcactaatttactttcagtttgtagtaccacactgtgggtgggacaactggacaaaaggactactcagcaggatgttgccagtctcttagaagagtttggtccaattgaatcgattaatgtgagtatttattgcccttagggtgcggtgctaactaagcaagaagtgctcagttgttttgagactgaggccttgagctctcagctgcaggctcccttaacattctgtgcagaagattcctcttggacaacggtgcttacgttgaactacctttctaggagagtaacaaaatgtgcacacacggtttaagagcaaacttgaattgccagcgtctgaccccacaggttcttacttagccgtttgctggtggtgctggggctgcaaggttgtgcttgctacagtgcttgagctctcctgtggactcaaagcactgctgagaaggaagggacgagtgttctgacctgaggttcggttctgtcagatgattcctcccaggggctgtgcctacatcgtcatggttcatagacaagatgcataccgtgccctgcagaaactgagccgaggaaactacaaggtgaaccagaaatccataaaggtacattttatcatttacaaaagggtttgatatgtaaatatactgttgtggggggttttcttttcaacgataattttactgcttgggaatggcttaagacataaaagctaccctgtaaaaatacggtaacaacaataacaaagcaaaacgttattagttgacataaaattttatgtaacaattttctcagggtatttatttatttattttatttatatgagtacactgtaactgtcttcagacataccagaagagggcatcagatcccattacagatggttgtgagccaccatgtgcttgctgggatttgaactcaggacttctggaagagcagtcagtctcttaacttctgagccatctctccagctcttccagatcccacctccctccctgactctccatgccccttcatcccaccccccaaccccccacctgggactggaaaacaagcaataaaagagagcagaaaagcacagaaaacaccacaccctcctcaaaatcagaaaccaaaacac

SEQ ID NO: 24274 - DNA, 1099 bp, Mus musculus
ggaacttggtttggtcaaaccagagagagagggaaagtgcccgtgtctgagagtagcgacatttgcatgaggagaggcgttgtgggtttgcagagtctgtataagagcattagaaatggttcttgacgtgtttaccttcctttgtatttgctagctgtgtattctgtttatattccttttcattggatcataccaccgagaaaaggttaatttgagtttaactgggtaatagttctggtggattttttcccttatgaaacagtaattctctttaaaatcagatatgatacattatttctataaatatttattgtatgttcattttcttacatataacagagtaaaatagttcgtgtgctaaatctttggcaaaaaaatggagtgttcaaaattgaaattattcagcctcttttggacatggcagcaggaaccagtaatgctgctccagtagcagaaaatgtcaccaacaatgaaggtacagtgcatatctgccagtgacagaaggtcctgcaagtgtactggcgtctgtctgcttttctgtatgtgtgtctgtgttgtcctgtcccagtgtgtttgcctttgttttatcttattttctcttattgttctttagctgcctgtttgttttcaaagggtgtggattcagatgagagggagggagggtctcagaggagctggggaggaaagccatgatcagaacatagtgcaactggtcagcatttaacaaaagttagcaaaagcaagcaagcaagcaaacagaaagaatagaatttctgtatgtgaaaggctttgtttctaagctggtagaaattcctgtggaagatgacttgatttgcttttggaaggtacagtttttctttctgtatttttacttcaaatgagaatgccctttgtcgcttcatctctctctctctttctctatctagaatatgtcttagtaaccactatctattcattttcctatgtaaaactagacaggattttgttttagcagcaaaacttgaaaggcatcttaaaggggaagtatgttgacttgtgaggcctgatgccctttgctttttcaggctcacctccacccccagtaaaaatctcttctgaa

SEQ ID NO: 24275 - DNA, 1193 bp, Mus musculus
ttagtaacttcaggaagttattcaagactcagaatgactgaattgtaggaaagtgggttggtaaagtggctctggaaagttttggaagtgaagtcaaggatttggggaaacaaagtcctgagagctactttgaagtaacaaagagtgtcactattgacagatgtgacactgacagccagatagagagatggctggagcacgtgagcagctgctgcacagtgcgcagtgcatgtggcgagctgcgagctgatgtgtgacatagtgggtggtggatgtgcttgggctttgtcgttacttttcctttccttccctttccctctttcttttctttctccctttctaattccagacagttttactctgtagccctggatgggcaggaactcactaagtagaccagattgggtcagattcacctctggaatactgggcatggaggcatacaccattgcacctcctgattccactttccttggtctaagcttgtctcctcccctttgcagtgtaagccagaatataaggttccaggcctgtatgtcatcgactccatcgtgagacagtctcggcaccagtttggaactgataaagatgtttttgggccaagattctctaaaaatataactgctacattccagtatttatatctttgtccatctgaagataaggtatggttaaaacgtaacaagctaacattttgcattttgtccagcttatttcctctttatatttctcacacaatgcttacgttcacgttgttgacacttgttatttatgttactgggtgatatcttcatgtactgatcttgaattgtaaggtcagttttttctacggtggtcatttcctattcttgcttatatgtgaaatggagaagtcacttggcctctgtacaaggacttttataatgttgaatcatagaaggagccagagttatagatcctgagcagagcagagcagagcttgctggcgagtgaggagtgccttacctctgtgcatgggaagcctcttctaaacggcgtggtaacaacagccaacagctaggcgctgtacactacacatttcatgttacatatcctgcagttaaaagaaactagcaaaggttgttcaggaagcattatctttccttaaagaacatattgctagtgggcatggagacacatatcctttgatctcagcacttagtgggcagattgct

SEQ ID NO: 24276 - DNA, 1177 bp, Mus musculus
atctaataataatttaaaaaaaatgaatggcattcttttttgttttttgttttcttcatcgtgtttagtttctggagaatttcatgtatttattaaactaaccctattcctggtcccccccccatccacacccccttcagatggcactttaggtggtcttccagcctcacatacatgcacacacatatgtacacacacctgcatgcacatgtgcacttgtataaacataaacatgcttacatacatacaaagggaaagattattatattctgtatctgcgagggaggaggaggagggtgtgtcttatgtgtcctatcctgggggctggccttgaacttgctaggtattgggggatgaccttgaactcctgacccatctgcctctacctcccaggtgctgggatcataggcacacaccttcacgcctggcttttctggtggtagggatctaacccaggacttcgttcaagctaggcaagcactctgccaaatgagctgtatcctcagccccttgcagggtggtacgctaagacgcaatagaataggaaaatgtagtctcagaaaaatgcaggaaaactggtcctctgtgtgtggactcttcagttcggtgtggactcacactgactagtactgaacctgtgaccttctaaaatacagatatgcatgatatacagttgtcgttcctgttatgatcatgaaggatacagctttctgtctctagtgtttgggtagatcgagggtgttctgtaaatgtttgtcttatgaaaggagacccagggtacaaattgcttggtagggactaaagtaatacaggtggtgaggatttggtagcctggccaatggtttctctcatcccttcttactctctaactcaacatggctggagttctataccaggtatttgggctgaaactatgagcaaataccacggtcatacattctgcccagactgccccttccttttagtgggcagcatcagacggacatgggtttgtagtgaggtacttgctaaaactctgtgacaaactaggatttgaagatacaagttccagttgacctaatacttaaacaaaagcatacagatctctggtgtcatgtcagcctagttagctggccagcatgggtttaggctagcctgggcactacattataatctctcagagtctgggggaaatgtg

SEQ ID NO: 24277 - DNA, 2330 bp, Mus musculus
ccaaagtgctgagattacaagtatatatccgtgtctggctcaaaatagcaattcaaaaacaaaaactagttggccagatgaaaagtagttttaccaaattcacgtgtttttgtttttctgagaggctgcagctcagatggccgaaaggctggcttgggtggcaacaggaggaccacagtggcctgcctgcctaagggatagtagcctagccatcctgtgtttataccgtggcaacagcagaaggcatagaacttagctccagatggctctggagagagagaaaggattcttaaagcagagttgagacagcaagaagcagggaattcgctgtgtcatgctgttctgccgtggttagaacttagctgttctgctgggagctaggagcaggcttgccgccccctgggaacacgctcacaagacggttcgtccccaaaggaaacagtgccccccaaacaggctttcagtccatgctgtaatctgcaccttcccctccaggattgaaccaaagatgcatttccggttttgtgactgtgccactctgtgtgtctcttgtggaacctggtgttgtctgatcctgtccggctggcgctggatggaggactgtctctgtgtgcatcgtgggccctggtacttagcagaggacaaagggcactgttgtcaggaggggaagacttggcacgggctggaccacagttagtttagaagttatggaacagctcagaatcttctggcctttgactatttcagatggggtcagagaccagagctgtagccaggaagccaggttcatcatcttggtccatcgattctaaagtgggcaaatttctgtgacgtcacaaagccggcctttgccagtgagggctgagacacagtacaactgcctctcatttactggtggcgggcggcttcctttggcctctcagagctctgactgaactagaagagaacacggatttggctgaccctggaagaaagctgctctagtcctggctgaatttggtaagacctggactacttaaactttagggagggactgactccctcccgaggacccattacaggaggaggccaggcttttctcccagagctgatggtgttcttcattcagcatggcttccgttcagctcccaggacttgacactgaaaatagaactctttaagcagagagaagaggagagccatccacagacgctctccgtatttgatgtgacgtgtttgagctttgacgggtgaagagtccttttaaaagataactgccagctgcaggcatctggctctgcaaagctggtaggatgtgtacctgtgtactgtgcccgccccctttctcctagccctttatgtctttttctgactgtttgcttttctcgtatgtatgtgtgcctgtgttggtgcgagcctgtggagaaagagtctcccatccttcaaatgcttcgagaacagcgtcagatgtacaactagtttgcctgcgttgctactggtaccttggactctgaactcaggttacccacctgagtcctcagtaggcagtggacccattgagaggcaaatgagaacaggagggagacaagctgtgttctggggcgcacataaacacctgacagacgagtctaggaaaccgcgtgaaagaagaaatgttaaattctttattgttttattatatttatacggaaaatgtggctatccttttgttaagtgcagagtgtattgtctgtttgacccatgactgtctgtccttcatgaatgagtctttgcctgtgattctagtcagcctgtggctactgatgggaacggccgatctgtcatcatgtgaagtccaggaggaagagtctattttagtcatacgatttggtcatgagtaaggactatatttatgtcaccactattgaatatatgtacttttataatggctgtgaaatacactttttcctcacaatggctgctgctttgtttattgatggttcttaaaacattgagtctaagtaaggcgcagggtacttaaacctcttggcacagacacaaatgaggacttgggagcattttcaaccacaggagcccctggttaatctcatccccggggtgggggtggggggtgtttacaaagggttatgtggctatgcgctgagtggaagctcaacatggctccccaatgtactgttcacattcaaaggtcaggatttcccaagttgaaccagagacagatggatatccatgaatcttgcttctggagtcagtcattattttaggtcctggatcaggggaaggggtggatatctgttggggcagaagtagattcgccgtttggattttctgggtgtgacaccagtcacctg

SEQ ID NO: 24278 - DNA, 1167 bp, Mus musculus
ttaaaggcatgtactaaggacttgtatgtattccatacggatcacacagacctaagtctttggatgtgatcccttgccagagtagccatgtttctggatttaaaaaaaaatccctctacacccttcaaacacagtacatatggcttcaagtgtcaagctttggactatgagtatcctcctagctcatacacaagtacacaagtgtaacctgacaatattggagaactagcccctaaggagttgttcccaactaacaggagagcagttgatgaataatagctgtgccccctctgctatcactgctatctatctatctatctatctatctatctatctatctatctaactatcgtacaatcctcttcagatgattagccagtgttttctggaatctcctgggaaaatcagttttatggcttaagttacatagttctcttgctggataaatcatggtaaccaataaagggctccggtgagatatctagacccttccatgatgtgctttcctacatgtacattctgattaagactgttcctgcaatggtcattaccaaggcttttagaatgcagtttctcacttgctgtggacatgaacataaagaaaaattcccatgaggtttttcatatgctacttgactagcatttaacctgttgggaacatgtgtaaaaaaaaaagaaaaagaaaaagaaaaaaaatgtttttgcagttgcagagacccagagccaaatgttaggtggagcccagagaatcttgtggaagagtgggaggaaggattgaaggagccagaagagtcaaagacaccacaagaaaatctagagaatcaactaacctgggcccatagggactcacagagactgaaccaccaaccagagagcattcgtgggatggacctaggccccctacacatatgtaacaaatgtgaaaattggtcttcatatggtacctgtaacatcaggagcaggggctgtctctgactctattgccttcctttggattcctttcccctaactgggatgccttgtttacgctcaatagaagaagatgtgcctagtccttctgtaacttgataagccaaagcaggttgttactgatgggaggctgccccttctctgaggagaaagggagggagtacaggaaggagagatgagagggagggactgggagaa

SEQ ID NO: 24279 - DNA, 1162 bp, Mus musculus
catggtagaaaggatagcacaaagtggagattcatttttatccatgtgctcacctgtgcttacacaggttttggcagagcgtatctggcagttgtgcaaagccctggtgcattgtgggtgggtggtttgctttccatctgagcaagtgcgcatcctaatggctttgtctgactccccagctcctgcagcgttcctggtgtctctgtatgttaaggacatgtggctgggggcccagcagccagataccttccttgctcacatccgaatggtctgtgaggctgcaaaggacgtgccacttgatgagcccgaggccattgttgtgctctgcaggaacgtggactcctcagcccagtgcttgactcgctcccgctgaacagagccccagcgggttccaggaagcttaagtgggttccgagacagacataaactgatacatgcaactattttccagcaagaaagctaagaggactttattcagctgaccaacaagtaagcccttatagtcagatctagtgactgaggcactgccaggccgtgaggaccatggaggtctcagatgtctgccgtcccctcccctgaaggccctgacagaggagctaggtgctggttggtcatggattggtattaaaactgaaatgtgaaagctcttgtgtcttcggttgtacatgacacatgtgtaaagttgcctctctttgctgttttatttaagaatgttgagtccctaaggtagaaacctctactttgggaagacatcctatttttttaaagttatatttcaaagaggatttttgagttttataatgttttgataataaatagctatttttgtgatttgcttttgtactttgtttcattttacaacctatttttattccagagacctgcattctagttcagaatttaacttttatggttcactgttactaggtgttgtccctgataaaagtcagtgtgcaatttcatggatgtttgcagataaaacacttgtatacgcggtcccttgggtttgatgtgccacttgggagctggtgatatagtttgtctgtgcagagtgtatgtagtactgagaatggcttggtgttgtttacattgttctgtgcatctgtgtgtcatcttgttacacaggcatgggtatataaagacgagggtcatttacctaaag

SEQ ID NO: 24280 - DNA, 1109 bp, Mus musculus
ttaaataagaaaaatttaaaaacaaatttcatgttgtcacaaattaaattaaaattttgttgggaaaccataccacttactttagggttgtctggcacattgctgttcaacaacttaggtcctttggaaattacagtttggtgtttaaccttgtaatgtagcaagagctattaaaagatcagagagctctttcctgcgctgagcatctcgggctttgcctgtaaggtggtactgcacagggcctgcctgagctggagagggattggcatccgagggtagagagcactgtgtctcttccagcacagttgagattccaggtctccccagagtgcctcacttttcctcttccatgtcctgagccctcacttgtctgttaaaagtgtgtgtgaccctgactgccttgggctgctcaggacagggttagtttctgctcagtctataacgttgacttccaaacaggcccaccttggcttctgcccagctgatgaacttcttttggacacttgaatctgtgctgagttatcgggccaccatcataaaattattcaaggacatgggccgattcactgtgaacaaggtggcactttctaccaaagatgtcctgatcctcttacacaagtggagcctcattgaaagagacacgaagctccaaggagagctgaaagcagtcattgagcagcaccaagccaaggacctaatgagtaagtccacctccttgccgccccagctgcctggctccacctggagcagccagcatgcctctccttggctagttccagagctgacagggcacagacatggatatgaggacctaggtttgattccagccccattgcctaggggtcttgtttgcctttagataagactatacccaagtgtgttagctttctgttactgtgacagagtacctaaaaagataaatttacgggatcaaggattttatcctttgtgtgtttcggtccatggttgcttagccccagtgatccgggcctgtgttgttgttgtagactgtgctggtggaagcctctgggagttgcacacttcacagcagccagcaagtgggaagagggaggagaaaagggagtccaagcccagatgcagcctttaag

SEQ ID NO: 24281 - DNA, 1232 bp, Mus musculus
caaccgtgtccaactcagttggcatgtgcttggtgctcctgagagcagtgtagactgctctgaatgccaggacacagttcctgcgcactcaaagtaacactgtttagagatgaagccatcaccccagactactacacatcagtgcatgttgctatgtcataaactgctaagctgaagacagaagattgttagatgcaaagtattggtacagatagtttaaaaatgcactccacactccatgcaggcaggaatatatatgctgtgtattgtggtgattgtggtggaataattgggaagattcttagactttaaaatcttaggtttctttaaaatggtggggtggtagatcctgagcctaagctctgtgagtcgtagaatgatggtgattgtggagatgtgtttattaccaagggtgcctgtgaccatgggaaggtggctggatggaggcccaaagcccaaccttactcagaaaagatcgttgcagcttccagggctcgctgcagggcacccaattgtgctgtcctgagactgtgtcgccatgatgtttatatctgtggtgtttcctgcagaaaccctgctggacctgatgtccacagtggtgaggctgtgcccttctgtctgtcagagcagccactttgctgtgctacttgggacctacagtgccaccctcagtgtgctgggtaaggaggacctgatggccaggctgtgtggcggggctagtgcggtggaccctcttgtgtagttgaggggctcagcttcctgaaagtggcctttatttgccctctagaccagaagattttacttctcctccgtgcatatgaacagaacaacctcagcctcatcagtttcaggtgagtgttgggttgacaggtgggcatgaggacagggcactgggcaccccaggccacccgtgcagccctcaccacggagcagattcgagcttcaaactcgaggcttcattccttttgttgttgttgtttgaaaattttattagcatttatatttccttatgttatatgcacgtatgcatctatgtggcatgtccatgtcacagtgcatacttgggggtcaagaacaaagcctccatgtaaatgtcagcaggagccagactcacagcatagcactcgccatgtctcatggggctctggagagctgtaggggattctagggcggcacatggttataggcctatgtacgcagggtgggctctccaggtggtcaggatcctgaaa

SEQ ID NO: 24282 - DNA, 1145 bp, Mus musculus
cttttctgtagggtggaatttatgcctgtgacatagcagagcttttcagggagcagaggaacaaataagattaaaaaaaaaaaaagacattttttattggtactttgatttttttcttacccctcccccaatctttgagagcattctattttgaatcttcaaaatcttataaaacctgagcctaggagatggctcagtgcacaaaggcactgcctcagttctgcacttgggacccatgtgaaggaggaaggagagagccgactccacggagttgtcctctgacctccacatgcatgcactggcagtaatggatccatttgttcctaaaagacttaagaactaaggctttagaaagtacactgtaaaatctcccacatttacagatatctgtaagccttgccaagtagagaaatgtcagagcaccagaaacatctgtgatccatgtgagtgggcagcgagcagcttcatgaacaaatgtaatctacagccttgagctagaacactccacactgtataagggagagagacaggggaaggagaagggactcacactgtgtatacaagagacagggaaggagaatagactcactggggtcttcctaattcagacttgaagctaaaagctttcctcagaatattgtcaacattagagagaatattgataagaaaatcctctgtacctgtgatagaaagccataagtgtcaagacagttagggtactctgtctgtcacaccaatggtaccaaggtgacaaacaaaagcacatgctaacaagagagtgggtgtgtggtgcacagctcacagcagccttaactagggagccctctacagcagccattgggcagcgctttggtaagaacactatccctgtgtatttggaatgacaacattcctggaacttaagagcttcaagccagagaagctgcggcagttgtcttggtcatgtctgaggcattgtgagatgtagtctgtgtgcacttgatttcagaagaagaacatagtttggcacacttctatttgggtctttttttaacccttaaaatccataatcttttagaatgtgagcatgagaaaggttttctccatatcattgggaaaattcagtttgcagaattgcttctgtaaatcagatggataacattgtt

SEQ ID NO: 24283 - DNA, 1197 bp, Mus musculus
tgtaaaacctgctgtagcgtccacgtcttcttctccatacgtaaaatccatgcttggaaggctgtactgcagattctctaagttagtgtaaaatcaagaacaaattttatctcaatataatattacaaattttgttatctctttcagggaaaatataaaacagatagtaaaacttcttgcaagcgttcgggctttggatcacgctatatctgttgcaagtgaccacaatgtgaaggaagtcaagtctctgattgaaggaaaatagatctgcgaccaaaaagtgtttgctttgctgccatttccagtgtgtacattttgtatatatgtaaagtttcttaaactgtaatatactgattcttgttttaatacaaaaacattatattaataccgtgtccttaaatgtgatttcttgagaatgaaaggaactcagattatttctaggagtctatggatgtttctttactgcctgtcatattttgtttatggaagtattttatatggtcattaaattaacttcgtttacgtatgctctataaatgatgagtgtttagtgtaagttgtataattttgcgtgtctgtgtgtgtgtgtgtgtgtgtgtgtgtgtgtgtgtgcatgtatatttataccaccatggattttcatgctggaaattttgcagtgtttttctacagaggaggctttttaacagcaggaacttacccaatagcaatcatcttagggaaatactgcactgcagcagctgaagggctggcaggtgatgaccttcaccccccacagtgactgctgtcactgtagttgtgctgccttaaaatgaaaactgaaataagactttgtcgttgagtgagtgtgggacttctgggagtctgccctggaggcagctgtgggtttaatacgagcctgaggcgacatatgcagtagtgtggggtaggatgagccacaaactaactgcatggcctgggctgactgacctttctcactattgtcttccctgcccagctatagatatgcatttctttagtctatcctgttttgaatcccacatatgtgagttatatatgcaataaagaacatgccttgctgatcagacacacccaggcaatttactatccatggtattctgtaatgtttctaccacactgtaaatactcagagaaacttgttttaaggttgatgctttctgattctgtgattttcag

SEQ ID NO: 24284 - DNA, 1129 bp, Mus musculus
aaggacagtgtcatctttatctgtttaattgtaagctcttatttgcatttattttgcatagttttaataggcataaaggaaaccgtgttttgattttttttttttttttttttttttttttttggtttctcatttcttgtcagctatttaaggaaaaaataaaagaactgtgagctgtagagtggtttggagatgtgcagagcagagtttagggcttgttttcctgctgctcatttcagtagcaaaaatctacgtgaaaaatctgcatgagctttaagtggcaccattcgctgtgtgagttcatgccacctgccagttccttggtttttgttttgcttttcaataattagtattttccagaatgtcttaagtagaaatgctctactttaagcaagtttgtagagttgctgacatctggagtccctaaaagagttgtcattgtatcagtgatgtaagggaaacaaacgcctcttagttctcatatacgtgcagggagattccatacttgctcttctttttaaaaaaagttttgttgctgtttttaaaattatgtggatttgagtgtgtctgtgtgtgcagcaagtgcagtgagtgcaggtacccttggagggcagagacatagagcccttggcctctcagggagggtactgggacctaaacgttggtcttctgtaacagcagtatacacttttaactgctgggccattcctcctgctcctgatcttatgtcttttacgtgaatgagcacttaatgatcaccagaaaggccaaggagtctgaggaaacaataggggactccagagctaatttatagccttggggggggggacagtttatgaggccctccccttcctcccccctttagatgtggtgctgcagactgaatgcagggcttcctacatgcaggcagccctgccagctgacctgtgtcctcagccttggtaaggcccagggtggggtgctgtgaaggaaataacaagaaccacttctttgaagctaaaactatgatgctggaatacaaatgtaagcaggagagacttggaaactaacggtagagcatgagcaccgagtcctcaggagagctgagaggtagccagggcgctcgatgtgaagagtttcctactccgca

SEQ ID NO: 24285 - DNA, 2032 bp, Mus musculus
agaggaggagagtgtgggcaccgagagcggccaagctgtgctctccaaagctccctgcggggggccatgcagcgtgcctagccctcctgggaccttggaagacgggacctgcttcctgggaaatgaaaaatatcttcagagcccagccctgaggacagagccagctcttctctgctgacaggtgctcggcccaggctgggggccgtgtggaggagacagacttatctgaagtggctgccagcttctgctgccagctggaagccctgggtgctgtttgtgccacagatgaggctcactgatgtcaggcatctggtggttctgtctcggtgtttgtcctctaggtgacatttagaacattccgatttttaatcctgccgtagcccctcagtgtgtcacaggtaccattgtctacagccgcgcttcctaacccatacctcaccacagccgtggcttctgaccagaagtcactgaaaccatggagaaaggggacactaactggaggagctggcgttgtttaagatctcagtgtggcctgggtgtgcccgttgtactctagtacttgcagaactagaaaatgccagggacaaaaagcaggcatgaaccattcagtaagagagaagctagtgaacctgatggtgaaagaagaccgtgtccagtcagtgtttgtgtgaaggccctgtgctgctctctgtagccttcccgtggtacttataaaaccaggccgaaccctgtcctctgtccggcactattcaggtcccttcccagctccaggtacttaaaaaacaaagtgttgggtcctggggtgagggaacagcttcgacggcacagtgctgcctgcaggcgcctataagtgaccttagatgaatgctccatgagcatcttcggtaggcaggacatccagcagtgctggtggctccagggcagactcagttgcaggccaaaaaggaagagagaggagtcatagccctgccccaatcgagcttgttgctcgctgcactgcgcctttgtaatcaatcttggtttttttgttttgttttgttttttttaacttttaggtgataacatattctcagatatagcacacaagagacactacacaaattacgtctgaaagttttgatagaaaagagcttttgactggggtagacagcttgctcctcactactaccttgtatctcagtctcctcaacagagagagaatgcagattgattttcatcctgagttttattttcttgcccggtttctgggttcgggtgtgctttcaaggctctgaacagcttgtctgcccacaggggagcccggagacccagccttttggctaaatgttgcaggttcctgtacttgaaggactccagctcctctgtagagggcatggtcatcgcggtctgcaatcacgctgatacccagaaaaatggccacacaactcaaatctggtgccacgctttaataattctacccagcacggcccagccctgttcacggcggaaaagctccttctgccaggacagcctgtgaagaaacaagacctccgaggacgtggccaaggaaggcccagatgctagcgggaagttgttagttggcactctttcatctctcaacaactgtgacacaggtcttcagggtgaagcccaaagcagctatcggttgcagcagcgggtaaggagggggcttcacctgagcctggccttctgggcgagcagttctacctgcacacttcaagacagcctccatgacccttttcacggcacaccgcctgcttttggtgtgaccggggtttcctgtgcaggcacatgttcttaaggaatgccatgcacacaggcctgaagagctggctcagcgggtagagcacaggttgctcttgtctgggatctgagctctgtccccagcacccacagagtgcttctggttgcctcagactccaggggtgcacaaggccatgtaagcaaagacatgtaagcaaagacagttgtacacagagaagtcaaacctttttgaaaaaaagaaacaccacgggctggagagatggctcag

SEQ ID NO: 24286 - DNA, 1141 bp, Mus musculus
ataaaatacagagcccagagcctgtgatgcttcagatggcctcggacttctctggagacctggggaacgtgttaacaaagccttccctaaccccatggaagccgtgtgtccctgtgtgcattggtcctttggtgtttgcctccctctgtattgcagaagctctttgagcagggtctcagttcctccctgtggccccccagcccctgtgacagtgcagcgctggcacagacagtgcccacagctaccgaatgaatgagatctgaaattgaagcagatgactgttctggctgtttgtgtaatgaaataaccacgtttgtgtgtttctatgcatcacctttgtgtctgcatccttttatatttttgtctggagccccactgttgtatatcgacaaacctaacacacaccggaaccaggactctggatctcaggtgctgctcctttaaactggaatccgtgaggcagaggtgccgtctacaacccgttcctgacagcaggacttgcattctggcattctggatccacactgctgtcccttccaagtgttactgtctctcattcctctgtctctgagatcccttctgctctacctcaagagactaagagggtgaacacagtttgtacttttcatcttccttacagagaaggaaataataaattcatatttgttcccaagaaatgctttgttgattgataatagtgacaaattccagttgcaaccaaagtttgattttgggttttttttaaagatgctcctgcctcagctctaggtgctcagatcactggctgtggcctgactcttccaaggtgaagaaacatcactgcccaaggtcaggcaccagcaatagactaaggagaaggtgccgcctaaatcagcgttctcaacaggtgggttgtgacccccttgggagtcaaatgaccctttcacagggatcaaatattagatatcctgcatgtcaggtgtttacattatgattcataacaagcaaaattacagttaagtagcaatgaaaataatcttaggttggtgtcagtacaccatgaactatattaaaggctcacaggatctgagaaccaccgctggatgtccagcttgctgagccagcgaattcattcaggtttctcacaagagctcagacaagg

SEQ ID NO: 24287 - DNA, 1226 bp, Mus musculus
aggattaggaggccacagcggcttctgtggaggatttggcagcggtcttaggggccacagtcgtggttgaggctgtggccatggtcgaggccgcggggctcgtggaggtaaagctgaagataaggagtggatccccatcaccaagctgggccgcctggttaggacatgaagatcaaggccttggaggagatctacctgttctccttgcccattaaggagtctgagatcattgactttttcctgggtgcagtcctataggatgaggttccgaaaatcatgccagtgcagaagcagactcaggctggccagtggaccaggttcaaggcattcgttgctattggggactacaatggtcaggttggtcttggcgttaagtgctccaaggaggttgccactgccatctgaggggccatcatcttggccaagctttccatcgtccctgtgtggagaggctactgggggaacaagattggcaagccccacactgttccgtgcaaggtgacaggccgctgtggctctgtgctggtgcgtctcatccctgcccccagaggcactggcattgtctctgctcctgtgcccaagaagctcctgatgatggccggtatagatgactgctacacttcagccaggggctgcactgccaccctgggaactttgccaaggccaactttgatgccttctccaagacttacagctacctgactgctgacctctggaaagagactgtgttcaccaagtctccttctcaggaattcactcgtcatcttgtgaaaacccacaccagagtctctgttaagaggacccaggttccagctgtgcctaaaacataagagtttttatacgagaaaaataaacgaattaactctgttaaaacaaacaaacaaacaaaaacaaacaaacaggaatcttttccctcgaaatatatatttttatttggttactgttcctctctgtgtttggaaaggatttacatgaagctcaaataaatcttgtttacggtccttctcgcacttgtgggaggagagtccctctccagcgtgcatccgtgtgcacttgcgtgtgtgcttacacttgtgtgtatctgtggtaagtgcacatgagtatgttttgaacaagacgtgagctttgacctgtgaaaaggcccacagagcagagttgctgagaaaggacagttttggtttgtttgttttttcagtctcagcctcggtgtcattgcatgtagcttg

SEQ ID NO: 24288 - DNA, 1175 bp, Mus musculus
agagtctcctctgcaagggaagacaatgacttcacagtgccatcccacacttgatctctatatgaggcttgtgctttctaaggcagtgtgcaatcgcagctccagtgctctgggctatggggagaccagcagagcagtgtattgccacagtaagaacacattttgcatctttttttttttttttcagaattctaaacagtcctgattatatttataatttttttaaaatttattttatgtacatgagtgctctatcagcatgtacacctgcataccagaagagggcatcagatctcattacagatggttgtgagccaccatgtggttgctgggatttgaactcagaacctctggaagagcagtcagtgttcttaactgctgagtcatctctccggccccctaattatatatatatatattttttttttaatttgtttctggcatttcatttctactcacactgaagttgaaatgagagctacactgtagctgtggtaaaatgttctgtttaaaagtagaaggtggcccctactacttctcgtctgtcacatcagcactggggaggtggaggctggagaatgggaggtttgctacagagaaacagaacagtagactggtgatctgccatgagagtcaggtggagagctgctccgtgagaaagaactgatagtaaccacggctgcagaaactgttctgcccagttgaacaagacttaaaaatgctatatttctatttccatcatatttttttccatgcatgctttatcacaatttaggggggggggaaatgaagccaggtgtggtaatgcacacctgttaactccagcactgggaaagtgagggaggaagcctgaaaacccaaggtcaccctcaactgcagagcaagtctgaggcgcacctggctcaaaaaattggtttatctttaaaaatagtatattacctctgcaagacgcacatgatcaaataagagctgctctcagtataggcaatgtagtcaggtcagctgggaagggtaggaggcacacttgcgaggcacgcttcattgcctcttcctgctctggagttgggtgggtgcagacaggcttaaaacatagtgagcactgtagtggaggtgaaaaccaagtgtgtgtgtgtgtgagagagagagatctcttccaccttatcctttgagagagg

SEQ ID NO: 24289 - DNA, 1136 bp, Mus musculus
gcgctctatgatgtcagcttatgagcgctccatgatgtctcctatggctgatcgatccatgatgtccatgggtgccgaccggtctatgatgtcatcgtactctgcagctgaccggtctatgatgtcatcgtactctgcagctgatcgatcaatgatgtcatcttacactgatcgatcaatgatgtctatggcagctgattcttacactgattcttatactgattcctatacggaggcatatatggtgccacctttgcctcctgaagagcccccaacaatgccaccattgccacccgaggaaccaccaatgacacccccattacctcctgaggaaccaccagagggtccagcattatcaacagagcagtcagcattaacagctgacaatacttggtctacagaggtgacattatctactggagaatctctatcacagcctgagcctcctgtgagtcaaagtgagatttcagagcctatggcagtacctgctaattattcaatgtcagaatcagaaacttcaatgttagcatcagaggctgttatgactgttccagaacctgcacgagagcccgagtcttcagttacatcagcaccagttgagtctgctgtagtagcagaacatgaaatggttccagagagaccgatgacttacatggtttctgagactaccatgtcagtcgagccagctgtgttaacatcagaggcttctgttatatcagagacatcagaaacatatgattccatgagaccttcaggacatgctatctcagaggtaactatgtcactcttggagccagcagtaactatttcacagccagcagagaacagtctagagctcccatccatgactgtcccagcaccttctactatgactaccacagaatctccagttgttgctgtcacagaaattcctcctgtggctgtcccagaacctcccattatggctgttccagaactccccaccatggctgtagtaaaaacccccgctgtggctgtcccagaacctcttgtggctgctccagagcctcctaccatggctactccagaactttgctccttatctgtctcagaacctcctgtggctgtctcggagcttccagctttggctgacccagagcatgctatcactgcagtgt

SEQ ID NO: 24290 - DNA, 1121 bp, Mus musculus
aatcttggtccagaggttggcatgcaggagactctgttgcatccaggtgaagagccacgtgatggaggacacttgaaaagtgacttgtatgaaaatgagtatgatagaaatgcagaccttactgtaaacagtcatttaattgttaaagatgcagagcataacacagtgtgtgctactaccgttggtcctgttggtgaagcaagtgaagagaaaattttgcctattagtgagactaaggaaatcacagaattggctacctgtgctgccgtcagcgaagctgacataggcagaagtctgtcttctcagcttgctctggagctggatacagtaggaactagtaaggggtttgaatttgtcactgcatctgcactcatttcagagagtaaatatgatgttgaagtatctgtaactactcaagatactgaacatgacatggtaatttccaccagccccagtggtggcagcgaagcagacatagagggacctttgcctgctaaagacattcatcttgatttgccatcaactaattttgtttgtaaggatgtagaagactcgttacctatcaaagagagtgcccaggcagtggcagtggctcttagccctaaagagagcagtgaagatacagaagtacctcttcccaataaagaaatagttcctgagtcaggatattctgccagcattgatgaaattaatgaagctgacttagtgagaccattacttcctaaggacatggagcgtcttacaagccttagagctggcattgaaggacctttacttgctagtgaggttgaacgtgacaagtcagctgccagtccagttgtaattagcataccagaaagagcttcagagtcatcttcagaggaaaaggatgattatgaaatttttgtcaaagttaaggacacacatgaaaaaagcaagaaaaacaaaaaccgtgacaaaggtgagaaggagaagaaaagggactcttcattacggtctcggagtaagcgttccaagtcttctgaacataagtcacgcaagcgcaccagtgagtcgcgttctagagcaaggaagaggtcgtccaagtccaaatctcaccgttctcagacacggtcacggtcacgctcaagacgcaggaggag

SEQ ID NO: 24291 - DNA, 1186 bp, Mus musculus
aatggctggcaccgagtgcccaaaacccgaaatacagatgtggcagcggcagaagctctgtttagcaggccattatccgggatggctaagctccgctagctaaaaagttacttcccattacttttgctttccagttttagaagccaaactgactgaggagtggaacggttcgtgtgaatggaggaggtgttgagtgagcaacacgcagaagctcgcctacagtttcgtttccattcacgacgtgttcactgatcgccaagagtgtactgcatatacgcaaagacacagacaatcttcagaaatgatcttttgccaccggagcttggaaattaatgagaatagctggccattgcctgaaaggaacttctttcgcatcaacatttcgggttttggctgtttggtaccagccattggcgataatggccggccattatcagttcttcctgcggttcgggttttggcagtaacatattttaaatatacttatttttgtttttaaaaatttgatcttttgaaattgaggcttttgggggaagctttgttttactttaatatttttttgtgtgtgtgagggaagacgctgaaatattgctgctaggatccagaaataacacagtttcatatgctgaaacttgttattggctggccttatgccagcctgccactgtcaacatactctgttccattggttacatgcttgatagatacactcttgtgtttttggctaattgagctttttaattctattgtaatattttcaattgataatagatgtgataaattctgcttgtatagacaggtctactaaaatttactcttaacctttttataaatggaatctgtcctttgcttctgagaaaggaattgactttctgtgttggactgcatcaattgtgccctctccatcatgccttattttccattcttaagttacagtcctgaaataaatttaaaaaaaacatttatggagagagatgttactatttaccctgccacaaatgtttaaaatcttttatcacacatttgggggttataaagtttaatttgtttcttcacttagactcattatagtataaattataacttcaaaaagacctagcaaaaagcctctattgcttacttaccaaatgcaagctctttctctaaagctctgtgaacgcttagcgtttgctgctgtttgcctcat

SEQ ID NO: 24292 - DNA, 1653 bp, Mus musculus
gtatgtttttcttgaataggtattgagaaatggaagcccttaccagcccaattgtatgtttttcttgaataggtattgataaatggaagcgcttaccagcccagctttgccagccctaataagaagcatgctaaagccacagcagcaactgtggttcttcaagcaatgggccttgtaccaaaggacctcatggctaatgccacttgcttcaggagtgcctcacgtagatagattgaggttttatattaatcattcagataattttactctgcatcacaatgtatttcctccttaatgttgtaaatatttcacaatttaagacattgtgtaaaaagcaatctgtacaaacatctccaggctttcgtttttgtaccatggaaattgtatttaaccatacagggttttggtatgtttatattgtttaccttagtgatgtatttgtttaagtggctaacatccaaacaattgtttgagggcatcagtaatattcagtgtggaatgttaaataacgcttttatactgtattttgtactatgatgtaacttcccttccttacggctaggctgctgtaacacttgcctgtaatcagtgaagggctgtgcaccttgtactatttcacaatgggttctgctggacagatactgggccagtgttattaaggcaatgaagcaagatctgttccacagggctatgccaccatctccccctttttgtagagattatgaaaagaaagtgatacattgtgtcatgatcagtactaagtcctgcattcccattaaagccacttgacttgggtcataagaaggaagtcaaaatggaagtccaacttcagaggccaagtacatattagtatggcttcagttgtgatatagttttactttgatgtgcattttgaatttcagctacacctagatagacgtaaataaaaatgctgtaaccgacttatctaataaaaattggcacccagccgctattttgttgactgaggaagtttatgttaattttttagggtctgatagaatattcatgtgtattacagtggtattcatatgctatgtctctaaactttattttcaaaagcttaaggcccaaatacaaacttctctggaataaatgttgtgtcttattctctggcttttatggaacacatataactaagcactatttgtttcttacccaattcttgtgatttctatgcacgtttatttaaaaatactgaattttatacacacatgcaaacacagattacctgtaagcatactaagtagtaagttgacatggctgagggcccagcacttagatgaagtacaaagtagcctcccctctgacttgacacagaagatgaacatacgtgagagcagaggaactagaaatcattagtaaaaatgctcatttccctacgtcttgaaagaactcactgctcgtctaaggtacaatgtggatgctttagtctccattggaataattgctacaggtagtctgtttctcaattgtaataaaacactgacttttctactcaggttaacaataagttgcagggatagaactcttatttgaattatctgaggtattaaggaagctccttgcatcttcatctctgaaaatgtatgaaaataataaaagcaaaatcttgatttaaaacctaatgctatt

SEQ ID NO: 24293 - DNA, 1273 bp, Mus musculus
atctgacgccctcttctggtgtgtttgaagacagctctggtgtacttgtataaatcttttaaaaacaacaaaacctcggagttcaagaactaatgtgctttatggatgtggacttgtgttttcccagaaagttgctcgtgaggaccttgctaattgtgggctgcatcctaaaaccctggagcagctcagtcagaggccagtgctggggaagtcatccctgcggagtgtggaaatgagtgactacattttaagttggagatcctgaacaccaaagtaagcctaaaaggagtctgaggaaaaagcttcctagcaaggaaatgcaagatgcgtaggcccctggcttttaaagttcattcggaagaatatattttaaaatactgaaatgttcctaaacatttttatattaacttattacatgcaatagcattaggttttaaatcaagattttgcttttattattttcatacattttcagagatgaagatgcaaggagcttccttaatacctcagataattcaaataagagttctatccctgcaacttattgttaacctgagtagaaaagtcagtgttttattacaattgagaaacagactacctgtagcaattattccaatggagactaaagcatccacattgtaccttagacgagcagtgagttctttcaagacgtagggaaatgagcatttttactaatgatttctagttcctctgctctcacgtatgttcatcttctgtgtcaagtcagaggggaggctactttgtacttcatctaagtgctgggccctcagccatgtcaacttactacttagtatgcttacaggtaatctgtgtttgcatgtgtgtataaaattcagtatttttaaataaacgtgcatagaaatcacaagaattgggtaagaaacaaatagtgcttagttatatgtgttccataaaagccagagaataagacacaacatttattccagagaagtttgtatttgggccttaagcttttgaaaataaagtttagagacatagcatatgaataccactgtaatacacatgaatattctatcagaccctaaaaaattaacataaacttcctcagtcaacaaaatagcggctgggtgccaatttttattagataagtcggttacagcatttttatttacgtctatctaggtgtagctgaaattcaaaatgcacatcaaagtaaaactatatcacaactgaagccatactaatatgtacttggcctctgaagttggacttccattttgacttccttctt

SEQ ID NO: 24294 - DNA, 1175 bp, Mus musculus
atgtagggtatattctactacctgggctgccttgtctggcctcagtgggagaggaagtgcctagtctcgcagagacttgaagtcccagggtgggggatactcaggggatctctgctccctcagaggagaaggagaaggagggtggaagatgaactgtggaagcgggtaacagggagggggccactgagtgagagagagggaaagtgaataagtaaaaaaaattatacagagaaaacccaaggtggggctcagggtgtgccctctgctgtttgtacatacactgtgtcttacacatgtattcacacattttaaatatgaaatgatataaaaaaaaagatcaagtgcagagtcaggcagagctggtaactgttgagtggccacgtgatgaacggaaggtagaagagaaacaggacctgtgagagcgagcgagcggggactggtcaggaggaaggcaatgtgtgtgacctgtgtgtgttttctggtcagccccaccgctgtgcttgaccttctgtgtgcttcctgagtgcctgtggacagaaacagggacagaagagacaaagggaggactgcagcagcttcggcgcccacggtgggacagacgaggtactaatggaacttattaatgagctctttcttcttgtcctttgtcataatagttcataagccagaaaaggtgtcatggacggaagctgctggcgtcatccgggacggagtccgagcctgcacagctctgtattatctttctcaactctctcctggaaagtctgtgctgatcatggacggggcaagtgtgagtcccagttgatgttgtttaaaaaaaaaaattagtccaatataccataaacatggggactgtagagaagttgtctacagatgtccttcttttctttgttttttttttttaaagattttttattcacgtaatatatgagtacactgtagctttcttcagacacaccagaggagggcactggatgccattacagatggttgtgagccaccatgtggttgctgggaattgaactcaggacccctggaagaacagttagtgcccttaactgctgagccatctctccagccccctgtagacgtccttctttgtcattaaatcattagatttcttttccatcctccccttttatccttgtagacagcttttataaatagtacgtaag

SEQ ID NO: 24295 - DNA, 1223 bp, Mus musculus
ataagttagatatattgggtgtgtttaggaagtacctcttaacactgtaatagtataccagcttttaaagggttctcccaacaatgactcttgaaaggtacaaattagacacttaaagtttatcatttaccctagcctgtgacaacccaattcctttgagtcaaacttgagagaaaaaagtacctgagatctgcaagtgttgttgcctgtggtttgtttctcaactgttggtttctcaggcgagtgtgtctctgtatgtccagccttgcacttgccgctgaattcttctgtccattgaaggataaagctgtcagttcctgtttctgagtgtgggaagtaaatttcattatctacaaatttctgcatgtcagcggatttagtggcaatcataactgtttctcaatctgctactaaggaagagcagattccctggactgttggagatggttttgtttctaaccctgaagccagcttgttctacttactcattcttgagcatggaaatctagagcctcaccttgtcttacttattacactttggagggtaattggagacttgtgtctgtggaagcttgagatactgggctgagctaaaccagaatctaatgagcaacgtgattaaataaatcagtagccaagagaagtaaggatatttacattttacctatttcacagggtgttgttagaatcactataaatagacttaaaattgtagcatgtatttaagtttttcacacgagtgctatataaaaagcaaggtgttagcatcccattttctgtttttgacactagaaatgtatgttgtattctgtaatttcctgctatgtgttctaataaacgttttgtatttgtgctcttggttaggatgctattctatctagccttctgttctatttttagtccttcacgatgagtctggacatagctaagttaatagcaaggtaattgaagtgtgtgtgccaagtgctcgcctgaatatcctctggcttctccactttcagggttgagttactgtttacagtgacacatttcaccatgactgggcagtctgattccatttgcttgttgtctggccatcttgtgcccagtatttgtctagctctacatctctactattcatcccgttaatcttaagtttcaagaggatcggtttaaccgggaaagattagctgtctaatagtcagaactggattgttcatgccccggggcaggcattggagaac

SEQ ID NO: 24296 - DNA, 1148 bp, Mus musculus
atattccgaagatatggcctatacacttgaatgtaaatccttttaaaaactatagcaaagcataagatttgaagtattccaactagttccagcaagtatgtaaggtgtaaattttatctacaagccagatactggcagtcattggtatgcttggacataagaacagacacttacagcttcttaatctggttcagcagcttcaaccactacaggtgtagtggtcttatgtcctgaacagcaggccagtgacttagaggagtaaccaggctgtgcttgtctgtcatccgcgcctgtgctcacaggtgttgttgccatttttagtatattagacacaatgatgagcctgaaaacatagacatagaaaaggattatttgaactgagtggtaataatgatttaggaattttttatgtgtttatgtaacatacatatgaatacacacataaacatatgtaacaacaattagggaagaaaaggaagggacaaatgatattctaatgatattataactcaagatatctaaaaatacattataccaggatgaaaaacaacaaataagtcagagagagcaaatgctataaagctctttcaaggactgtgcacattcctgcatcctaactgacccatggcacagcgggcagcaaatgcacatggctgctgcgtgtgccaacatctgttctgaatgggtccccctcaatgtcctgctctgttttcacagacagacgtcttggtgtcttcaaattctggctccttagagtgtgttaggatgccagctggcccatctgtagagtgaccctctcttcctctgagtatgtcccggtgacttagctgacacagctggctagacatacactcctttcctttcacataatctgatgtatatgttatcccgtgctttcaaaaaaacaaggcctgcagttctttgtgtagggttgaggccttgagagctctcctccatccacgtgagcacatctactggtgtcattgttgttcagactaggtttaggcagccatgttgacgagcctgaaacacatatacaaacaatattaaagaaactgagcaggttatagttatttaggaatttgttacatatatatgtaatataaacatatatacacacatgtaacagggaggaaaagaaagggaca

SEQ ID NO: 24297 - DNA, 1175 bp, Mus musculus
gtagttgcagtgttcagcccctggccttgtccaggttgtagtgtgtttaggacacctatggagctttgaggggagggggaggtcttgtgtggccaagccctctgcctagaaccagtgcttagaagatagattgtggtgcggtcactccttagtccccacccccaccccgacacacaggtgtgtacgcatatgcatgtccccacacatttacatgcacacgcagtcaatggtttcatgcccactgtggtgtctccctctccttgactgtgtgtgctgctgtagtgctgtttaaaggaagcttgcttctttttcagcctctagatgacgctgttctctctgagttaaagacggtgctgaagagcttcctgagtccaaaccaaatactgaaactggagatcaaggtgggtctgcatgattgtggagtgttagtgctgaggcccggcttacacataccgagtagttcccacctgtgtcttggtgccctgcctacccccgatgcctgtctgatagagcgctgtgtttcacgtgtgcaacctgttttctttcctagactgacccgtcaatcatgggcgggatgattgtccgaattggggaaaagtacgttgatatgtctgcaaagagcaagattcagaagctcagcaaggccatgcgggagatgctctgagagactgtcacctgtgtgagctcttgtccttggagcaacaataaaatgcttcctgaacagagggcgtgaggagccttgtcctttaaggggcagcaccaggtctccatcctcctataggaccctttagagtgtccagcttagacagttcctttgggctggagggctcagtttgtatgtgtcattctcaggaagtcattgatagagttagcattgtgcctacagatacagtcttgcactgcctatcaaagtcttgtgtccttggaggtagctgagaactggtccctaaccagtcataatgaaggcctccctactgaaagactctcggtcctgacagagctcctaactgtagggtgctctgactgtcgagactaccgtctatgctcctggcagtcttatgatttgctcagagtaatgtggctatgcagcaggaggtgaggcccagggtgccagctcgacatctccagccagccaggctacacacaaggcccttgtccctttccccagtgtccct

SEQ ID NO: 24298 - DNA, 1222 bp, Mus musculus
cttctgggtcaggctaggcacacacagcaaatgcctacatagcccttcggttccaggcttgtttctttgcggcttggtgcagcagtcactccttagcaccccgccttcctccctggagacgcgggcgaggggcacacagcagccagaccgcatcgcaccgcaccgcaccgcggcgcacgcgcactcgctcgcctagcacccgggaagggagggtgggcggggaggcctggaaagttccaccgggttccagagcccaaggttggtaggcgcggaggcggcggggagcgggtgcgtgccgagcgaggagacggcctccgacgggctgctcgagaccgtgtccacgctccgcaggctcgggggacacagacacggcccgggagggcaagcaggaagccgttgaggtgcaagtgcaaggcgccctccgggagaggggcggggcggtgccgggtgggcggggctctcggtgggcggggcgagccgtctgcgcagctgccggagcctttaaacccggcctcgcggggtcgcacggtgctttcgccgtccgggagctgaccggccgtgttcctctctcgtcttcctctgcgccccgcgtccccgccctcgcgaccccggctctcctggactcggcgccgccaacctgggcgatgccccgctacgagttggctttgattctgaaagccatgcggcgggtaagtgaccttccctcagaccgagttcccgcgcgggcgcgccccgccgcctctaggcctcccagtcccgcgtgtcctgcctgctggacaccgggtcctctcgcgcggtgcgcgggtggtcgcgggcgcaaagtgggggggtggcgcgtgggtcaggcgctcggcgcggccgcgtgcgcgcgggaggcggggggtgtgtatgcccgcgcgtgtgcgcggtcgcgggagggggtgtgccgagcagggggcggggcgggcctcggaccccggctctccggagtccgatggaaggactgcgggaggacacacgcgcgagaacccaggccagccccgctctgcgcccacgcgtcgagaagctgctcgtcgtccccgccggccgctggtcccgatcgcctgccctcagcgtccgcgatcagttacagccttcctccaaagcccgccagtgccggctgtgtacccacgcacttgtcaccgctatcacaccaaaaagaaaaaaaaaatcttttgacctttctttttctgactccagcgga

SEQ ID NO: 24299 - DNA, 1222 bp, Mus musculus; identical to SEQ ID NO: 24298

SEQ ID NO: 24300 - DNA, 1100 bp, Mus musculus
ttagttgctacaaagagaaacacttgtaccgttaaggtacaaggctggtgcataagcagtgatggactgagacctttctcatgaagaccatctcctgatgtggtactgttccgttgcactgtcttgcacactgtggctgctcagctaactgctttgactcctaggagtgccgtgagcagaggttctgtgtaagagcgtcactagtgccaagtcccacacttcatcatgggtttcaggtcaagttctcactctcctgtgctggcaataaggctttactactgactgatcttgtaacagtgttgtgaaattgatcgttcatgtttctgtctccgctcctttataaaaggtaaggtttagtttgaatgtaagccactcacttttctggcaaccagcaaccgttgacctgtagcctttttctcagaaacaaagaaaagatgtgctgtgtgtctttactcgtcagcagtgcatgctgcatgtgctgcagatggcctgcttcctctgtgtgtagaggagaggttttctgtgccaggaacggagctctgcgctggcacccccccccccttgtttcacgtccagcagtgtgtgtctagggaaatgctagtgattttcctgacaacacaagttgacagtgtacccacagcataaatagatgaattcaccctactttcctagtgctgctagatatataaatttatatataaataacacacatacatttaatgttcaatttatcaatatagcctaggcttctgaaaatagaatgctattagtaacttttgtgtgtaagtgggtgcgtgcgtaatttggagatgaatcgggctcattgaaatctttaaatggcagatgctggtatacaaggttttctgtagtataatcaagttttgagattcgtgtttgggttggtgccttctgcttaccagtattgatgcgctagttcgcacttgtccctttcttagtagtaagctttctctgttttaaacttgcaactagtgaggggaacaagtacaaagtgcacatttctatacttttatgcagtcttttggttcaaggaaacaaggcagttgagtatctgtattaatgttatttattcatctttattt

SEQ ID NO: 24301 - DNA, 1051 bp, Mus musculus
gacagaaacagagagagagatatcaacaaggtcttggtatatgatacatcttagaagagttcacatgaacactgatggaaagatttttcccctccagcaacaagctaggcgtgtgtacccataacagaattttacagcaggtaacctggaggttgcaatgtgggggtgggagctgagggtaggagtgtgtgaggagtgtccttggcttagtaatgtgtgacagtgtagagcagttaacctttcaggcctaaagactgtattctgtaactttaagagtttattacaactttatgaaatacttgttaaaatttctttggcagaaatgtttttcgtggaaacctgctttagttagactaagtgaaatgtagttgtagcagtgtaaatatgtataatttcctaatttcactgtgagatctcagacttttgagtggcaaacagatcactgagtcttttgctaatgacttgtctgtggggtcagtaagatgtaaactctttatttttgtttaatagcgaccaactgtggtgctgtgggatgatggtatggagccattactccactgcccttgttggttttgcttcactttgagggcctgcaaagttcagacccagcagggcttcctgtcccttgctcagctgcctttctttgtctggaacggttgctaatcaccatataaactcttaggcttttctgctttgctttgttgttgttttgttcttttccttttttgacaagatggatatcaaaaatagttgctgtgcaaaagttagtagtcttcttcaagaagaaaacagttccttttctaatactatcctgtgaaattgcttcacccattcctttattttaaagccaaatgtcagcagaatactgctgtttttatctaaataattttaatatgtaagtattaatgcatttaaaaagatgtctgcgttgagaaatacttcactagtgtactgcctgtgaaaactttgttcagatttctggctaagacaccagtcagtatactggggctgcacattacatacatgtattattttagtcaggtattgttgt

SEQ ID NO: 24302 - DNA, 1163 bp, Mus musculus
tgtcagttctcgttcctacaggtgagtgccaggtccttttcctcactgtggaaagtggctggctgacttacggcctgactgtttctttcaggtgtaccaagccactagtaaagtccttggaaattagaagaccatctaataaatgtttccacagaataatcaatagatgatataaaatccgttcttgttgatagggtagaaaattctacatacacagtcttacaactgttcttattccctgtgcctggtgtcacagccttgctgtgaagggggttccggctaatttttactggggcgtaatgataggtgcagtctggaaggaggctgggtgtgcccactgcacttgcagctgagtgtgagtgtgtgaggtgcccgctgcacttgcagctgagtgtgagcagtgatctctgggaaggtaaagatcacaacgctgagcagagagggcgtgttatccttcagatgcagcattcacctgtccctgtctgttgcaggtatttcctggtggatttttatgctccgacaagtgctgtggagaacatactggaacacttggcgcgagacattgacgtggttagaccaaatattgtgaaacaccctctgacccaggaagtaaaagagtgtgacggcatagtcccagtcccacttgaagaaaaactgtattcaacaaagaggaggaagaagtgagaagattcaccagattctggccttatatttaatcctaagggcactatgggtgctgctaggttgttgtctaggatactttagcccatgaccattttgctgcaggaggtagaaactgctggccgagacctgccctgatgtctctgctgagatttcatcccacttgtggggtttgtcgggagtgggggtgttcacagtaccactgtagcgtttccaagagcaaaatgtttgtcattcacacttggttgtcttgcaagcctatatggaacactgggagcagagtaataaacatgactttatcaacactgacggctgtattgcttctcccccctccccagcacagtgtacccccaaagctggcagctccagttgtgctgtgacaccccaaactgttattcgcaccctgaagtttgggatctgggtgagtctgctgctggactactggacagtctacggaatttgtgctttcttctgtccatggg

SEQ ID NO: 24303 - DNA, 1428 bp, Mus musculus
aagttatccatgaggaggcacaagggcagactgtgtctggccaagcaaaccctggtgtccctccaggtccctgccctccatgctcagggacaagccgcggttaccactcaccatgctcttgtctccttcccccaggagagaagtatgaactgcatgcagcgacagacaccactcccagtgtggtggtccacgtgtgtgagagtgaccaagagaatgaggaggaagaggaagagatggagagaatgaagagacccaagcccaaaatcatccagacacggagaccggagtacacacccatccacctcagctgaaccggcgcgcagactgagacagcgctctgaatcccacgtgtgggaaggaatcttttactgtgcaggtggctggccgtggctttggagggagcggccgtgaccactgtggcagaaattccagttcatgatgctcagaagagagtcaaggcctcctccccttgttctgatgctgcccctcagtccatgtccacggcacctgggactgtcttgggccattcactgaatgtgtggcagtcacacaaggacactggggacatcctgagaaaactgatagttcttgtaattgctcatttctaggttctgtttttggcaaggacaggttgactggtggcccagggagagatttctgtttccaaccagagttcagggtgcagcccccccactggtaggcagaggcacaccccccaaagccaccaagtgtccagtgcagaaaggtggtgggacaacccccgaaccgtgtggaattgtccttctcgttccttccccatggtctgacgttcatgcatgtgtattactgggtcccaggaccagcctttgttcacgtaggaagttacgctgttttccatcttgggaagccaggaaagttctggaacactcttaccacgtgtcctcgttttctctgcacatggggtcgaggctggagacatccacacgtcaccctgcctggtgcattgtgtcacttgtgcttccctgcaaaagaagttgatcttgagtccccaagtagaacttagcctaacctgtgggagagcagcagggttgctgccagccgtctgtctgggctgggaaggtttggtgtgggtgcttgcgttcagcaccggtctccgttgtttccttcatgtagtggtttgtgtgtgaatttcatcccagacagtctttgggaactgttggttgagacagtttttcacccccattgaaacgtgaagataaacttgtaaatacagccaagagcatatcttagtacctgtctgtacctgggtggaagtagagggcagagggagtttcaagctacctgtgacttgtgtgtggtagaggttactgtcatgtgtttaatggggtgaatcagagcatgtggagtccgtcgtagccatgtgttcctagagggacacagtgcctttcc

SEQ ID NO: 24304 - DNA, 1176 bp, Mus musculus
gtccacactcccatgggagtcacagagcactccgcaggctttcagatgctttgctcagatgacctcacagaaaggttgaggcagatggggagtgccccacctcagccagcacagctacacgggtgtgcacagagtgataaacgacctggaatttctcggtaagtgtctgcattggaaggaacggaactatgagccttttatggaaccaaatccctgagtccctcgcctgtgggagagtgcagtccatgcccagtggtcctcaggagccagcggcgcacccacagctcttctgccagcgggactattgtggtccgttcatgtggagccaatattttatagtttaataagaaaatcttgtgttaacatttaggctttctgtttctgagtttgaagcagggtctcaccctggcccagactggtttggaattcaccaggcatccagcagtcctcctgtctcagcctcccaaggtctaagtcaccacactaggcttagaggctgggtcttcatgtcctcggaactgcctacgaatccatgttccagttcttctcataaacagactcctgaagcggtgcagaaaggggcaaccctttcccgaagtggctggttcccacgggtctgctttcacagaggctgggaaacaccctagtcattttgagcacttagggtcaattcccagcgcccacctggtggcccacagacccctggaactccagtcccaagggacctggtgccctcttgcctccacaggtaccaggcatgcccacagtacacttatgtgcatacagccaaaacatacacataaaatttttaaaaataagattgttttaaactaaggctatttgagccacatagaacttgctcaatatttttaccccttggaaggagatgtaactgttctgagtgcttttgtgtttatgcacagagcattagaatagaatcaaacacagacaagataagcgggcaggtcactgtttccggattcaaaaatagtcccatcacagctcacaaatatgttttagggatcatttttcattgcactaaaaataaaagtttcaaagtagttacttgccaaaacaattcctagtactggagagaaccgggtgggactggggctgtctcctctgtttatgctggtcatggtttcaacacagtcagctggctttactggacatggc

SEQ ID NO: 24305 - DNA, 1148 bp, Mus musculus
tgcataatacagcatatgcataatacagtatatacataatatagtatatgcataatacagcgtatgcataatgtagtatatgcataatacagcatatgcataatatagcatatgcatatcctcccgtgtgctttaagtcatctctaggccacttacgctacctggtaggttgtaaatgtatataaatagttgttatactgttattgttgttgtttttaaatggcaagaaggaatggtatgtacctgttcttgcaagtgcagtttttctttatgaaaaaagaaaaattattctagattgtccgaacctgtacatgtgcaacctgaggtactgagggccggcagaagagagacgtgcagcatggaatgtaaagagaatcaggtagtcgcgacaggtggcagacctagtgacagccaggtccttacagggctgcacactggcggctcaggatggaactggctaactgggctggcctcaggagttccacaggaggtatccagaccagtagccatgaacagcagctagaagctggagctaggagaggaacccctgtgaggagctgcctggcaagtgcgtagatctgaagatgtgaagttggggtgctaaaggtcacaggaaagagcctggccttccctgatccaggggagcccaagccagatccattggcaggatcagccttccagggtctggaggagggctctggggacagtgtgggtgcagaaagttactctgagcagtcagttcaaggggcctacggtggccctgcacaggctccttagggagagttttgtgtccagaatccaaaggagtagccatgctgatgtgtggatgggtgccagagtgaactaggaaatggccggaaggagctccagtgagtgctgaagggcagggtgctgggctgcagcggtctgaagagcatccagggaagggtccccagagggatgcagtcagatggtactctaacttcaaagttgggtggaaaatgtcccatggggaaggaagatgggtgggtgggagagggaacagggaggcaggccagggggcttgtcagattgctggaaaggagggtcctttgtgcagaggggtggttctgaggagacagacacgggacctctggaggctcctcccctttctttccaccctctggagc

SEQ ID NO: 24306 - DNA, 1154 bp, Mus musculus
tagcttgtttcagggcaaacaggctttgacttaagttcttggcattttaaagaggttagtcttttttttttttttgatagttttcataatcacctggcttgtttttctcttctcaagtatcagtttaaaatggagatgctgttttatacttatagaatactttagaacagtattagagggtatgaagaagaaattttttaaaatcacctaaaattctatatattttctgatgacaatttgatgaatgtttccagaatcggtcaatctttcatgtatgcctgtgctcatgcgtgcacatacatcacatataatttcattcatttgtggaatggcatttgtgtaagaaagcaatgaagggatctcctggttccttaaaggttatcacagaagacttaaaacaaaggatttagccctgctgagccacacaggggcttggagagcctcttgcagaaccaagggacagcaggacctaggataatgggaccagggtatcttgcttctgctttaaggatgttgttgctctgagcccaggtgtggaggagagggttccccgtgcctttgggtctactccttttctggaacccattgttctcactcccccagagggactgtgctttcctggggactcttcctgtcagctctggcttggagactctccctgccttatatcacagtgtaaacctacaagtcctgctcatgtcagtgcttcagtgaagatggtgtacccgaggctagctcattcacgtcttctttctatctcattgctgttctttctgtgtcaacctgaggcgaagcaggaaaactgaattccagatgaaaatccagaaagtcccactcttaagcttttctggaaaatggtcctttcctgagaagttgaggagtttctggtgtgcttgtggcattccctccatcattcttggggccacccttggtcatagtgaggcctgttccagcctaaccatgaatgaggaaatgtgagcttgcaagctctgcaaggcttgtcccttcaccaccacacaccctacaggaaacatctcttgtacacttggctagagcgctgggctctggaacctcgtgcttcataggcacttgggtgagggtaccagtaagaccccgagattaggtgaaaaaatatctcgaaaggaaacaaagtc

SEQ ID NO: 24307 - DNA, 1118 bp, Mus musculus
gagacagaagcagggcagggcagagcctcccttatctgtatgttgacttttaggtagattatgctattttgagaaactgtctcagttttttctaaaaatcagaataactaatataattttgtgctgttattacctgagtcctaaatctagggcctaataccatgtttacctctgaactatgcccccatctctgtagactgtactattttattaaggaattatgtgtttgttacaaagaatgtactttctttttttgtttgttttgtttttgttttttgtttttgtttttccgagacagggtttctctgtgtagccctggctgtcctggaactcactgtgtagaccaggctggcctggaaatctgcctgcctctgcctcctaaatgctgggattaaaggcgagagtcaccatgcccggctctttttaaattaatatctgagtaatgttgaacaaacttgtgaatggttgtttagaaaggaagcatttgttctatttctttgcaggcttactgcagcattttataccttaaaccaagaatgcagatcatcatacgtggacagaaagtgaagacacaactagtttcaaagagtcttgcctacattgaacgtgatgtttaccgacctaaatttttagtatcctttatttataatatgtaagcatagcaaagcatattcaaaatcatttgctatttttctttttatccttataacagttttttaaatttcatttgtgtgtgtgtagatcagaggacaacttgcaggagtcctttcaccatgtgtgttccagggattaaactcagtttgtcaacatactggccagcatctttattctctgatctatctcaccagccctctctcatagagttccacgctccagattgcttttctacatctactttaggtgtgattctggacactggctgattccaagccctcttaaaaatatttatttttattttatgtgttgagtgttttgcctttatatgtatttgtaccatttggatacctggtgcccaaggagatcagtagagtctgtcagtcagatcctgtggtactgagatggttgtgagctgagaatccaattgtatccaagacgaggtcatctgtccagccctgtat

SEQ ID NO: 24308 - DNA, 1362 bp, Mus musculus
cctagcacttgggaggcagaggcagatggatctctgtgagttcaagggcagcctggtctatggagcaagttccaggacagccagagctacacagagaaactgtgtctctaaaaaccataattaaggaacaattcagtttattttcatcagcgggaggttgaagtccaaagccgctcttgatgaatattgtcactgtcgcactgctgtttgtccgggggatagcaagtgggaagtaacatctaatttgtatgttgaaccacatgttttataaaacttgttcttggacttagcctagcatctagtgaatccattggctgttaattaaatccagttctttaattggtagtggtggtggtggggttcttttcactttattttcttttattcaacagacatttttatcttttcacttttaagttccataagagaagtcatttatattgtaattctcacctgattagccaatgcctgtgtttgcagcctcaaacttcgttctcttcgagtcaacgtaggacagctgctggctatgatcgtgcctgatctggatcttcagcaggtcaattatgacgtggacgtagtcgatgagattctaggacaagtggtggagcagatgagcgagatcagcagtacttaagtgcagacgtctggtgatggtttcagctctcacgtaacgcgtgccaggtcacagactgaagagcggcatctttctgtattctatgcattcgagtgtcccaggcactgtggacacacaactcttgacataacctgtgaactgctggggttgagcagcgtaatagcgaacttagcctctgttctaaatgtcaatatttgtattaagtccacaaatatttttttattgccctagagactggtgtttttcaccaagagcttttcaggttgttacaatacagtttgtgcaatttttctggctccctaaatgtatttttctcaaaatcgagggctgtgccatagtgtatgtaaatggataagttgctactgttgtttccttaaatgagcataagacaggatttgaaataatgtcatggcactcctagcggggtctgcttgtaagggaattgagcattactgctgttttctatgaaatcctgtctctgacatgattctgttcatagagaggaaagccaaagctagctgagtttgcctggctttttcttgtggtaagattgctaattgtcaagtaaaaagtgttttccaggacaaagaaaagatctttaaagtgttaaaaaatatccagtgacaaccatgtttactttgaagcccatttttggctgttgattcagcatgaagtgggtgcaataattatttgagatttctttttgtgaaatttcctgtatagccttt

SEQ ID NO: 24309 - DNA, 1268 bp, Mus musculus
ttgtttttctttaagtttctttatatgaatgcttctatctagtgtgtgtatgtgtgggggtggtgcatatgttcaaacacggaggtcagaggagaactctgtggggtcggttctccggccacctcacatggcacccaggagtcaagcttaaacaacaggcacccgtaccagctgagccgtctcactggccccgaatttatcttttatgttgggaaagaaaagattgaagttgagaggaaagtacatagatcaagatggcttcagggactgagatgggactgagaaaggaaactgggtgtctgaagtgcttgttcaaacagtctgtcgtgccagtcccctgtctaacaaagcctatggttggtgccagcttcctggctagccataggagggtaaagtgtgccctatagacatcagttaaacctctgacttctttcctgttctggggacacaggtccagcgatggggccttcttggccatttcctccacggatggctattgcacatttgtgaccttcgagaaaggtgaacttggcatacctttgaaagagaagccagtgctgagcataaggactcccgacacagccaagaaagccaagaaccagacacaccagggatcttcgccgggatccagatcagtcgaagggacccccagcaacagaacccaagaccccagcagtccctgtaccactccttcaccaaccacacagtctccagctccgtcggccatcaaggacagtccctcagccatcccggctggcaaaagccccttgccacaaccttctgaagagaagaccctgcaacctgctgggcaaaacatgaaagccccccaaccccgcagggtcaccctgaacacgctgcagacttggggcaagacagccccccggtaagagcatttgataaaacaagagtgttgctgtgaaatgggccccagcatagcaagtattgaaggttccacctccctccttctggacctacattcctgcctagggatgaagcctagcatcttcccgtgattccgtgggctaggtgggctgctgtcagagcctggggcttttcctagccttgtctcccaactctcctgtcacattcccagagcacactctgccctttgagatatccatgtctgcttcccgggggaaggaagctttggatactcctggtgacattggaatcttcctgagacccaattaaatgtgtcttctctcttcctggtctctgtaaccccaggcccccatagtattgtctggcaggggtttgtgtcctcttgg

SEQ ID NO: 24310 - DNA, 1174 bp, Mus musculus
gagtgcagcactgtattgtaagtcatgactttctgcccccaatttcataatgtcaggaaggagagagagagagactgacacaaaaatgccatcagtttggagagacgtatgtgcgtgcagagcatgcctgattttgcgtgtgtgtgtgtgtgtgtgtgtgtgtgtgtgtgtgtctttaaaagaagatgttcaaaacttgatgtgctaaaacgtctccgtggaagaacaaaggagaggaagcctttctgggcttgcgtttccagatgtgctccgtgctttcccgtgtacctcccgtctctgtggagcttgtgaatcatacccatcgctgcccagcctgaaagaactagttcctgtctgccctcctgcttcctgccacttccactgaagtgggcggacggaacagatcgcttcgcttagagcaagatcctcgtcataaacgagtaccatctttatccagcttctgtagtcagggccaactccagaaaccagaggtcttcggcatagaatccactcaccctcagcctagcagagtcagccccatttgaagcaaaaaataaaataaataaataacagggtgaactataccaacctgacgtgtgtttgaggggctgtgacactaaaggaacttgaaagtaacttttcttgcaaataagactttgactaatgtttttctcaaaaaaagaaaaagatacatatataaaatttagttccgctatttttttaaattcatgcgagtttaaataaaactgtacgccaccccaaattataaagtgacaggcccaagagagagagagagagagagagagagagagagagagagagagagcgagagcatctgtaaaatatcatcaagaatgaagatctccaagctggctgttgcaaaggttcatttctcagactttgtaatataaggctgttcatctctcagaaccgccatcattacatttgaaatttctatgggggattatttaatgaaaaacatgctatgttttattttaagctgaaggcctattctggatagttctactttggggaaaaaaatgttatcatttaatttcctttctgtaagttaaaactaatgaagtgtggtcatgtcagagcagacagagatgttctgggcatgctgattggccctggggtagttacactgtttgggggtattcttgcgtatgca

SEQ ID NO: 24311 - DNA, 1241 bp, Mus musculus
agcagagtgttacagcaaaacacttcaatattgcccctctgccctagatggagacttactgagagatgaacagaactaggaaaagatgagcagctaacaggaagtggttgctcagtagaggcaggatggttgagagtatagcagtttttatgtgctgcgaagtggtatatcttatggtatgttgtatagcaggtagagaagtacacagtaggcgaatgtcttttctacattcagcaaacactttctgaagacatatcttgctaggcacatacagagtcagtgcccttagttatattctacccatgggagatacatatcccttgagttcagagtagagctggtgaatatctaaacctaaagaaaagagcctgggaagaagaacagtggattagggataagaatatgtagacttcagtgttctgattggagttacttccttaggatacaggacccaacatggttctactataccatagggaatagtgctgctgctctgttacctcaggtgatgtcactgctgactggaatgtcactgtctccttaggactgtgcagcatggatgactttgctgagggaggtctcagtttggcagatgatatcttactggaagattacccttatgaggatgactgtatctgtactcctgactttaccactgacgattatgttcgagtaacccagctttactatgaaggcgtggtgagtaggcttgtgaactctactttagagcagtttttgtggcatatgtattgacaggacagtacgtgtgcttctgaagagatgattgcagaagggaagggctgtgtcgccagagtggtgagaactagttacttagactggagatcaaccaggctcctgaggaaaaggaacaaactcagagcaatccaatgagaaagcccgagatgagttccgaaaccacaaaccatacatactttcaccttttaccagataaaaatcagaataattttcttcttttagggtatgcaatataaagattatgcccaaagtgagaaaaatttaggtgagtatattaatactttaatgctaatttgttgcaagactattaagggaggtctatccatccagtcataccaacataacaaatttatcttttaatatgtatttttagcttgatttggttatataggcctgtaatcccagcatttgggaaggaggttgaggcagaaggattagaagctccaggccagctttgatcagcatgctgagactcttgtctcaga

SEQ ID NO: 24312 - DNA, 1175 bp, Mus musculus
aacattggcaattcagctattcagattcttaaaaataaagtaaaaagaatattttgtgaactcccgatgagtaccgttgcactgattgcccttttgcctggcatacgctgcagatcatgtggccctgttctgaaccttgatctgtgccttacacctgatggtcaggatagatctctagtcgacatgtgaccggagagtcctcatctacctttatattactgtattctccaactgcctcaacagcccagggccagagacctcaacttccatgtctgtaatcattgtagaaccattcttgatctgtgagatgtctacggtcacatgaagatgcctgtgagtccacagtgactgttcttaacgtgtatgtaggagtccagctgttctctattgcatgatggagtgatgaaaatcagtgtatgagtaatggtccgacatgccacagaaggcaaacacacagtgccacacacattcagacttaaactcagatcccctttttcattcctcttttgaaacagaaaatcttggcaatggaagatgctttaaattggataaaatacacgggtgatgtaacaattctacctaaattaggatcagttgacaattgctggcccatgctaagtattttctttactgaatgtaagtataattgctttaaatgttgagtcttgtttaaagaatattatttgggaagatgggatgtgttcatagatgatattcaatttatcttaggaatggttaactgtttttcttctggtataatgctcaaataagatgatttttttttaacattgcagttagtttattctctatttcttgtctcactggtgttgtaacattatagtcttaaagctcgggctagcggatgtcatccctttacaggtgcatctgctcgttggttaagatggagctgccttctgtgcttttctttgaaaagtgttttacttccaagcacttgaatattagcagtgtttttatggtatacttacagtcttaagacaggaaacatttggccctgtaatagatgatagcagaaacctgtcattgtgactgaggaagaagagtgcatattttgtcagttggtttagatgcttataggtaaatagagacaggattttgcggtagggttgttggacactggagtgtgttgcatccagagagtgtagattttgttttcc

SEQ ID NO: 24313 - DNA, 1163 bp, Mus musculus
atgattaaaggcttaaatgaatgctaaaatgcaaaagtgatgttgaaatattttaattctaaaatactagaaagtgaaaacattccattataaaaataacttcagcaagattatgctctaaaaaggtaaaaatgcatacattgactcatgacaggctctgtcctgagtactttatgcatatttattcctaagaacctttacaaccttgggaggtattgtagctatctctttcagatgagaaaaccaaggtacagtaaggcctagcagtgtcccggtgtgcttaggcgggtgtgatgcagccaagattcaaacccagtggacctggatgtggcctctattgttagtcaccttggaaaggtgacagtagaggtgacacacgggaatgtgaacgttggaaacattttaagacaaatgatctgaatagtcacacatttatgaggacctgctgatccttacataacatgcagattaaaaactacgagcttctctttcatacccatcagattggcaaaaacttaaaagcttcgtaataccaagtatttgagaggatgtggaacaaaggaagctttcatactcggctggagaaagataaattggtacagtcactggagagcagtctgacaaggagaagatgtgcattctctgcagttgacatctagggtcatcccttccaactgtcagacatgtactcaagaagacatgtacaagccttcattgtagcactgactgtttgtaagataaagatgtgcaccgacaaacgtccatcaggaggggatggataaatgaactgttgtatattcatacaaagatgtttgaaacagcacttaaaacgagtgcaatgttgagtgtcaagcaagttgcagaatggtttgtacagtgtgatagcatttatatactgttaaaagacacacaaaacaatgtgcatattcatgttatcatgatgtatgaatttcaagtgttcttgaaatgtatggacatgttaagcaaaatgagtggctatctctggggagagaaggaggagaaaggagaggtgatacacagtggacgtcaactataacaaatctgcaaaaaagagccatagtaaatatggcaaaatgttgatttcttgataagttggtacatgagtgtcctacatgttaatattatgttctctgaattatgtg

SEQ ID NO: 24314 - DNA, 1135 bp, Mus musculus
ctggatgagcagggttgtgcctgctctgcttacatgttgcagttataagatctggccgtgtgctgggaaatctagtgtaacttacactcacacatcaccaggtgggttatttatagtatgtgttgttagaaccactggtacactgttatggtacctcagtactaccattcagcccgactcaacagctgacaccagggttctagttatggttggtgacagaagtgagcaaagacagacatagcccctgtgttctagccagtgagacagcagtgttaagcctgaaattagaagtggcatgttgtattcaagaaactgctgttgtgccacatgacctgaattacagaggggaggttagggtctagactttgcaggttatgttatggctgttggccattgagaggggtggtaagatgccaaaaattccaagagttgagtgttatgcatgattagtacccttaaaagctcatgctggacacagaaaattgctttggatgacctgcacaaaggctgaggctgtgaggataccaggctggaggaaggtagctagagtaggcataggacagtgggaggagtcaggatatttagaggtgacgttgacagaatggctcatggtttagtgctgagatatgactatggagactggtatgtgttcttactagagtcttagatttttgggcctgcttattagcagtgggagtcattggaagaggaataaatttataggaggtagaatctgagtttctctatgtaaaaaagtaaatgacatgtttgggatagatgtccaagaagattgaagttggagatgcatttaatattgcttaggaaagtaagtttcaccctcaactgaagaatcatttgaactttgaatcccagacattctggcttaactgatagagggtagagcttgcagaatggactttttgaagcttccctgggaattaatattactgttcaggcaagattgaaacagccttgctgtcttttagtgagagagcacaaggtaagagaaaggagccaagttgaaccttgaatatcaatcagggaaaggtgacacctggcctgaaaactatttacaggtgtccagaaagaaaatattttatagaaagaagtgagaggacacgagtgtctagctgcc

SEQ ID NO: 24315 - DNA, 1153 bp, Mus musculus
ccgtgggtcgtgaccccttggggtggttgattggtgtttttacggactgtcagaaaacatatatttacattacaattcataacagtaaaattacagtgatgaaatggcagtgaagataagatggaaaatctctgttctggagtttgtgctctgttcagtatagctgaaccagtctgttgtgtgaaaggctggagagttacattgttgagaatcagttttgttaaaagacaaacataggggctggtgagatggcttagcaggtaagagcacccgactgctcttccaaaggtcctgagttcaaatcccagcaaccacatggtggctcacaaccatccataatgagatctgacgccctcatctggtacgtctgaagacagctacagtgtacttacatataataaataaataaatctttttaaaaaaaagacaagcatagtgtataaaagcatatggataataagtcgaatgtagatactggaaagctatataaagaactttctaaaatcactaaatgtaattcctgagtcgttgtaatggggttcgggtaactactccccttcgttttacttctctgtattttctaactttgctatagtggacttttgccatatggcttaatttttttactaggctatctatattcatgtaaaattcacagcatacgagtagatatatgatatatagtacttttaaagtaaaatcatgaaattcttaaatattttatttcttgcttttctttttagaaatgcacttagcgatggaaagagggccattgttttgaagaacacctggccaaaggtaagcttcttttattctacaatgagcaagcccttgaacattactgttgtgtgagaatcagtgtgtgggatcatttatttgtatgtaaaaatgctgggtgacatttcagagaactcaaggacaggaaatgggttcaagagtttatagtcagttccaagacttgctgtgagaggtaaagagcatcagagctagttagacacctcggttaataggctaaccagtaagtggctgaggagggggtgggggaggaagagaagaagacaagaaaaataggagaacacaggagagccttactcccctcactgttagaaagtattcaaagctcttcccaagtgataattgtacttcaaggcac

SEQ ID NO: 24316 - DNA, 1197 bp, Mus musculus
acctgggtcctctggtagagcatccattgttcctaactgctgagtatctctcctgcctaggactgtaacttctttagtaacagtaatgtatctcagatgggtttaacttgtatagtataccctaaatctgagagatcaggtgactcctctggtgtgggaggcaagtagtgctcccagtttgtgtgtggtccatgtgggtgctcactcctttgccatggtttaggtctcttataacccctgatctttgccaagttcaggatttggactcctgtcaatctaaagcatgatcataagagcagacacctcagtctgtctccagaccctattatgtggaaaagaatgcagccttcctagtccattctgcattgtgccccatgacactctgagcccctgaatctgagtggtaaattctactccatctgttctgttagtaagatgttactctacgcttgtgtagctaggacgttattgagatgctgagaggacaggcttgtgttcgggttgttaactggtgtgtttttattgacagcaattgaacctggccatgattaattatgtattagtagtctatggacttgccgtttctctccttggaataggacgaccagaggtaagctgttaacagagataaatgactgaaataggatattggatgtggaaggtgttttgaaattgtcctcttattttggctcatttctttcttgaaagactaaaatagctgagtttaacttagttttttgggggggtgttgtgggccttgaacacagtcttgctgtctgcctgctttggtttcaagcttgctctcctcctccttcctgattctaaacaccagcgtaagttgatgggtggattgctttagagttaagtttggcagggtggtgattcatggctataatcccagttcagaaacaaaaccaggagagtcataaatttgacaccagcctggaccaagacccagtcttcaaagaagaaaagaacattttctttgctttcctagtagagaaaagctatacttagcaatttctaggagtctacattttacacacagacaaagtagatttcaaaaatgtattgtcaagggaaagggctagttggagcaaaacatcattgtgagtctgttctgtttgtttctgcaagcagtaggacattactagtaagtcccttagaccatctccagaccacataaagtaaccattg

SEQ ID NO: 24317 - DNA, 1201 bp, Mus musculus
ttccagccatcctaatgacctcaggattgccaggggcttatccttcttttcactgtcactccaagcacgggtgacagaagagcattatttttaatggggaggggagatcttcatggctctagctaggagggaggattatgtgggagacgggtaagaaagagtgagcaaggggtacaagcaagtggaagtttccacacagcttactgttgtgtctttgaaaatgagagttttatttacattaagttacagacacatttacacttttgaaataattggaaactaccaaagttttaatttcaatctatttctggctgttaaaattttttaatactgtattctttttataagaaacggagtatgcttttcagtgttgacatttggcatttttgtgtttatataaattctcattaaatccagtggtgggtttttttcttccatggcattttagagtagaatactgttatttttaaggtagactatttttgtcatttatgctagaatttcatcatttttagggtaaaatgtcattcctattttgttttcttttaacccagccaatgttagtgggatctggagctgcatcagtagcaccgagcagtgaggctgtcactccagaagaccataggtgagtatagctcatcactgcctcggtgtaatgcaagcgtttgcactaaaactcagccagtttacatagtcttgtttactcccttctcttcccttcctggaccaattacgatagtctaacatgagtcagtgctatgactgtaggaattaaaagcttaagaattcagttcagccatgttaaagtcacaggaataggggaaggagagactagagtaaaatcataagacagacaaagtaaaatatgcgacatggaggtgtgacagtgtcacactgacccattttatataattagtggggctcagtttataaagtgcttcctgcgtgaagaagcatgaagacattcttttaagtggtggggaattcttctaatctgaactaataagatcctgttttggtctagttgggctatccaaggcaagatgctgaaatgaagcacttaaaaactgtggaaatctgagctggagggatgactcagaggttaagaatgcttgtttttgcagaggacttggatttgattcccagaaaccaaccatatggtggctcacagccatccatactccagttgttacagatctga

SEQ ID NO: 24318 - DNA, 1681 bp, Mus musculus
cgcctttagctctcagtgcaagtgaagttctgattgttgtagcattgatttcagtcagccctatgtttcctctggattgtattgatgagagggtttgatatcagaagtaaaatacttgccttgggaggaaaaatccaaaacaagtactttcttgttgtaacccaatgtaaatttatttttccaagttatttctctcagttgttggaagagcacggccccttggatatgagtgacaggatgttctctgaggaatatgagttcttccctgaagaaactcgacagatactggagaaggcaggagggctgaagtcgttcctcctgggctgtcctcgatttgttgtgatcgacaactgcattgcattgaaaaaagttgcctcaagactcaagaaaaaaagaaagaagaaaaacatgaaagctaaagttgaagacatttcaaaaacaggagaatatttacgagttaaactaccactaaatccaactgctagggaatttcaaccagatgtaaagtctgaagcactgtctgaggatgtgaagtccataccaggacctgccgactcctcaaccctagctgcggaggatctgaaggcccagctggactctgatagctcttctgggtcagcttcggaggacagcagactggaagtggcctctcctgactctcctacaccactctgtgaggatgcttctccttcccccacgccagctcctgaagaagccaaaccaacatactgggctcaatcacacttggtcacaggattctgcacataccttccttttcaaggatttggcatcacccagcgaccagcgtacattaacatggtacctagcctgtcgcagttcactagcatttacacacctttggccaacatttcttctgagtatccaatgcaaagatccatgccagtggtgccatcttttgtagccagcaacagagcagatgaaaatgccgctgcatactttgagagtcctaatctgaatactgagcacgactctggtgaccacatggcctctgaaacacagatcctggaggatactttgggagtgtgtgtcaggtcccagggcagcgcagctgatgctgatccagctctgagtgagcctgagggaaacagcgaacacagtgggagctctgacagcctgtgggaagcttctctagaaaatgtcagtggaacaacagatgctccagctgctccatcggttgccatacaggtaagtcttaaagagaaaaggatattatttttgcaaaaagtagtagttggcttcatagtggttgtaaatacttttccacctgtaaatacaaacgcctgtgaaagcatcacaagtgtttgtgttgtcaggaggacatttggatgaggtgaggcatagtctgtgtcccctaccacagtctatactggtaagaaatatggaatcagagtcagcacctggagccaaggcatcatttctatgattaataaacaaaagagtataggagtgttgcggctactttatagggaggtacacatactcccaaccacggtggcttcatcacattggctgatgcagcattcacagcccctggtctgagctgattgccccatataacactggacacactgcacactccccagaaaataaagagtctgtgggagtggagctcagtgggagaacacttgcttagcatgtacaaagctctggattccaggca

SEQ ID NO: 24319 - DNA, 1437 bp, Mus musculus
cgtggctgctgcaggatactctgagatgagcaggttctttggaaagaactgctgagctcctcaaagcagtgctgagattgtaaaggctctcagcctcctcagttcctcatgtggcactgtagcatccccgtcataaatttttaaagtgcttatgattcaattaatctacattttggtaatcaattataaaatactttttaaattagtattggctattttttttttttaccctgggaagatgctgtctgctcacaggagtcccacacttggcacttacactaaggttaccatgtaagtctcatgagtcagcagtgcttggaagtgcacagctggctagtgctgaaaacaggacatagtgcccagcgcagggcagccaccctcaccctccttccttatccttccaccagaagagaaatgtaccacagtcctgatgtgttggtgttaacattgttctgtttgacttttgtgtaaagtaatgcatgcaatcttgtaatgtggcctgaaaacaagctaactgtattagaaactattcaaaaactaggtatttttagtgacctgtaggcagtggcaaatacagacatgtgaaccttgaatacattacatttctctcaaacacaaagaaacaaacaaaaaacttttccagcgtgttctctgctgccctggagatgccgtcaccttccacccgtgtctgtgtgagttgtggtgtcttagtgacttagtatgtagctcactccttattctgagacattgtctgtggtgtccctgaaacatggtgtccatgctgtaacagtggagtgcagtacatgcctgagtacacacagcagcttatagtatctgtcgggtacaaagaagagtagctgttgagacagagagctgtgcttcgtgtcagagcctgtgaacatgccttacacttgtccagtaactgtcaataaagaacattataaaaggtcagccgttcactgtcgtccttgcccaggtcctttagaattgcattctgcgtgggagttcagggtcctgttctgtcaaacattgagaaactgactttatttgggaagaacaggcaagttgcacctgatgatcttaaccaaggatcttggggttattttagaggctggattaaaacatccctttgtgcctagatactgctcgccaagcccgagttcccaaggctgactgtttaaatcggtgactaggatgttcatgcagaaatcacagactcgattctcccgttcatgtgggcacatgcaaacatgctgaggataacttgatttcttgcgggtttgtttctgaggcgcttgtgttcgtggactgctgaagctgattgatagtgcctttttaaaggctcttttgggtatgctaagcactaataaaggaagcacggtctattaatacattttactaggtatagacaggctaatgttaccaactgggcctgtc

SEQ ID NO: 24320 - DNA, 1166 bp, Mus musculus
gggattaaatgtgtgtgccaccatcacctggttctaggattctcattagaaagtggaaagtactgttgagtagtcccggggtgctccttttgacttagtgctctagtgataagacagagaagttagtagtgcagtcactggtatggagacctcactggctctacagagagtgcagggcgacactgcctgggtcagaagcacagaatcccaagcagcacctggacactggcttactgttaggactctggtttccagtgctcggtgtgagtgagcatctctctcttccctacagagtttgaggtcaatgtggtggtcctccttcatgctgaccacctcatcactgagaactttccgctgaagctctgtcggacatagtccagctgcaggaaggggagagccagaatggccatgtggacattgacccagtcatctgctcacatggggacgtcacacagaccacctgctcacaggcatcacatcagcagcatacatcttcatgtcttctcatggcctcaaagcttgttccctgcaggtgccttacctcagccctcacgtctggaatgcaacaggatttctcctgtgtgttgcaagatcacagaaagcgttcccaatggctccagatgtgcctgtttcttcttaggttcattaagcagtgtgtctgcacattaagatgggctgcctagtgagatcatggaggcagaagagagcccccacccctctatcttgcccagactcctgacagcaaagagtcagcaaccagcaagctctctgattgagtctgtaatcccctccaaggagtgacagtgacttcatctgggaatacggagttttcccttcttgacatcttgatagtgtttcactaaagcctctaaatgttttagggcactggaaataaaaaccaacaaatagtcctggttctcacagagggagaatggtgaacagtggctgttgctggagtgtttgtgtgtgtggtactggcacacagttaatgctgccatattcccagaatgtattgagagacaaggtgcttgcataaggggaagaatgcacatggactactggtaagtactaggttctgagtgacaggacaccgtgctgaggaagggcaatggccttggcctgtccctgaccccctgggtcacatggctttagcctcacactgtaac

SEQ ID NO: 24321 - DNA, 1194 bp, Mus musculus
ccatcatggtgggctcagcagccctgaagtggaagtaataaacaggaggggctgtgagaaaagtgaggtggaccagttggagaacaagggaggggtttatggtagtatgtgaaaaatgtctctgaactttatctacaaacagtatggtatcttatacgcagtctttcctacaggtaatttttattacctaggccttgataatcactgtgaaaagtgaactaaaattcttatggtttgtgcaaattgtataagatcataaaaagcagtttatttccttagataaattatataaaacttgacagtttcatgcttacttgatgcctagaaatgcctgaaatgtgtattggtcataggcacattttaaaactttttttcttttccacaataaatgtctacatatattttcatttgctctaagtgaatagagattatttaaatacgtgtaaatgttagtaatttaaattgacaaatttgaaataatttatcagtgttttggggttgtagttatattagatactcctcagttaggggaaattgtcttacaccatcatatcttatcgtaatttgtttttcttcacacagtgttatagttttgccgctggactcttccctcccttcccccaccccatcaggatgatatgagacttgaaagaagacgatgcatacaggtgactcaagttttgaaatacagtagagctatggctgtaagacaatgtggggaccactgagagtgtacctgggggggacttcagataacattgagtggcgggaattacttaggcaagtatgcagaggtggaagatactgaaagtgaatctgggtctcagtttcatactcagttttaatagtgatgtgaacagtaagagtaattcctagtagttgaacttttaaaagctggctcatacttttaaagttgaaataatttgttttaaaaattaatagcatttactctagtggttaaatatatgtctccctgtattcctgtgagaacgtaacagatcttccatgggaatgcgtgttaagatgatttcagcccgacaagtaagagtggttatggttagcacagcactgcgtccgttgcagacgtgctggctgtggaggttgtattttgtgttccttttctccctatattattgttaatgtagtttcctgcctctttcatccccgtggcatttgagtttcttgatggaaaag

SEQ ID NO: 24322 - DNA, 2837 bp, Mus musculus
tgttcagctgttggtcttggtcatttgccaactaattttaaaataaaaaggcactgcacataatttgcataaagggccccataagggtgttttgttttgttttcatttttattttttccctttttcccttgttttgttttgtttcattttgggctgggggtggggtgggaaatttgggttttttatgtcctctacacacttgggcacggaaatgcagtactgtaaggaagagggacctctagcacacacaaacatcatcttcagctgtgtgaaagggacgattgtgttgacatttgtaaggcacattaagcatgctaagtggcggggatcaggactctcctatctgagcctactgaggagcaaagcagccattgcatgggatcctgtgggtctcctgctggagaggccacaggaggataggatggaacgtgactggtcggtctccttaccaaggcgcactgagaagcaatcagcgggtcggttgtggccagtcctggggaggtctgagtggtggtccttgggataacctttggccttacggatttggactcggagttagaagagcccaccatttcagatgcaatcacttgtggacatgcgtttgcagacagtccttaatgctgaaaacacagagaatgggtaattcaagaggcctttcttttaaaatagacttttgtgacccactaattgtaaggtattgcaaggtcactttgcgtgtgtcataaagctgactcccttcttggttgaaggccacagaggtagtggtttgctttgatggaaatagctacagctgtgtcccttcctgcttttcccttttctttggctttttctcggcacgtggtgtctccaccatttcttctgcacaaagacgtcttctgttcaccctgaacattttaaaatgcagaattttatgtgactgcttttttgcctcacaattatgctgtgaattttacaaaaatttattttcttttttgataatttattgtaccaaagctgtttttatagcacatagatgtctgtaaccaataatgtcgcaggcctgcactttgacacaggtgtaacgagaccgttttaaacgtcagttgaaatgatggctgtactattgcttaaacaaaactggaactgttgttgaatccatagccaatacatttacagcaatcttgtactggacagaatagattgacatctaattcaagattacaacacctgtcacattctaaatgtgttcaggcttctgaagggaaagggacactggatccagaagctatggagccagcagttgatcttgtattcctgattaacttccttgtaaacttgaacttgagaccttgattgaaccgacaggtccacagtaggaacaggaagcaggcagagctctgagcatgacctgaaggaagcaggctggcactagcagttgccttgtctggagatgctgctgccttcaagtagcacagtctggcagtggctaaatctgtgttcccattgaaattgagcaattttagggtgttatactctgaagcagttgaattgggagaatgaagatagagtaatttccctgtccaggatcaaaagaagcctagaaagaagcagtgatctacctctgccaataaccctgttggaagcaacgcagcagaacaccacggtactttttattgcttaattccacgtggctgactaggtcaaggtttgtttggtgttttttttttttttttttgtttctgagcaaaagcaggtttttttttgttttttatatgtaaacaaaagaaaggcctaagctctgtgagtgcaagtggagactcagagagccccgtttctataaacacagacacttcaggtgttaatcaggaaacccatattgattttgtaattaaatgtcaagcctgtggattgttttgagcttggtagttgatgagcatttccgtacagaggcctcaccttgagcacagcactgtcaggagggcgcagcgcctgtggctgcggagccccaggtgccacacacccaccccacgtggctcaggtcattctttttttctttctgtgctggttgccacattttagcaagcaccaaaaaagaaagcagtttttaaagctatatttacgtaaagagagccacacaatccagtgcttctgcataccgtgtcacgttacagtccagttttgtgtgctttactacacagtttggttacaggacttctgtgcattgtaaacataaacagcatggagaggttaaatacctgtgttcagattgtaagatctagtccagacttgctgtgtatattgtaacgttaaatgaaaaaagacccccctttgtattatagtcatgcggtcttatgtatgataaacagttgaataatttgtcctcagagtctttactatgcttttttaaaaattaacttaaggaaaaatgtaaacagtaaaaaaacaatcttcgtgtgcagtgaagcgggtccgggtgtggtaggtaaagcaggcacaatcctgtcgcctatgtaaagggaaaagacttgtgagacagagacattggctgcaagtgtctttgaaagtaaaaattggaggtttaacagataatttggtttttaaaatggattctttacctgagtgattatcatgttgatttgtgctcccctgtggtactgtctctgtgttgagagcacgtgggggcctgtcctgtggggatgaaggacagaactgagtgccatctccctgagtctgctctgtccctttcctgtgcagagcccggaatcctgccgtgcggaggcagtttctaacccacagccctctcttttcagtgctagcctgcacagggtctgttgagtggccttcagaaggtaagaaac

SEQ ID NO: 24323 - DNA, 1175 bp, Mus musculus
atgtgttatgtgtatatatgtgtgtgtatttatgtgttatgtgtatatatatgtatgtatgtatatatgtgagtgtgtatatatacatatacatatatacatatgtatatctacatttatacacacatatacatacacatatacatatatgtgtgtatagatgtagatatatgggtatagatgtagatatacatatatatgtatatatcagtgctttgccagcatatatgtaagtacacctcacttgttcctggtgcctgtggaggtcaggaaaggacattggatctcctggaactggagttactggtggttgtgagccaccatgtgggtgctgggaactgaacctaggtcctctacaagagcaatcagtgctcttttgctgggccatctctctcctgccccgactttctaaggtctgagtcaggattttgtagtcagccttgtgccatgaaccttttagtcagctttgttaaaagccactttgttaaaatgcagctaacaagatatggtagcctcaggtctacactgtgctaacccgtggtatcttcattagtgttctgcaaataaaactgggtgtctgcccaggggctgctgtaacttctaagtggatccacaccacaccagcattatgtatgtcatctccaacagctgtatgcaacattcaagtgactgacgctcagttctgttgtttgtgaggggaaaatcccaagcacagtgaaaaaagaagaatttctttctcattcagtgtggctgtgtggtgctctgaaggagactggcctccataggctcatatatttgaatgcttgttctgcagttggtagaactgtttgggaaggattaggaggtgtggccttgttggaggaggtgtgtcactggggatgggctttttaaacctcccccaccccacccccgctcctctctccctcttgccttccttggggttcttgtctcaatatgtaagctctcagatgctgctccagcaccaggccttgcctgtctgccatgctccccatcataacagtcatggactaactctctgaaactataagcctccaataaactcttccttctatacattgcctttatcatggtgtctcttcatagcaatagaaaagtaacaaagatgggggaatcctggcttctaactcagagcagggccttgtactcacccctcc

SEQ ID NO: 24324 - DNA, 1132 bp, Mus musculus
cttcagctcgcttctactaaccctggaatctgagtcttaaagacaccacactgagaatcttgtgtgtgtgctatagttacacacaaagtgttctagttggtatacatctgctttttatttatttctttggtttttctagacagggtttctctgtgtagccaaaggatgtcctggagctccctctgtagaccatgatggccttgaactcagaaatccatctgcctctgcctcccgggtgctgggattaaaggtgtgtgtcaccactgcccggcattcatctgctttttattaaccagtgagtatgtatgttaagattgatatgctttttcctcccagtagacttgaagcatcgtttttctacattgtgagagatttttaaacaactttccaagagttttgatttttaaaggaccctctgatccccaaacattttaccctgggcaatgcagtctccatttcctcacaagcaaatctagaatgtgtttttatttcccactgaggtgccagttaccctttttctcgtgggagcagcattcggtggagctctttgtcttccagcacacaaaccagaaacacacattcttcctgtcattaaagtagaaaacacggtctatgagttacatatggccaggttttaaaaagcctagccttgcagcctcactcatgttctctgaatccgcttgcagtcatcaaccctggagctgtctgtgcttcacccgcagctctgggtttcctccacgggtgggtccttgcaggagggtcgccgggtgtggagcgggcgctgcgtgccccggttaacaggatgacggaagcgcgccgcgggacatttctcgcggcggaccggaagctcttaggttctcccccctccccccacggaaggcgtatcctcgctcggaggcggggtgggggcgtggcttggagggggcgtgactgcgggccggcgcgcatgcgctgtctggccgcgcggagctgagggaccatggctgccacgttctttggcgaggtggtgaaggcgccgtgcagagctgggactgaggaggaagaagaggaggaggagcagagcaggcgggacacgccggaggaccgggaggtccggcggcagctggcgcggaagaggtcaggctcccggaag

SEQ ID NO: 24325 - DNA, 1159 bp, Mus musculus
ttccctacttagggcataagttaattgaagttcaaatctactttacagggtactttaaaaaatgttttccatttctgcagtttagcttttcccctttcttgattggaagtaaaatgtcttaagagtttgtctttaccaggttgataaactgtcagcacaggctcttccaccacatctggagtaaccactactaattcttccaccacatctggagtaaccactactaattcagcattttcttgggaagagagattttagttgtgatggggttttatctaatactgggcatgaaccagctgacttagttttcttagtatgcaatgcatggatgtagttatttggctgatactagtagaattctttgaggggtacccgcttcccttttgctatattttgaaattgtacttattttatcctagcatttgctcaaaatagatttaatgttcatttttgcatttggtattcatggagaccccagcttataagtttctacttttaagaaagtcctctgaaggtaaaaacaccaaggcactttgtttctacagagcctaatgagttacgtcagaccagcctagtaaaaaacattggaagttacataaccctaaccctttgagggaatagtctcctgtttggaagagcttgtagatgtcagattgacctttcaggtggctgggaacagtctgggggctctggaagagcagccattgctaccttctgttttctgagctggtttctctatgcatttctgtctgccctagatctaactatagaccaggctggcttagaactgagagatctgccttcctccttccaaatgggagtgctgagattaaaggttatgtgccgccaccacacctggtgcaaaactatatttatttatagtcaggtgacatgtgcaagcagccaggccaagcttgcttgatgatagctgaccaaaacgttgcctttttctgggactcagtaagaaagacaaaggctgccaagtcctccagatgcctatgtgttttttactttggtgttctacagcctctgtattgatgtggctattacattcatgtctgactcttcatgactgtaagactgattttaagaaatccccaaactccagctggtagcagatagatacatcaaagcacttgaaacttgtgtctttgagact

SEQ ID NO: 24326 - DNA, 1062 bp, Mus musculus
tttttttttttacttcctttgaaagattactattaccaagcatattaagattaaaaatagatttaaaaggatttcccacttatatcttattttaaaaggtatactcacaatgtgtagtaatttatgaataaaaagaaaatatatcccattttcaggtagttcctagggtggtcattgctttttttttttcttttctttttagtggaaaacctgatcaaataatgtctgaagttagtgtgatgttggaaattgtgatataggtctcctagagtaagacatgtttttgcaaagcacttcaagacctagaaaaacaatgcatcgggtctataaataggttcattcaacaccactagagggttacatcacagacaggttcatacagtactgccagagagctgcactgcccacagtcacgtgtcactatgcctttgccctcatttgtggcttttggggtaaggatgggttcacaccacagcctcagtttctgtggtgctctttttcttaaatcactgtactgtgtgataaaaaattgacctggattttactctcgcgtcactgcgagttgaatgtaattgtgtcagctgacaaaagacatctgaggtttgtaatggagcagaatgcagaacattaaagatgcacgggatgttttatttccctccccctccagtgtcctgattctgctagaaacaaactcacaggctcgagataggctgtgcttttcctcaatggtcgaagtaaccagctcaagttttgatcattaagccagcacatttcagatatcttacagctattaccaagtccatgctgttttctcatggtgtagatagtatgctggagtgcaaaggagcttggagagccttcctcctgttagtgactactgaagcttagaccctcagctttggctgtggaccctgatcagcaccataggtttacatctgtgtccgcccacccagtgttctgtaatgtactgaccaaaccagctctggtagagcaaggagaacatgaggcagtgtgcactcttacttaactgggttagttgtgagtctcacatacagctcttac

SEQ ID NO: 24327 - DNA, 2291 bp, Mus musculus
ggtcagtaactgactctgatgttgactgtaccgataacacacaaacccaaaggaagaagaaaaggaaagggaaagcaagagtgcttagcaaaggtaaaccctcctcatccaactcacctaaaactgcaagacatccaaggcagagtaaaggtcctaggttaaatgtggatgacaatgactgggaggatttggactatgcaaaagctaaaggagttgtccggctctcaaaaatccaaacgagaaatcagggtaggagaacggtgagataccacgatggggaagatgatagaagcatagagagcgcactagagctcactgaccgcaccttacgcccttgagatccagtgtgctcagtagactgactggaatgtactgtgaaagctggcttacaattcagggaatatatttatatttttctatgaaaagttgtgaatgtgactaaatcatgactgttacttttatttgcacttgctggttttgaagcagcattcagcacaggtgccaaaatatgctttattttgggggcagatgtactttgacagtattgactacacatagcaagagttgggagacatgttcaacactagacaactgggttatccaaaccagtgagcattacttttgtggtagcagtgtcacacagttattttctgaatttatccagaggtggtagtttctaagcccctgccgtgcagtaggagaaaaatccacgtggcctatgtttacagaatcttgaaaaatattatgataatcatggcaagggtaaccatggttagtaggcaaggcacctaccacttttttttttttatcttttccctggagacttgagtagaacacattttaccttatatatctggttatttcaattgacatggcttctactcctcgccccccccccccccaaattcttgtcttttttttctttaagacaaacctgatgactttcatgtttataaacttgaatttataaagtgcttgtaaattattttacatgtttggagtgcatattttaaaggtctaatttgagacgtagtcatagtattttcttttagattgtttactgacaagttgttgctttttgtccaagatctactttccattaggattcaccaaattcttgctcttccataatcttactctgaagtagagaagtttgtgtgccttagatttagggaaagtgttctttaataagagtgcgtagggctaatggtatttcagttctgtatagatttcactttgtcacactgtagagttgagagtgcagttgtaaatcctacctgtgtagggaagcagcttttgttgcccagtgtaccctaagcatcctttctttgggacaactgcgtgagtctttgttgtagtgatccccagtggaagcaacaatgactcttaggtctgtctgaagggaagcatcccatcatcccaagtcccacagctttaaagacactgtttgttagccagggtcttgtctttaatggactgattatttgtggtctactggtgtcgctcttcccagtaagtttctccttggaaagcttcccaggagtgaaaaggatgttgtagtgtgcacttgtgagtgctttttgacttagttgtgcttgggttcatacacaagctactcttgtctccattttcctgaggtggcagcatgtgctgctctccagtgtacgcttactttgtcttcatggctcgttcgtggacttgatttgacgtggtaggcatcttctcatgtaagagagaagatggtttcgggcgtttccagctgtggttggtaggtgcctctgtttctcttggatagagaattctctgccaagctgctttccatagagctcctactagacggatgtgaggggcacagactgggtcagctgtctttgactattgactgtaaaagcatttgattcccgttatgttcctcaggattgtaactccatgtttatcattatctgcaagaaggcacccaaaatccacaagtatatatgacatgtactcttttacaaaaaagtttgggttttgtacacagagctgttctcattttgggactaagtgttaactggttattgtctagtcaaacactcctttctaaacctttggtccagttgtgtagaagcatggtttggtttcatcagattagggtccgtcttaagagcagacgtggacctggtgaccctgttgtgtggttgactgtggctctcagcttgtgaagtcaaggtgtgggcttgtgaggaagaagtattttgctttccttttttcctttttggttatggtgctacttctaacattaactttgacta

SEQ ID NO: 24328 - DNA, 1099 bp, Mus musculus
tgaactcaggaccttcggaagagcagtcagtgctcttatccactgagccaactctccaggcccccagctatattttaagcttctgaattttatcttttttttttcttttttaaaccattgcatagtcaaagatactgcaagcttctatctttagagtggtgagattgcacaggtgtatgccggcacgcaggtctgtgggattctgggaacaactctaagggttgtactaggtttcagacatttaccaactgagtacaccccagcccttgactccctgttgagtgtagcttcatgtcattcatggcatcgtggacatgtaaggcagtgtgggcatgaggctcatgagctgctgtggcctgtttttaaagctttccaaggaactaaaagtaaaaaataccgacttgagttaacaaaattatttttaatctttgtctcctttaaagccatttaaagttgactccatacaatggcaattttgtcatactgatgcccatgcttcttcatgttgtagtccaattcgatggttttggtgtcccagtctagacaacggacgtgtaggcgtaaatatgcaaattatagtagaagaaacgctgaccagtgtgaattatcttctggaaatgaatcttcaggctctgttagacatgtaagtagaaagactgcggggtcacctaatgtgggtttgcctgactcttgtgtacacacacacactgttagggattaaagaggcctaggcatggtaggcagattgtgagagatcacccctcaggccttctgacctcttgaccttgaggaagggtcttcctgaatcctaaaggggtcgaagggcctttggacttggggttgttcctgtctcccacatacttgcagtctgtgccaacaggttctgctgagtttgtcttaggtctaagcatggcatggtatgttggtggaatcagcctgtagtgtagcctgcgtgaaagtgctctgctgtgacagcctgtgggttctggggtccagctgagtcagtatgcctgacagcaagcacctttaccctctgaatcattctttactttgagatagagataagtcacaagtttggttttgacccttagccagctgt

SEQ ID NO: 24329 - DNA, 1102 bp, Mus musculus
atctgaaagcctttaggagcaagcatttgctaatttatattagttaccttctggcctgtaggatatggctggtttctttcccacagtgcagttttaaaccttgattttcatagattatatttcagtgtctgttgagttagaatttaaaatgaacaagcttaaggtagagtttgtgctactgctaatcttctgacatctttacattttctacccctgcccccacccccaattagttacatttttctcctcttgtactacattgttttcctaaggttcagtgtgtttgtgaaacaactgagtttgtagtgttatgttttgtagggccaggcaaacaatagtaaatcaggggttttacccatctagccttgtcctgaataatctgaccttgaataacatctgtagatcaggtccatcgggattggtactctaaaattagtttgtacttcacttgatgttcgtgatagcacttggtagctagcatgtgagtagatgtttctgaatgctttaaggttcttaagtggtagccgagatggaacagcacggatctggaggtttgagcagttggaatggagaagcattttactggacatgtctgccaggatctcggggtaagtcattgaactgtttgtaacacataggtgagttgttggtgtgttactcacacctacatactttgttaattttgatggaagagtttaatatgcctcctatatatgatgaataactattgtctaagtgtattgacttgtgtttttaaatacttcaatctcataactgaattaatgaaggaaagtgcacctgtatatttaattactttgaccaattttgtccgaagatagaataaaggagaaaggacttacttgctcatagtttgagagcctcaatccatcatggaagaagaatgtggaagagcagagcaagtggaaaacacaggacaagggactagcctaggacaggatgtaggtcccttgactcatacccagtgacctgctgcctcctgctaggctgcctgcctctcttccatgaacccagcttgtgattgacctgttgtgatgagacagtcctcatggtctgctggtctatcagggatacatacagaatt

SEQ ID NO: 24330 - DNA, 1176 bp, Mus musculus
gtgtgatatgctgtatgtatgtatacatgtgtctacactgctaatgggcacgtgtgttggttctgatgttagcatccttcaattccatcatgattatttctgttatgagctgttgctgacatgatgctacctcttagatgctccagtagtacaaagcctgactgagaaagagcaccctgcttggtttcctgccagaccagcctgccggccttagttgtttcttagtgcctgatagccttgcctcattggctctaatcaggaaactgtccctgtttgctttgtaatcattctgtagtcagttgtttcactgcagttgcttgggtagtgcatttcctttctcctgtgtcaagctaaagctcagagttgttctgtgatgaggcctgcctgtgtgagaactgtctgaagagacttcagcgaggccctgtttctgctcgtgttttgtgctagtgccagaggacgccttccttctattcatgtgaaacacggcatgcctgtcagttaggggcacctgagctccgctcagtagaggtttagcacgatgcctctcccttgcttgtttcaaagttgtgaagcaggagtggagcccaaggtctgtgtgttggcctctgttcttctgtgacctccagtggggcaggtacttcccttagtgccgttcctttagttagatccagtggggatgcaactttagaaggctctcgcaaaccctgtgtatgctcttctctgaagagttgccttcgccctaaagtgggaaactatttagcttgaactggtcaattcttcctaatgagctgaaggcaagccaacagatttcaaaaggaatgagtcaagtcaaagatttttagacacgtcaaaatatcttcttaaaattctccacttttgaacactgggtcagttgtgataagactgctcatttttaatgttgtatggtattttgcattgaaaaataaagttaactcggtattacagtccctataagcaatgatttacatggatctctttaaaggtcctggaacctgtgagcctcagttacctcatttgtaattagcagaaacacctacctcacagggttgttgtgaggactccatgagctgatgtatgtggaaaacacttggtggattgtaaagtgctgtgctgtgttactgctgtatctgagatgttttaagttcccctcagaaa

SEQ ID NO: 24331 - DNA, 1069 bp, Mus musculus
gtgtgtgcatagaagcaggtatgtgcctgcaatcccatcttagacagctgaggatgagggtctcgaatggggaggccatatgtagcataaccctgtgtcaaaaacaaaaacaaaacttgtgtcattgaatagtcatggtgctaatgaaggagcttggttgtagattgtttcctgttcatgtgtgatgctctggttaaatcctcagaactgtaaacagcacctccccactcagctattaaaaacaatgaatttatgaaattcttagacaaatggatggatctggaggatatcatcttgagagaggtaacccaatcacaaaagaacccacatgatatgcactcactgataagtggatattagcccagaagctcagaatccttcttagaagggggaacaaaaaacccatggaaggagttacagagaaaaagtttggagcagagactgaaggaatgaccatccagagactgccccacttggggatccatcccataaacaaccgctaaacctagacactatggcagatgccaataagagcctgatgacaggagcctgatagagctgtctcctgggtgcctctgccagtgcctggcaaatacagaagtcgatgctcacaatcatccattggatggaacacaaagtccccaaagaaggagctagagaaagtacccagggagctgaaggggtccgaagccccatagaaggaacatccatatgaactaaccagtaccctcagagctccttggaactaaaccaccaatcaaagaaaacacatggtggaacttgtggctctagctgtgtatgtagcagaggatggcctagtcggtcatcaatgggaggagaggccctaggtcctgtgaaggttctatgtctgagtataggggagtgccaggactgggaatgggtgtgggtaggttggggagcagagggacgggggagggaataggagatttttggagaggaaactaggaaaggagataacgtttgaaatgtaaataaagaaaatatctaattaaaacaaacaaaaaaaacccagcacctccccaaacaggcaaaccattctgcagcctcc

SEQ ID NO: 24332 - DNA, 1211 bp, Mus musculus
gtcctccgcgcgcccgcgccccccagccgggtctctgctcccctgcgggcgccgcggggccgcgcccgggggtggtctctggtggtccggcgtcccggggcgacgggcccgacccccgagggctcgcggtggcggggtggggggcgggatttggcagaaaatggttttgggggcggtgccgggcgcaggcgggggcgcccctggctcgcggccgggctggggctccaggtgcggccgccagccactgagaggggcgctctcatctctctcccttcccgatttgtaactcgagctctcattggtctctcctttctctgccccgcccagactttcagacctcttgttccccaggaatagagagagagtccttagtctcccaaggtggagaaatggccccttcctgtactgtactcccttcctctgtaggatcgcacagagttctccgtggtgaatatgtcagtgcggcacccctgcttccccgacccgtgcactgtgtgttgactgcctttagaaagttggctcacacttgatcttgctgtatgtagcggttcaggctttaagttgacatccgtcagtcggtgtatttattttttgagacagggtgtcattacgtaccactgtcttgccttgaactcgggtaggccaggctggccttgaattcatttcctgcttctgagagctcggactaagctctcagaagcagttgtgtgtgcctgtcttaacatttccgaggagtggtaacttgcggattacatttattttcctttgccttattttccctacttgcttagaggttcttgtgtatagttgagttttatccaggtaacagaggctttgggtgtttatcgttaacgaagcacaaatgttgcaggagaatatcttcgacaattttaagataaaagactcacactgagcatattggttacagaaggttgagatgagtgtgtgctgttgatgtttggctgcacagccccgtttggcttggacttgcagtcctgcttcactcatcctctgctgggtcgggattacaggagagctcactgacttcaccatgtgtccaagaccagtagtgaacaaaaagtcagccagggcgtcagtcatgcatgtgggcagttcattctctataccttgttttccagggctaaggagttaactggataactagagggctcagcagaacagggcaggagtgctaaagcagcggttctcaa

SEQ ID NO: 24333 - DNA, 1566 bp, Mus musculus
aggatggctaagcatggtggcacacactttaatccctgcactctccatatagaggaaggtacatctttgaatttggggccatcctggtctacatagtgatttccaagaccctgtctcagaaggaaggaggggtgggaatatagaagcgcaccattctgtaacagtgtacttgatgtttgctttttctatggtttgcagagtccagcctctgaagaagagaaagaagctaagtccgactaagcatccatcacgtctgtcagtggtcccgcctcccttcttgtacaatccagaggaatatttttatcaactattttgtaaatgcgagttttttagtagctctagaaacatttttaaaaggtgaggggatcccacctcatcccattttttaagtgtaaatggtttttttaagaggttaaatcatttgctggttgtttattttttggtacaaccagaaaatagcaggatactgaatcaggagaggctgtgactgtctcgggggtcaccataacattccgtagatggggctagttttatatcctataatacaaagtatactaaatggcaatttggcgtctcagtcgtgcattcgtgtctgaaatattttcagttctatctggtcccgtgtttctagtagaaccattttgtaagaaagccagtccttggcccttgccctgtcagaactgtgatgtctgtggtcatggcagtccattttcctaacagttgtgataatgtgctgtgaaagatggaagtcctgagtctgttctgtgtgtggcgtaacattgtgaattggtgggactgaggattacaggcatttggttgttgtgagaggtcttgggggaacttgccgagtcactggaacaagttcaaagaaaaacaatacgtagctcttcatttgtgtacatgaacacaatgtgacttcagagtttgggtacgtgaacacagtatatggctctttttgggtacatgtaataaaaattggaatgtctgtactctgctcctcgaccaataaaatctgttgtgaaagagtatttggaaatgcctgattaattttctgataaactctggttttttgagttatgcttttttctttctgtgtggccctcactgttgctctatagaccagtctggacttaactctaggatcctcctgactctgtcttggatgctggaattaaaagcacatgctgttggcagaagaacagctcagaggttaagagcactggctgctcttccagaggccttgagttcaattcccagctgctacatggtgactcatgtgtggtgcgatctggtggcctcctctgacatgcaggtgtacatacagatagagcacataaatataattgtcatgcattgtgtctctggttttttgagaggtttacattgtgataatgactcttggagttgactaagcacttgggtttacaactgtgcactgcgtctggcttctacttccatgtgtgttgttggtgacttgcactgcaagaacctgggacttggtaaagttatctataagctgggtctttgcaccagtgcaagcccttacttgacagatggagacactca

SEQ ID NO: 24334 - DNA, 1192 bp, Mus musculus
cgacgctgctcccaggcgctgccgtagcggagcagggctgcagtgcgcaggcgtaggcgagcgcggaggcgcggtcaccatggcgctgtcgtagcggtgcaggtgcctgggatccagcatgagcgcgtccgagacggaccgctgggcgtggctgctggtgttgagcttcgtgttcgggtgtaacttgctgcgcatcctcctgccgtccctgtcctcgtttgtaagtagctgccgggggcggggagcggccgagcgcggggccttgcgcggtccatgctgcaagctctcttcctccaggtgcctccgagcttctcacagatcgcgaggttgcaaccagctctggagggtgggaggtcccaagccacgcttcgcgacagaggagcagccccggcccagcatcctcacaggtgcctggctccggagcggctgatccccggctacagggagcccccttctgttctgtccgtgggaacaaggaacactacagagcaatctaaacaggccataccgttcttgcacattcaggtttctgtttatgtatggggggtgtttttcctgcgtgtgtatctgtgcactgtgtgctttcattgccagcagagtccagaagagagcgctggatgctctggaattggagttacagacattagttatctgccacgtgggtcctgggaacagaacccaggccctctatagtagtatccagtgctcttatccactgagccatctccagccccaacatactttccatattttactcatgcctgtataatgaagtctgcacacagttctccaaaggactggatgcagaaaggtttagaaggacttttctgtgtactggaagagggattggggactactaactggggatggatgtccccacactcaatgacctgtctgcaaagttctcttcatctgtcctgctatctgtagcctttaaaccatttaaaaaaaactatttgttatgtgagagtttcgcttgcatgtatgtaagtgcatcacacgtatgcagtgcttttgagtccagaaggggcattgattccctgacactggagtcaaggactccatgtgagccactatgtgagtgtgctcttgaccactgagctatctctccaccctcttaatctgtagccattaaagattttatgtgtgtgtgtgtgtgtgtgtgttctgagtgtatgtatatgcaccatgt

SEQ ID NO: 24335 - DNA, 1176 bp, Mus musculus
tagcctatgttctcccaattaaacaagctgtcttattgaagcctgtctcccgagagtctgttctctcctcctgaggtctccttccctgactgtgcctctcacacccacccccacgctccacctcaggatctgctggttgtgaccacaggtcatgttgctatggggtggggaagcagagccctaatgacatgtttcctgtttaagcatcctttataggggccctgattttttaaattcaaagcttttgtatttatgtatgtatttaatgtgcactggtgttttgcctgcatgtatgtctgtgtgtgtcagattccctggaactgggaatctagttgtgagctgccatgtgggtgctgggaattgaacctaggtcttttggaagagcagccatcttaaccactgaaccatctctccagcctcccctccccctgatttttcttttttttttttcttttttgcaaccccacaaaagaaaaacaaaaacttgtggagattgtagcgtgttgcgcagtataccctttgtccacacgtctttgccagcgaacactgtaaatgttcgttgcaatgagtcattactctggtttgaggcctctggcttctgctctccgtcattgggtcctcacctggactcctctggtgtcctgtccttgccctgtgtcatggagatgctgcagctttggatctgcaggatcagccacttcatgtgctcccagagttcatggattgtgtagatgttgggatgggtgggcaagctcgaattcctggatctgggccttgggggtagctgagtcggtcggcctgccagctctcctgcacccataccaccagggcagggtctccaatactgacctggctagccttcctgagtgctacaggtggcaaggagcagggccaactccaggcagcaagggatgtggagggggagggaggttggttctctgattttgaatgatagctctgtgactttttaaaaatgttggcctttaaaaatacttatttttttatgtggatggtgtttggcctgcatgtgtgatgtatgtctgtgtatcatctgcctgcatgtatgatgtatatctgtgtatcacctgcattcatgtatgtatgtctgtgtatcacctgcctgcatgtatgatgtatatctgtgtatcacctgcatgcatatatgtatgtctgtgt

SEQ ID NO: 24336 - DNA, 1508 bp, Mus musculus
aattttagaaaaacccacactttcgtaccactactaaacctcctttttatctcagttacagaaagtgacgcacactagtgatgtagctgtacttgtctcctgaaatgtcacacataagtgtgtggaaagtatcgctgtatgtctaagtttgttcattttttatagtgcttcctacatgtgttcatgagacgacgtgtatttttatttaaagcatttcaaatgaagtctgtctttaaagcattgggtgtttatgctgtgcgcagaatagggttaaacaaggtgcggtctgatccagttcatctgagactccttaggctcatgaagttactaggcagaaatctgccaagtctgtttttttttgtttgttttgtttttttgtttttttttttttttttttgttttgagacaaggtctctcagtgtagctgcagctctcctgaaattatgtagaccaggcttgtctcaaacccacagagatccacctccctctatctcccagatgataggattaaaggcgtatgccgctactgtttttgtatatgccgtcaagactgtttttgaagcactttccctagttacagtatttgccagtgctagtgtgactgtcccaccagccttacagcaggagctgggctcactgcctgcgctgcaagctgcggtattcgcccctggggaaccatagcacagaaaagctccctgacagcactgcaggtctctgcacagctctggctgtcctggaatcactatgtagaccaggctgacctggaatttataggaatcctctcgtctctgcctcatagctgctgggattaaaggcgtagcactgggtttgaaggatcatatttatactccagtgtttcctaatgatctcctaagtagctctttgttttcctgactgtactgtgaacaggcccagtgtgcggcccttggattggttgtagaccgagtgccaccagagcaggcttgagagtccattgatttaaactccgcagatgctgcagatagatccacgtggcaccaagattacttggctgtatttgttgtgggcacaaacggaacatagtagtaggcatagccaacattgccaggaggacctgcccactagctccagcatgctcatcacgaaggaagcacgtggtctacacaagattattttgggacctgaggaggttggctgcagaatctgggttccctctgggtattcagccctcggggtgagggagggtgtgcgctttcctcttttttgcagtgagccatagtctgcaatggcgctttttgcccacatcgtttaggtagcctgggtcagcatcccaaggccacttggaagggcaatcagaagtgcccagaacagatgcctctcatgatttcagctgacctgaaggaacaaatgacttagtgttcccatgtgtgtaatgtggatgtcagcgcttccacatgcataatgtatgtaagactgttagtgttcccatgtgtgtagtgtatgtaacaccgcaagtaggggacagctgt

SEQ ID NO: 24337 - DNA, 1154 bp, Mus musculus
tcttccttccccctccttctctcccctcatccccctcccctcctcccctccctctgttctcctccctttcctttctcttttcttttttcttcccagggaaacattatttttaaataactaaaactgtggaaactagtctaatctgtcagactgaggagtgacaatacaagcaaaggggctggacagacagacacacacaatactctggcaagaggaattggcctttctgtaagagctgaaagcaggtgttcatttcaaagggagattctcacaacacactgtagacctctggctcacaggacatgcccatgtggccatccaaccagctgcttccagacaggctggagagcactcttgctggagagcactcctgcccactccagtgcaggctcccagctctaacacgtgtgctccttcttccagccccctccccccactctctactagacacagttacttgctgtggtgagctgggtcacagcccatggctcattgctctcttaccaatactggaacttctgagacacaaacctgtatttttttatcatttgcttccattttggctgtaaggtcggtcaacctgtcagtcagttcttctctctctgcaaggtttttgtcttctgagagtctctgcagggcttgcaagacgtctttggtcctcagtaactcgccgtcggtttctcggagtttcctggacacagctcgctccttctcctgggatttccggaggagctgtcgaaggttcttcacctcattctggtgcttggctgtgatttgaggtaggttgttctgagagttcacgtatttccctatggctttcaggtgtctaagctgaagctgcttcagaaattggttttctatggcagaggcttccagcttccgatgtacgtctgccagctcgttcttcagctctttgatcttatgaagcctggctgacagtatccgatgtgtcatggtgtctcttctcttggcaatcgtttgaatttgagaactgatcaacgaagcattccagaattgctttttctcagctgggatgtccttctggcctgagtgagcagagagcgcaggttgttaccagtagtgcacagagagaggcatgtaaatatgcacacgttagtgacccccaacacacacacacacaaatgccatgaaac

SEQ ID NO: 24338 - DNA, 1158 bp, Mus musculus
gtatgcatatgtcaggacctgtgcagatatacagtgtgcacatcttgtgtgcatatagatgtatagatttgtagatgtgttatagagtgtatggatccatgggagttagatgtgtgtatgtatgtatgtaagtatgtatgtacatatgtacaggcatgcaggagtatgcctgtttgtacaatgcacaggtgaatatatgttagtatgtatggatccataggaatacacatgtgttagtatatgtaccatccatcatgcaggcatgtacatgtatatacagatgcacaggtatgtagctatgttgatgtgtgtatgtttataggtatgtgcctatgtgtgctcagatgtacacatatgtacatacacttgtatgtatgtacaagtatataggattgtgcacctgtacacctatgcagaaatgtgtgttcgtgtgtatcctgatgcagatgcacacaggaatgtacttttgtgtggaggaattatttgagcgagtcatcaaggtcaggatctttctggagaagtgggtcacagtagtgtagtagaatcaacttatgtttatttctgactagcttacaaataattgagacttagactatgattattttatttggttttgacaattactgggggtcacccctaagctacttttctaactgctggcctggctacctccccagcggtgtaccccaaatacttgctgtttctcctggccacgtgctcatggtacctttcctgttgtggtgccttctctcctctcctcattctctgcctcctcgtccttttgcccagctcaatcaaccaggtaactcaaaaatcctctggcctctaatccctccagtaattggtggttgtcatttttatttaaccaatagttttaaattaaggaataaagcttgcaggacaaaagctggtaaatgtgagaattcactcgtaggcctataccttctggtacagaattcagcattatagaacccagtaacagaccaaacctcaacactgtagctgcagtacttaccatgttataccttggtcctgggcatcttccaaggaagcagccttgcttattgttgtcatgaagagtgtcatcattaaagtgggacagtagtgacttctcatgaaaatggtttctttctatgccaagcatcatgtgatgcaaag

SEQ ID NO: 24339 - DNA, 1202 bp, Mus musculus
acctttaggaggaagaacccagtgggggaaagtcaggtcattaggaaatgccctgaaagggacatttgcttctcagctgccgtgcagggagtggctttgctcaccctacgtgtttccactgtgatgatatgatatgatgatatgccgcctccggccagcagtgccaaccacagactgaatctcctgaggctgagccagtctcttcttgctttcttcttcgtgaccagccactgtcctcatcctggattggaacccacttcacataataccaacctgccaggagtcctgagagttcaggcagaggcatggaactgggttagagttagtaggcccttgcgccagcttctagcttaaatactaattccagcaaaagaaaatgttgtgctgagtttggggactaatgtgcttgttgtttctagcattttaaagcagcatggaaaactagacttagatctccctggattctgtatagtacctttcttcttctgacacattaatggatgtgtcagcatccatcctgatgctattggcccttcccttttttgatcagtaattgctcgtttagccagtcttgagttttcgatggagcttatgctacctgtgttctaatcttaaagctcccggggttgggatgagtttagaagacaagtgagaataacattcaggaagtatgtatcagcttgcatcctttcctgagacaataagtggcagcagacaccagaaaggcagagtgatggtgatcagatggcaagaaggatatggggtcaggaggattgttgagtgggagacaatgggtgtaccttctctccatactgaccgaagtaggtgtttttgtatgtacactataacttaggcatctgatatcccagaaagaacaacacctgcattaccttgtctgaaacacattggataaaggattggtctgtggtctactgtctaatagatggcttttgaggcaaccttcaaaggatacaaggaaaatagaaatagcttgacaaaggtctatgtgggaacaggagaacccataatggtatcagacactacttattacccgcttgggatgataggacattggcacaagctaggtaatgaaggaaagattacagtagaaatgactgcaaggaatccacagaccagaaagggagggtagagaggcagtggcagtaagaaaagtggcttctaaaatagtgtgtatgtttttt

SEQ ID NO: 24340 - DNA, 1136 bp, Mus musculus
atgcagttgtggtttttctattgctttttatactgtatcttgaaagacatcgggctgcaagaatttattttgatgtcaaactctatccttccattcatgtaactatttcaaatgctaagaaactaataaaaaacagtaatcactttttgcagtaaacagttttttagagaatgtttatctcagctagcaggcagatgtttagtgaaataaataggtctttcaccactgtaaatctttagatagtagagatattcttgtaaatgtttttctaattgtactaatttttacaagtatagaaagctcattgttttttgtaattatttaagatgcctgcttttttatgcagttgtggaaagaatgtaaacttttaatatattctttgttaacctgcaaacttgttattgttttctttatgtggaaaggattgagtacctaaaatatgtttttcccactcaaagtaagcaatagagttagcatttccaggttgctagcaaaatatccctttaaaactagttcagatacatttgtagttctgccagggctgcatgtattctgcttttatgttttagactctgtccttctctttcaaaagattgcctggtgctgagtcactgaccaccagaacctgcatgtagcccccactggcactaatgaacgtggtgactgagatgatgaggcctggagataggcctgaagttggtctctgttccctatagttgggttcgtgtgtgtgtgtgtgtgtgtgtgtgtgtgtgtgtgtgtgtgtgtgtgtgtgtgtgtgtgagagagagagagagagagagagagagagagagagagagagagagatagattggtgcatttccttagtacaaaatgagataggcctgaagttggtctctgttccctatagttgggttcgtgtgtgtgtgtgtgtgtgtgtgagagagagagagagagagagagagagagagagattggtgcatttcgagagagagagagagagagagagagattggtgcatttccttagtacaaaatgagtagctttcattcgttcagatttcttcataaatcccatccattaattttattggaacattcaaagtcaatttgttaatttctgatatctgactggtgttttgggggtagttgtga

SEQ ID NO: 24341 - DNA, 1138 bp, Mus musculus
aatgacctcacagctttctggacctcagcagcaggggtttgattctattactattgaagttggactaatgttggtgattgaggtttttggtttctgagtagtgggatgcttgggaagtgggttttttgtttgtttggttggttggttttggtttttttttgttgttggttttgttttgtttttgattattgcagacacctaaatttgaggtaacctttagccatgtttctaaggccaaaaaaacatacaaggaagaaggggagtcatttgcagtattgagtcagattttagactactttagcaataagaaaaggcaagccccaactttagtaaagtatcctaacacttgataagaaaaaaacttggtattttgtggtcctataaaacttcctttttgtatgaaaattgtgagactttaaatcagcaatagtcacacttagattttttttaataaaagaacaatctgtcaattacatcatacaatcagtgatggtctgttctaagggaggcagagcaatagaagcgtgtttgtggggtcctctacagtcagctgcaacagcttagttgtgaaagccgctaaagtctgtggtgtgttcatagcatggctttcaactggggctttagaactgacaatgtctgctctctgtcagcttgaaactcgggtgtcattgagataagcagtgctagcatgaggttagcagagcatagccttaccacatcctagaccaccattctctctctagaggcttcagagattggaggaaatgccgtgttgcagtttccatgtgctttccaagaactgtacacacaacatagacatttcctgcctgtcttttgtgagtacttctgtggggttattggagtggacagcagtggaaatgtcactacatgatatgcaagcgtggattaaagcactagcaagaggccaaaattagtttttgctacttgatttggtaccttagggtttgggctcctctggttttttcttgtttttttgtttgtttgtttgtttgtttttttgttttttttttttttttttttttgctttttggtttgttccttgcaggttataattaaatctctccataggcagaatccaaagttcagtgaaatatttcaaaagacaaagggaagatca

SEQ ID NO: 24342 - DNA, 1112 bp, Mus musculus
tttgtatattaggcctctataagatatggacttggttaaaaaacaaacaaacaaacaaaaaaacctttccccattccttaggctgcctctatgtccaattgacagagtttccccccacttctaatctgctttctattattggcaaagaggagaaacagaatacacaggatgagtattggtctgtaatttcttaatttttaaattatattcttataactcatgtttaaaagacttatatgtttgtctttctgtctccttttatttgtggtgctatctatgttttgtgtttttattcattataatctaattatgttgttgattctctgaaaaatgatagaccctcacctattttcgtcttctgacaacttattatgagtttcttgagtttttgatagtttgggaaacagtttaagtttcctcttcttgattctgaagacttgcctctcctcatttcttggcagctctgtcttcctgttgttgcaatcagcaatttttggagttttgctatttgagtgattgatatggttaacacattttatttgtgtttttaaaactttctgatgtattattgtctctgtgtcctgattagcttcagttgtcaacattttggagcctacagtcatctgaggaagcctcacttgaggtcatgccctcgtcaaaatggctggatgctatgttagtgagagattgtgatgattgatgtgggaaggctcttccactgagggtggcaggatccctcagcaagtgggcctgggctacataagaactagctgagcatgagacagtgaccaagcaagagggcaaggcaggaaacaatgtttgtctatgggttttgccttattttcttgaagtttctattctaagctcccaaaatgatggactgtgttctgacaggaccaaacaagtgaacctgttcattacctgagttgcttttggttagaggatttaatcaaagtagcagagtatcgagtcagaaccaaggggaaaaaaaccttcaaaaagtgattttgttgctgaaaagaaactggacatgttctcctttggaggaatgtgggagatatcaggacttgagatggcaaacagcaaagaaatctgcactcagagcttaactt

SEQ ID NO: 24343 - DNA, 1146 bp, Mus musculus
cctatgaaggcattcagtctggtgaagcctttgtacatcaaaatagtctccaaataatacatactggagagaaaccctacaaatgcaatcaatatggtaaagcctttgcacaacacagtactctgcaaattcataaaagaacacatactggagagaaaccctataaatgtaatcaatgtggtaaagcctttgtatttcataatactctccaagtacatagaagaacacatactggagagaaaccctatgaatgtgatcagtgtggtaaagcctttgtagctcagaatgatcctaaaagacatgagagagttcatactggagagaaaccttataaatgtgatcaatgtggtaaagccttggcatatcatagtactctccaagtacataaaagatcacatactggaatgaaaccctatgaatgtaagcaatgtagtaaatcctttgcctctcatgatcaacttcaaattcatgaaagaagtcatactggagagaaaccttataaatgtaaccaatgtggtaaagcatttgcatatcgtagtactctccgtgtacataaaagaacacatactagagagaagccctatgaatgtaagcaatgtagtgaatccttttcctctcatgagctacttaaaaaacatgaaaggattcatcctggaaggaaaccttatgaatgtaagcaatgtagtaaactttttgcctctcatggtcaacttcaaagtcatgaaagaattcatactggagagaaaccattcagatgtattcaatgtggtaaaacatttgcatatcatagttatctcaaagtacataaaagaatacatactggagagaaaccttacaaatgtaatcactgtggtaaatcctttgcctcttgtggtcaacttcaaagtcatgaaagaagtcatactggagagaaaccttacaagtgtattcaatgtggcaaagcctttgcatatcatagaagtctccaaggacataaaagaacacatactggagagaaaccttacaaatgtaatcactgtggtaaagcatttgcacgtagttgtaatctccaagttcataaaagaattcacaatggagagaaaccttataaatgtgatcaatgtggtaaagcctttgtagctcagaatgatcttaaaagacacgaga

SEQ ID NO: 24344 - DNA, 1161 bp, Mus musculus
tgcctcttgtggtcaacttcaaagtcatgaaagaattcatactggagagaaaccttacaaatgtaatgaatgtggtaaagcctttacacaccatcataatcttcgagagcataaaagaatacacactggacagaaaccctattgatgtaagcaatgtagtaaatcctttgcctctcatgatcaagtttgaaaacatgaaagaatttcatactggagagaaaccttacacatgtagataatatggtaaagcctattcacaatcatcacctccaactacataaaagaacactaaagagtaaccctatgaatataaccaatgtggtaaaagcctttacagtggtcttgaaaggtgtgaatatacttggtctatggcaagtggctgtattaggaagtatggcatttctggagtagatgtggcatttgagaaagtatgtcatggtgggggtggactttgagattctatgcttaagctccacccagggcagcagagtcttctggttgccttctgttcaagatgtagaactcttgtctcctccagccccatgtctgcttgggcactgccatttttttcagccttgatgatatcagactgaacctctgaatctgtacactacccctaattaaatgtcttttataagagttgccttggtcatagtatcttttcacagcaataaaacccaagttaagacaaacagcataaaagataccacactggagagaaactcacaagcagaaagttctctgcatgtttgataacagaaataacatgttttaagtagtctcttcttccttctcttctctccttccatttttcctcgtctatattcctctacatttccttttcctttctgcttctttttttccccatgaggacagtgatgtattaagatagaatcttacggctggagcacctggagggggccatgttgggtcctggatccctcagatactagtctgcacaggtgagagtatggactacagaagcaacacagcttctgggacagaccccatttcaggctccagacatctgggcaccttccccgccagaggagaggtgtcttcctgggagggctctgctggagcacctagggagccatcttgggtcctagatccctcagagactagtctgcgcaggttagagtgtggaatacagaaactcca

SEQ ID NO: 24345 - DNA, 1147 bp, Mus musculus
gattctatgcttaagttccacccagggcagaagagtcttctggtcgccttctgttcaagatgtagaactcttgtctcatccagcaccatgtatgcttggacattgccactttttcagccttgatgatatcagactgaacctctgaatctgtacactacccccaattaaatgtcctttatgagagttgccttggtcatagtatcttttcacagcaatgaaatccaaattaagacaaacagcataaaagataccatactggagagaaactgacaagcagatagttctctgcatatttgataacagaaataacatgttttaagtagtctcttcttccttctcctcttctctccttccatttttcctcgtctatattcctctacatttcctttttctttctgcttctttttttccccatgaggacagtgatgtattaagatagactctctcggatggagctcctgggggagccatcttgggtcccggatccctcagagactagtctgcacaggtgagagtgcagactatagaagcgacacagcttctgggacaggccttgttttgggccttcatcttcagctaggaggcaggtccaaactccagatatctgtacaccttccctgcaagaggagagcttccctgcagagagtactctgaccactgagactcaggagagagctggactcccaggtctgctgacagaggctaacagactcacaggaggaacaagctccaaccagagacaactataacgactaactccagagattaccagatggcaaaaggcaaatgtaagaatcttactaacagaaaccaagaccactcaccatcatcagaacccagcactcccacctcagccagtcctggataccccaacacatccgaaaagctagacctgaatttaaaaacatatctcatgatgatggtagaggacatcaagaagtactttaataaaccacttaaagaaatacaggggaacactgctaaagagttacaagtccttaaagaaaaacaggaaaacacaaccaaacaggtgatggaaatgaacaaaatcatactagacctaaaaagggaagtagaaacaataaagaaaacccaaagtgaggcaacgctggagatagaaaccctaggaaagaaatctggaaccata

SEQ ID NO: 24346 - DNA, 1146 bp, Mus musculus
gtgcctgagtcgtccgctcgaaaatggcggaatacttggcctccatcttcggcaccgaaaaagacaaagtcaactgttcattttatttcaaaatcggagcatgtcgtcatggagacagatgttctcggttgcacaataaaccgacctttagccagaccattgccctcttgaacatttaccgtaaccctcaaaactcttcccagtctgctggcggtttgcgctgtgctgtgagcgacgtggagatgcaggagcactatgatgagttctttgaggaagtcttcactgagatggaagagaagtacggggaagtcgaggagatgaacgtctgcgacaacctaggggaccacctggtggggaacgtgtatgtcaagtttcgacgtgaggaggatgcagagaaagccgtgatcgacttgaataaccgttggtttaatggacagccgatccatgcagagctgtccccagtaactgacttcagggaagcctgctgccgccagtatgaaatgggagagtgcacaagagggggcttctgcaacttcatgcatttgaagcccatctcaagagagctacgacgggagctgtatgggcgccggcgcaagaagcatagatccaggtcccgatccagggaacggcgttcccgatccagagaccgtggacgcggtggtggaggtggaggtggaggtggcggaggacgggagcgtgacaggaggcggtcaagagaccgggagagatctggacgattctgagccgagccctttttaccgtgtgtctgctagacagtgttgtagttggttgacaagccagttcataatgggatttttttaaaaaaaaaaacaacaaagatgggtttctgaataaactttgtagtgatacagtaaaaaaaaaaaaaaaaaacaaaaaaaaacaaaaacagatgtctctctatacctgaacacgaatgttcatgtaagctcccctatttgttctcatccaacagcagctcctttcattcctgaggcatcagctagccgatatttgggagactgtagtggagttccacctgcaaggcgacttcataactttcaccccagacaaaatacatttcatttaactagtcctgtgttttgttctgttcccttccttccatgttccccatccatgtgttccttc

SEQ ID NO: 24347 - DNA, 1177 bp, Mus musculus
cctgtggacatgagggagaatcttgtgaggccaagtctagaccaccttggtcgaagagaccactttggctttcccccagagaagccttgggggcctagagattttgatgagagagagcatcgagttctgcctgtctttggtggtccaaaaggcttacatgaagaaagaggtagatttcgggctggaaattaccgatttgatcctagaagtggtccttggaacagaggatttggtcaagaagttcacagagattttgatgaccgcagaagaccctgggagaggcagagggatagggatgacagagattttgatttctgcagagaaattaatggaaatcgtcttggacgagatagaattcaaaacacttgggttccccctcctcatgctcgggtttttgattatttcgaaggggccacttctcaacggaaaggtgataatgtgcctcaagttaatggtgaaaatacagagagacatgctcagccaccgcctttaccagtacagaaggaccctgaactctatgagaaactggcgtcttcaggtgacgtagacaaggaggagagcggcacagttgctggtgtagagagtgaagcggtggtagaaagcacagagactgaggggacataacatcactcagtaggtaaaagaaaccttttgtacagttgtcatctctgtaagaggttaatggctgactgcaccacacttgttcatgtttatctaccagaactaagttaatctgatgttcatgttcacctttctcttaaaataattgtacaactgacttgtatagacattgttcttaatatgaacatggtaggtaaacactttttttttctgataacgtataaatgttgccccagattcttttaacgtcaaggagatgctaacggcttgtcggagacttcctatggaagagaaggttttagacgctgtcattgggttgggtatggcaatgacatatttcagaacagcaaggtgtggcccatttcctccataactctaggctgctgcaggattttaaggagacagacaaagctatgacattttatgcaaggactggctctagattcttgaggagcataatacagagattttaaaaagtgattttgtaaaaatctccacgatggtctctgttactccaaagtaagtgtgtgtgatttgttcctcatactgcaataag

SEQ ID NO: 24348 - DNA, 1125 bp, Mus musculus
tgaatggaaggtccaagtagtgtaagtggcccattcagagcacaaggtaatttcactaacactttattcttatcagagtacttcctctcatctgggaattttgctgctttattaaatttatcttcactcctatgaaaaattatactttgatagagactgggagcattattgttaaagttactttaaaaaatactttttaattaatttttcaatatattgctcactgcccccctctcggtcattccctcccataatccttaccccttccctactccccttctcctctgaattggtggaacactaccccaccccaccccagcctcccccaccctggcacttcaagttgctgcaagactaagcgctttctcttcccactgagccagacaaggcagcccagctagaagaacatatcccaggaacagacaccagcttttgggatagcccctgatccagtggttcaagggcccacatgacgatcacctagtacatatgcacagagaggcctaggtccagtctgtttaggttctttgactggtggtttattctctgataacccccaagggttcaggttagttgactcggttggtcttcctgtggagttctatctccttaggggcctgcaatccttcctcctcttcttccatgagtccccaagctccatccactctttggctgtgggtgtctgcatctgtctaggtagagcctctcagagaattacgtgccctgtctacaatcataacagagtatcattaatagtgccagggattggtgcttgtccatgggatgggtctctagttgagttcgttattggttggctattccctcagtctctgcttcatcccttgtgcctgcatttgttgtagacaggatatatttggggttgaaagttttgtgggtgggttggtgtttctatcactcccctggggttcttgcctggccacaggaggcagcctcttcaggcttcatgtccccagtgctgtgagtcactgccaaggacaccccattgattcttgggcacctcctctatcccaggtctctgtgtcctcctggaacaaccccccccccccatcagttgcagatttccattaattctcatggccattcagcaatccccctacctctccc

SEQ ID NO: 24349 - DNA, 1144 bp, Mus musculus
gagccttgctttcctccccactccccaaatactttcatctgaaattgctggaatccaccagagtagaatttctgaacacaggggacttgagtacaaatgctctgtctactgccctctctgcctctattgggatgggttttgcctttcccagcagtcctggctatagtggggcaggccaactgaaaactggctttcactgaaggtgggttggtttctctgtcctggtctttaggctgcttccagcattttaatacttgtggaatgttgtagaacacaggccactcaggagtctgaagtagtaagatcttgagttcaactggagtcacataactagtccacgcctttaaaacaacagcaacaacaaaaacagataataagcactattttaagttttctgttttgtgaatgataagttgaagaaaagagaaggtggctgtggggacaaaacccaacaattttggaacacattttgaaataatgcatttaaaataataatttaaaattaatgctgttcagttttaaaaactggccttaacagttgctagaatgtctttgggcaaggtacgggacctctagtccttaacttcttcacagctaaacagtcttcatcactgaagagacctgtagcactcagcgcctgcactgtgctgggaagctgagtaactgcatcgtggtgtgatgcaaccctgggaagtaggctttgtagtatctgctctgcttaacagaaacttagctcacagttgtaagtggcttccttaagtctcataatacgattttgagcaaagtttgaaatcctgttagcagatttaggaatgagtgtattccacttcagcaaatgccaggctatttaggatttacagttgccttagccactgaagttccccttttgtggtcgcacgtgtacattgctattcctccttttgcaatatgtaagaactcactctatatacttgatggtttttaagtgatgttctttcaactgatctgaaggcagacttacactgcaccaacgctaaataaggttttttttacaaaacactttgctcacagataaaatgtgaaagctctctttcattttcctttcctccttatggatgctttgtaactagtgaggacttacgcagatatgcattgaggatgtgag

SEQ ID NO: 24350 - DNA, 1152 bp, Mus musculus
tgatgaccaaacttgagctcaacacttgagctaatggaatgtgcaaagaaaatcaagtagttattgttagattccaacaagcagcctttagttgatgagctgggagctcagtggtgaagtgcctagtatgtacatagctctgggtttgattctccagaatgaaagggaaagagtacaggtttgtaaaggtggagaggacttagtgctctataaaactgtgcagccatgtctgttttcatttactctgtcgtgttcctcctctaccactaccacccccacccccctccaaaaaaaaaaaaaacctggcaatatttatattttctgttttatttgcttattgaacagtgtgactcattcttcactatttcagtggcttaatagacataggcttttaaaagtatagtgtaaccttaaacctttctcaaacttttcacacagttagccagcagtatcaagttaaaaacaaaacaatgtatgtctggctgaaatctgagttaagtgagcatggatgaaaagatccagactgggtagatgtcttaactgtggcctggtaactttcacagaaaccggaactgaacactccgcacttctacacagaggcactttaagttcattatggccagtgtagtcctgggtaccttatggtaattgcaacacctgaggaattccttctgcagagttagttgttagaatatagagtcagagagcaaatggcagcagcgtatggttgttggagttctataggtttctaaaagctttgtagccatcacggattcccaactgtgttgcaggtagaggggtgcctagaaagcttcctccttcagttcattgcctgaatcatgtcctggaagtaacagattcttgaatcagtattgctgaatttcttatgcaatatagtgacgaaatcaggtttttcaagtagattccccacccccaccccctttacaaaccccacatggtacttgaaaaaggttgattcttttgaaattaagaaaaacaaagacttggccaggtggtggtggctcacgactttaatcccagcacttgggaggtgcaggcaggtggatttctgagttcaaagccagcctggtctacaaagtaagttccaggacagccaggactacacagagaaagaaaccctgtctcaaaaaa

SEQ ID NO: 24351 - DNA, 1104 bp, Mus musculus
atggtgttggagaaagagctgacaggcatggcactgaacctggctcgagcttctgaaacctcaaagcctcccccgaccccagggacacctttcttttgactaggccatacctacttcagtaaggccacatctctaatactgccaccctgtatgagcttatgggagccactttcattcaaccaccacactctcaattactcaaatcgtgagaacgagtatagaaacattaatttacacatttgatctccttgttacaggagccacgtgagtcctggcatgcagttatgccaacagtaatagtaccctagaaccaagatgatgagggcgtggctgagtgagcatagcactccactatacacatattaaatattcttttagtctttgtgaccgaaaccattgttagagaagtgtggtcttgatactctgctatctcatttctgtccaccgatggttttagatctcttatcagctgaggaactatgtggtagatatttctttagtttacttactgatttcatctactaatttctctgtctatttattatctatctagctacctaccatctatctatcttatctgtcatctatctgcccaccttatctatcatctatctatctactatctatctatttcatgtagatgagtgttctgcctgcgtgtatgtcgtgtaccacatgtatgcctggtgcccgtggagaccagaagagagcaccaaatcccctggaactggaattaaaggtgtctgtcagctgctttgtgggtgccaggaaccaaacccaggtcctctggaggaacagccactgctcttcactactgagccaactgcccagtgcccagaatgccaggccaggactgcctctctgagaatttgctgaactgaaatcaaggggttgagctgctcatgccccttaacacttctgcagagagatggaagactccccctccccaacttatcctattggtaatggccctggaacaggaaaatttaaattctaaaatacgtctggcaactaagacaggcaacacatagaaaaaattagcaaagtctgttgtaaaatatatattgtaaaatgcgtatgctgtctggcctattgctgtatgta

SEQ ID NO: 24352 - DNA, 1172 bp, Mus musculus
ttgcctcgcccatctccccagccccaccaaatagctgtgtttccttttaattcttaattttgtattttatttttatgtatctgtgtgttttgcctgcataaatgtctgtgcgccatgtgtgtggctggtatctttggatctctcggaactggagttacagatggtcatgaacgtccatgagcgttctgggaatcaaacctaggtctgatctggaagcccagccggggctcttaaccactgagccatcgatccagcctatttttgataaggtgcagtggttttcaatgttggttgaaatacagtccatacccttgtgattgttgaaaagggggtttaagtatcccacactgccttagtgtcagtgaaaaacaaccgatccaaagcatataacccacgctccaaatcaggcctggcttgcccctctttaatgggaccatcgcaggcatgccaaatactacagctagtggattgtatacatctggtaagacttttcataacagctaaggtttgcggcaatgtgattttaattacagacagattgactagctggaaaaatacacgggaactaaacagagagcagagctaaacacaagccctttcataaatggtcctgctttggttaggatgactttaagtgactgctggggacagcaaggatgatgtgtgttttggggggagctctgagggtgggatgtgactcatcttcaacctgggggccagtcgttgtctggagggggagttcacagtggtggtgattagactccttttgaagttcaagcaggctgatgcttgtctcctgttaccttgatccttgggagcacagtgtctttgccagacaaaattgctctggattggaccacatttgctttgaaggcttgtggggatggctacgcagaggtgcagttttgagtctttccccctaaacagactgtattagaccgtgttcttctttctctgaagttcattccgtgtaaagatgtcagatgtgcaagcaaaggcgcaggaagccagctgctgtgtcaagacagtttccctgcctagagcacagggggaccttttccatgggcaggggcacctgactctgtgtgggctggagttatgacccccacccctcccaccttacctaaggtgttcactggaggatgaaaaacctgaccaaaatgcaggccctg

SEQ ID NO: 24353 - DNA, 1755 bp, Mus musculus
cttgctgggctcgctgggccactcactgctggaggatgttctgaggaccttcaaggacctggatgaggctaccaagaaaaaaaaagcacctaagataattaaaatgcaattttattacaagactaaatcatttgattgctgctccaaagggataggtgctagtactttacagattctgaccaactaaatctagttttcggattcacaataaattaaaataacttaaatctttacaggttttgtggaaaaaatatactgcgtaaaactcaaacatgaatagttttcctgcagtttctcttttccaccaatttgaaaacaaatgagcattgtaagcacactacacaaatcatgatttgccatggctctgtgtttcataaaaaccctcctcattgacgactgaagttaagctctggacactgaattctctctccaggaccaagtttagatcaatgctggcagtttctgggtggctgtccagggactggtgacgagtctgcgccttgagcaaagttcctctgcccctcttggtgctgtttgctttccgtttaatggggcaaaaatggcccctgaccagcttgggctgttcacctgactctgtgagaggctgctgcccaactgggtgcacgtcggattcctcagagattttcagtctctggaactgaatctcaatgtccttagtagggctaccctgtttcagagggtggtggaagtcctcatcttcatcactcagaatgtcgctttctttgataagaccatctggaaactccgccaggccctcctgagcgtctttctccagctcggtgctcttagagtctcgcctgctctcggctacggggcagccgctactctgggtgccactgctcaggctgcactcatctgagtccagtgagttgcccttgctgggctcgctgggccactcgctgctggaggatgttctgaggcccttcaacgacctggacgaggctaccaagaagaaaagcacatttttctccacatgacacggaacagagtctgcaatgtagagttaaggccccagggatgacacttgtgtgaagattttattatggggagtagtaggtggcaacaccatttaggtcaaaccatgagtttactgatgcctttacggttttgttgttgggtctcttacatagctccggctggcttcaaactcattatctagctgatgaccatcttaaactctgcctctctattcgagtgctgtgaccccagtgttcaccaccatgcccagttttatgcatgctggagttcacagaatgctgggcaagctctgtgcccacttagccacacccccagacatgtctgaaatgaagttggaattcagctgctttttagattcccagagctttatcatagagatagtacaataaagttccaactaccataagggctagagttactagtttgccaatgagttgattgaacagttaatcactaataaaaattcaagttacattcttttaccttgtaatctggaaatactataccacacctctacacatagcttccccgtttatttccctagatgctgcattagaacctgaaaaaatatccttaccgctcttgagcactgtctatgctggaatttataatcaacattaagagaattaacattatgagcattcaatcatgtgggggagttggggagtgattgtgttctctagaattggaaagggaattcttagttttggatatttctataagccattagcacatttttgataaccacagaatatc

SEQ ID NO: 24354 - DNA, 1168 bp, Mus musculus
tgtgcttaaaattgtttaactcgatcatttaattagaataatatttccttatagacttgcagttgaactgcttactgcttgagcctgtttggggcagttgcattaattttgcatagctgttactattctctgagaaaatagcttgaggggaaaagatttgttttggggctcacctcatgtgcctgggcagagagcatcgtgcctctgaagtgtgtggtggaggagagctgcttacctcatggctaaaagggagccaaagaaggggccaggcaagatgctctcacaggttgcctcagtgacctgctccccacagctcagtcccacctcgtcaagtttccagaatctcctagaatagtgcttctcgctgggtccaagccttcagcacatgagctcatggggtcatttcatagtaaaaccatcccagaggttctggtaagattaaaagtggagataagggtgcctaggagcattgacggtttggtaggaagctggcttctaaagtggattgttcttcctgttaagtcaatgctttcagtggatgtttgcaaagttgagcgttgtggaaggctttggacgtggaattatttcctgcttatcatgtgggaccaggctgtcctgttcatctctgtgacctgttctcattgtgctgctggggtgtgggggagagagtagggtctgcggactgcacacagcggccatgcctgcagcctcttctcagtcatccaccttcaccctgccacctttctagactctggaaatctccgttgctacagacttcctggggattaaaccacccatacatagtagagcaaatgaacaggaaaataatgagtttgaggctggactgcagtacatagtggaaatctttctgaaaacagaacagccccccaaagtaaaataagtaaatgaaatgctgtgtgagtacgcacgcctagagccgcacagtcttcccgctcagtgcttataaaaggcgtgctcatttggtgtgtttcagctgactggagcttgaatcctggaacactaattctagctgtgggtctggcatggcttatcttttgtgtgtgtgttgctttgctgatggtgggaacagaggctcctgccatggtgctttggtaagtggtggcttgcgttctggttgtggtgattctggcagagctcttgtaaatgg

SEQ ID NO: 24355 - DNA, 1152 bp, Mus musculus
ttcaaatacatggttaccaaaaattagcttactcaataacactagcttttctccttattttcccttgatgactgctagctaactcaggatccttacaaggcccacagactccacagtcaactgggagcaattcgatggcagaggttccaggtgacctgaagccaccaaccccagcctctacccctcatggacagatgactcccatgcaaagcggaaggtatgctctgaggactcttgagatataaagcctagttttgttttggtttgggggcaaacttaatagaaaaagttcttccctgattatttttaagtgctcagtactgctcctttcagcgtgtagtttactttgggtggttttgcatccaccagtcgcaagtgtggcttatttcctgagctctgtgggtatatagtgtcacagtatcactcagctttcccgctctgtgtctctcagaagcagtacagtcagtgtgcatgacccgttctcagacgtgagtgactcagcgtacccaaaacggaactccatgactccaaacgccccataccagcagggcatgggcatgccagacatgatgggcaggatgccctatgaacccaacaaggaccctttcagtggaatgagaaaaggtacgtggaggggcattctccaggagacttcctttcccagctgcctggcagcctgttcacctcttcagttgggacggttctaagcccctgccatgtagtgacacagcctccttcctgcttaagccagagcctcaggagaacttggccactctgagtctgacttgcctctttcggaaatggtgaaagcagcagattaagtccacacacaggaagccagtagaatgatggacagttgtggtctggaaagcatccaatggctgccatgatcgacatggtgtgaacagaaacagggcacagtgctaagtacaaaatagtgttcttacattcatgattctaacagttaacagacataggagggcagaaaagcaaagaccctggtgggtaggagagagcaagcagacaggaaagcgtggaaatagcagcggttttgagtgaatgcattggagggaggcagaggccctgcagattggtgtatctgtagcaatgggatctacctgcctctgtcttcccaatgcaggggcatgagag

SEQ ID NO: 24356 - DNA, 1205 bp, Mus musculus
cactgcaccataagtggctgtggtaagtgggtagatcaggaccctctctgccacaggtcacatcgcaagcccctgcaattctgaaaatctcccagtacagactcaggatatgaggagtccccagtgtacccccatcctcagcaaagctgatgtcatttagtcatacttttctaagggcaggagtaggaagagtgacagagagcgcagactttcagtctcctactcctaggcacagccacagccgggtagaggtgagagaagagagaccttcctctgaccttacactgtttggggggctacagtttttttcaagccagctctgctggggttggcccagttatgcaagcctggtgcacccttaccaagtggtaaaagaaacacctaagacgacaaaggccatgcgtgctgcctgggtacttggggctcctgtcctaccaccaagcaggaaggatcttaaagaacaaagtagtgtgttgagttaccatctcctgctaacgtcagatgaagctgcacagctgactgctgccgtcagcactctgctttctcctccagagccgaggttcataatacccgttctccttttcagttactcccgaggcgtggcgtgtgatgatgtcccttaaatcgggtctgttggctgagagcacgtgggctctggacaccatcaatattctcctctatgatgacagcaccgtcgccaccttcaatctttcccaggtgaggcagctgcacacagctggcaacaagttggcacgttataaaatgaagtaatgcataatgctgtgctggtgcagtgaccatccaagacttggaatctttgtagctaatataaagcagcattagttaatatgtagccgcctatgtactcagtctgggataataattcatttccatcttcagggtgcgtgcgtgtgtgtgtgtgtgtgtgtgtgtgtgtgtgtgtgtgtgtcaaagagagagataggaacaaagaaattgtttcagtaggaataattaaacaccaacatgaagttggaactgatatgagttacagaaagtacttctcagtacaacttaatatctttctttttacgttactgatttgtaattatttgtttgaggcagagtctcatgtagtgcagccttcaaccaactatgtgatgtagacctgctcccgtgtgctgaggttgtagatgggtactgccacatcccatgctgtgtctttt

SEQ ID NO: 24357 - DNA, 1168 bp, Mus musculus
gtactgtttcagattgggcagttatgacatccgtgaaggcacacatgtgtgagtgaacattagagggtcacatataactggctgttttctgttctcgtttatccagtgtaagaagaaggaaaagaaaaatctttgctcctctgccccgtttactatttaccaattgggaattaaatcattaatttgaacagttataaaattaatatttgctgtctgtgtgtataagtacatcctctggcggttttctgtttcttttttttttaaccaaagttgccgtctagtgcattcaaaggtcacaatttttgtttgtttgtttgtttgtttgttttttcataatttttttcatgttgtattgcagtctttgggaagtgaattgactttataaagaaaaacgttttggcaaaaagtgctaagatagaaaaatgtcaccacactgggtcaaaaacgtgaaaggaaaaattgattcttaaattgatttcctatgaattttattcttcacagaatgataaaagctaaactgcaccccgtcacccaaagctctgtgcaatagaaacttctagagatatagtgtaggggctgaaggaggtatggcagcagtagtcagggtcaatgatactgctttctccaccggaaagtggttacgttaggcctcgagcaaaaaacagcgctctcagataggtgcaaaaatccactcctagcagccaacagcaggatcgcttcctcaccacgaccgccatgtctgctgtggctcagcctccacgggacaaagcttcaagatttctttcatcatttttttaaatattttttttactgcctatgggctgtgatgtatatagaagttgtacattaaacataccctcatttttttcttcttttctttttttctttttttctttttctttttttttttttttagtacaaagtttttagtttctttttcatgatgtggtaactacgaagtgatggtagatttaaataattttttatttttattttatatattttttcattaggaccatatctccaaaaaacaagaaaaagaaacaaaaaatacaaaaaataaaaacaaacaaaaaaagagggtaatgtacaagtttctgtatgtataaagtcatgctctgttgggagagcggctgatcccagtttgcttcatgaatcaaagtgtgga

SEQ ID NO: 24358 - DNA, 1196 bp, Mus musculus
taaccagcagccagactttgaccgccaaggccaacccaagctctatcttgttttgacaaatgtaattgtttaaggggagataaaggtcctgtttgcttccttgtataaagccagcctggagcatctttaatagactaaggtgatcctgaaggggggctgtgtacttttgtgcgtggttagctccctggggactcagatgctctcaaggtcccatgtgcgtagcctgagggacctaatggggcaagctttgttcctgatagacacaggtggaattttgggagctggagtaaaatgaaaattggaggcccttatttaaaaatattagggattgtgagatagcagtgtggcacattaaatggaacacctggcctctatccctcgactgtacaggccttactcctgcagcgccagctggcccaggctacacaagagctctctgtcacctatgagcgactgaatcaggatgtgttaagaaagggtacatttaaagccgtatcttgaaaaacagggttgtttgtttgtttgtttgtttgtgaatggcttggacaagactcaactttgaaataaacaagtacgttatagctcctggtgtcaggaaaaccaggtttcctgggaccgaggctgctgtgtaacactcaggctaaaaagacaggtagagggcagatcctgtgctttggaaggcaaatcccacaggggtacagaggtcaagctggctgcccactctggtgaggagactgtttaaaaggctcttctgtgtttggtgacatcttctcacagaagggttatgatggctctaccctgaaatggctcctcacaaaaaaacttgagatgaccaatagagtccataggcagctattggtttgtcctgaactgacgtcctaggtccagcaaactaaaccgaagttcatactgaagtcctgcacagctgagccacagctgctttatctgagcttccaagaagacaaaggccaaactcaataaggggattcggccagcctgataagggagtctctacctatcttacaaattctgacacaggaagtgaccttaaaatgaccaatcagccttttgttctgtttcccctttcctctgcccttttctgtctttaaactcacccacacacacacaaatacacacacctcagcttgtcagaatattcagtttatatttataaaatgagaagttgcctaggattg

SEQ ID NO: 24359 - DNA, 1207 bp, Mus musculus
ggtcttcaggcctgacagcaagcacctctgatgctcagccaccccttgggccttaagccataattgataatctatcttattctcttgcttttcaaccaattgttgagtcccaattgttgagagattgagagagagaaccaaaacagcatgcagtaagaactatctattgcatttgatatcgaggaaggctggccaaaagaatccgaggagccccttcagatctgaaaagactcaattttaaaagaacgaaaacatctaacgcatccaacatgagaacaaattaccaatcaagatacactgcaggctttgactggtcactgatctctgggtataagtttccctttccgacaaaacgaccatttgaaagccagcgctttaacaatgtgtaattagcttacacatgtcgtcagggagattttttttaagtatctcaaactagcaactttaaacctttgtatttcagtcaccttaacaaatatctttagctctgggaaatgagtctatattaccgtcagcgagactgaacttgtcagcattgcccctgaaatactgtgctaaaaacgtgcagtcatcgtaactaaggcagaccaaaagccaaaacagactggacacaaaatggaatctttgggtggtggttgctcactgctgaagtcattcaaccaacagatgctagcttaaaacgccctacagttaaacattggtttaaaaataaggctattccaactgttgtcctgttccccacccccacttgacacccttacactgtcttgaaactgggtcttactatgtagctctggctgtctggaacaatgtaggccaggttggccttgaactcacagagaaccccctgcctctgactcctgagtaatggattaaagatgtatgctaccatctggcttgttcaattcttaactctactttttttgacgcacggtcctgggtgtaggttctaggtgtggtactttgatttcagattctcaggggcagctgctggcttaattactatgtagaacaaggaaaactacaagctggagtttttcccatgctgcaagcaatcttgtagagctgacctccctgctgcctttctgactggggggttacatttatctgctgtcaaattcacctccaacgtggcaggaaaagacggtatatacaggaagagggcatctgagcttaaaacatttttctgttcctgactgcatttgcg

SEQ ID NO: 24360 - DNA, 1172 bp, Mus musculus
ttcctctttgcgatgtttaatttcacagcttaaagactttggacagtttttgtgtctttaatgttaagtaactgctgagagtgaatattctttgataaaatggttagaatttaaaacttgtaagaaaatcactcccgtgttttctcatattattaaatctccaatttggagttagctctaaaatgctgtcctgaccaggcatagttgttaatctcactactcaggaggaagaggcaggctagtctctgagtttgaggccagcctggtctacagagtgagttccaggacagccaggttcaaaggaacctgtcttaaacaaccaaaagggaacaatgagaagctggcctagtctcctcctcacagggctgacatcatggagaatatgcaggacaactttctagaatcaagggagactacagagaagttaccaagtcctgctttaaaacatctttaaagacattttacagtgaatatttgaatgtggagtttgcctggatttttgattttttgtgagtgctcttggatataataataacatcatgatatttgtttgttttttgaaacagagtttctctacatagtcatggccatcctagaactcacagaaatccacctgcctctgcctcttgtgtgacccaacaataaatttgttcttaggagatgcagattgaatctgaaagggttaaaagttgtcatgtctgcataggtggcttacatgcacgcaggtggctcagtatggcagagtgacagttgctgctgctagctggaacaagcatgtggttttttatattacatctgcttcaaaaattttttagtggaaaagagaattaccatataataaaagttatagaatattaaataaataagtacacatataatacatgttgtaaatataaaaatatgatatgacagagctaagatcaaacgctaggtcacttgtatctgcttttaatgttcccgttacaattcccaactatttacagattaccatccaatataacagtgaatattaaaatattttggagctaggaagatggctcaatcagtaaagtgtttttccttcatgtgtgaggatctgaatttagataacttagaacctacattaaaaaccagtgcataattacagcgggagcctgtaatctcagcgcttgggaaacagagataggagggtg

SEQ ID NO: 24361 - DNA, 1385 bp, Mus musculus
tggtggccggggaggcaagagaggaaaccagtcagggaagaatgtgatggtggagccgcatcggcatgaaggtgtctttatctgtctcggaaaggaggatgatcttgtcacaaagaatctggtccctggagagtctgtgtatggagagaagagagtctctatttcagaaggagatgacaaaattgagtacagagcctggaaccccttccgctccaagctggcagcagctatcctgggcggcgtagaccagatccacatcaagccaggagccaaggtgctctaccttggggcagcctcaggcaccaccgtctcccacgtctctgatattgtcggcccggatggtctggtctacgcagttgagttctcccaccgctctggccgtgacctcatcaacttggccaagaagaggactaacattattcctgtaattgaagatgctcgacacccacacaaataccgcatgcttatcgcaatggtggatgtcatctttgccgatgtggcccagccagaccaaacccgaattgtggccctgaacgcccacaccttcctgcggaatggaggacactttgtgatttccattaaggccaactgcattgactccactgcgtcagcagaggctgtgtttgcatctgaagtgaagaagatgcagcaggagaacatgaagccgcaggagcagctgacgctagagccttatgagcgagaccacgccgtggttgtcggtgtgtacaggccacctcccaaggtgaagaactgaaactcagagctgtctggattgaagagatgtgtgttgttactgttgcacgtgtggcttgtgattttttgggggcgggggagttgttttgtttttctattaaaagactcatctgtcaaaaaaaaaaaaaaaaaaaaaaaaaaaaaaaaacctcatcctagctgcctggaagccagtcttctagcagccttcagaaaatgtagaactctcagctctttctgcatcatgtctgcctggatgctaccatgctcccaccttgatgataatgaactgaacctctgaacctgtaagccagccccaattaaatgttgtccttataaaacttgccttggtcatggtgtctgttcacagcagtaaaaccctaagacaccacctaagtagcagaatcaagaagcagctttaaagcacttctcaatgccaaacccatacctgcccccacctccaaaacatgactgctgtatagtatagcctgctttttagtatgatcccactacagccttttgaaccctagtaaagccattatatctgagatcagaaaactgctaactgcacccaaaaactgttacagctgcagccaacactggtcaacagaaagggtctgaatgttctccatgacaatgcccaacaccgcatc

SEQ ID NO: 24362 - DNA, 1351 bp, Mus musculus
cactgggcagtgacctgcttctcaggctccccaactggatctttctgtgactctattctctagggagtgagaacagtaaaacaaacatatgaaagcattacaaataattgcctggctgcagtaaatgttggacattgctattgttactttataggcattctaccatttataaactctggactaggagcagcgccttggaggtcccgtggatctgtgtcttgcttcaacagtgtttgaacggaacagacccggggattcccactgtactcgcttccagccgcctttacaagtctctccagtcgcagcctccgggaccatctcctcgctgccttcggctcctaggaccagtctgcaccgtctcttcgcggttagctcctactccggatcagccatgacctctcagattcgtcagaattattccaccgaggtggaagctgccgtgaaccgcctggtcaacttgcacctgcgggcctcctacacctacctctctctgggcttcttttttgatcgggatgacatggctctggagggcgtaggccacttcttccgcgaattggccgaggagaagcgcgagggcgcggagcgtctcctcgagtttcagaacgatcgcgggggccgtgcactcttccaggatgtgcagaagccatctcaagatgaatggggtaaaacccaggaggccatggaatctgccttggccatggagaagaacctgaatcaggccctcttggatctgcatgccctgggttctgcccgcgcggaccctcatctctgtgacttcctggaaagccactatctggataaggaggtgaaactcatcaagaagatgggcaaccatctgaccaacctccgcagggtggcagggccacaaccagcgcagactggcgcaccccagggatctctgggcgagtatctctttgagcgcctcactctcaagcacgactaggaggcctctgtgccttccaaggggctcccccctctgctctgcaccagcccgccctgggacctccacctgaatgaacctctcaagccactaggcagctttgtaaccgccctggagcctctgtcaagtcttggaccaagtaaaaataaagctttttgagacagcaaaaaaaaaaaataaataaataaataaataaataaactctggactaaaataaaaggatattcgaagactattcactctgctctattctaaacgtagggtacagaataatgcagaaaggaaggactactccaattccaactaaaatacaagacataacacttcttcctggatggccttaatatgatggtgaattactgaagcagaagctgagcaagatctaaggatttctgcatcaccttcaccttc

SEQ ID NO: 24363 - DNA, 1792 bp, Mus musculus
caatcagtggctttatcagatagttgtaatgtaaaagtctttagtttcaggtacagtgcttatttattagaactttgatttgctactttaaaatatatatacacacacacatgcatatatacatatatatatacacacacacacatatcctcttttttgtcgttgttttacagagttgtaagagtccatccaggaccttccagtcatgaataatctgatggctcctgaattaaccgggaaaacaaacatatcaagtgccatttgaagactctgtctatctatgtaaaaccttttctgcacatagaagcttttccataagaagacattctgaattttgcaactgatgaagattaagcatcagctggagcacctttccactgttggggttgggagtctgtggagaacagtctgtcactaatgtcagattttccttacagtgttcataaacaaaagccagtttgcaaaagaaaaaattgcacagattaaccctaaagaatagctccagtgtaaagcaggggcagaccttaaaactctgaaccggagctcagtgacttttcctgtggttgtagcaggagtgaggggactgatctgaaaggaacagattcctttgtgtcttcagctatcggaagttttttatttattgtttatcttttttcttttctgcatatatatgccattttaaaatactaattggaactgtcagttacaaaataaatatcaagaaaagccttttttggtccaaaggtgtgaacaggcttgcaggtgaacaggaagacatctttggtaaagcttggaccggtcttgggagatggtgcatcttggagggctctgctacacgcctaggtggctggtttaaaggcttgcatcgcagacggagactaattaatagacacagttctaagattgctttttcattaacatagaaactagagaaaggagaaacagaagcctgcagcctagtctgtgtaagcaagaagtaggaccaaactgaggaaactacttggtccatttagatagcagtttattcatactcagtgacccgcaggcctccacctctgcttgagggaagggctttgctccagtctctgtggcactgagggtggttccagcccatggaggagtcattctaggaagccctgtgttcctagggacacagggccaggctttgagacaggaagcttctggctgtgagcagtgggggaaagagtgattttcttgttaaagctttgaccattgtctgcatgagctctggtgtgactttgcacgttagtgtgcctttccccttatgcaaccttttccagcttacagcagaaacttgccgagttcagaaaacgtgccagagggtggcttcagagggaagatgatcttgtgtgatcagtctctgcacttgaactattgaatagagaaatccagctagaggaattcttaccgccttaagttacttgaaatctatgtgtttgtaaccctttgtctctggaattacattacaaaaaaaactggaatctcaggctgagaataacgaggctgagtaaaagcgaagagaactgcctcttcatcatcacttactaacagctctttctccaaaggattggtgtggtttcccgctaagaacttgaaaatgagaacggaccctgtgtatttttaggcattacctttcttcgccgactgacgtcttttatagaggagttttttcactatgcatttggtggagctttataagctattgacctaattggactctagatcagttgtaactaaaggagaaaaaaacaaaccaacggaacccaaccac

SEQ ID NO: 24364 - DNA, 1151 bp, Mus musculus
tctcccagtgtatatctttgacatcttggtcaaaagttaggtggctgtaactgttggagtttaatttggggtctttctgtttctgggccagcctcatgctgtctttttcattgtagctctgttgtgtaacttgtggtcaggatgtaaatacctttaaggttgttggttctgattagaactttgactgtggatggatttttctgttgctgtatagatgttagttgttgtttttgatttaagttctgtgaagaatgttattggaattttgatgggaattgcattgaatctgctgatttctcttgttaatattgccatttccatgatgatagttaaaataactatcatggcttatgtagttggacttgctgttgtttcacttaataaattatagaattagatgaattgggtggtgattatcacaggattgtttgttataaggctttttaaaaaaaattgttcaaattgtgttcttcttagattaaaggtaaagtccctgaaccctggtaatgcggtcgctccctgatgtgtcatttcctgtgggcacgcccaccgtttggagggtgctgcttcagaggcccagcattggcactaattggcacttactttgctttccctagaagtaattctattagaggaagtgaaccagcatgcttgcacctcagcttagaatccgaatatgcttccagaggtcctgtcctgtgcttttattctgactttaataatttcaataaatatttgttagctgccatgctataaaacggtaggctgcatcttatacgagacagccataggtttttctttttgaatactcaaaggcatgaattaaaacttagctcactttttccccctcccagatgaatgcagccttcagctaacaccctagctgggggaggcttttggtgcacagactgaatgaatcctgttccctttagaagggcaggaaagctgtggctaggatgcctaggtggatccatagcacctaactacacaatctgggcagctgagatcccagctgaccctgtctggtaattcctcaacactctggtatgtcctaaggctgccaagcaggctggcaggctgtagagagcaggaaataagctactgggagataaggcaggcagctgtgcagtgcagacaggagaggaaatgag

SEQ ID NO: 24365 - DNA, 1191 bp, Mus musculus
cacggggataggggtgactttggccaggcccctagggtgcctggcctccttttgtccatctcttaaatgaaaagtcatacctggagaagcttaaacactgcattctggctctggtagcctgagagctcagaattcagcagcttgtcttccctttcacgagggtgggagtatgtgtcaaaacgtggcacctgtgtagacaaaagttttcatgagtctgtaagctgtctattgtctcctgaaaagaaaccagaagttttcccctaaatgtgtttagaatgcttattctaataaaatgatggaagcatcaaatccaagtgtagtggaagtccccaaggagtccccaaggagtggggggtcctcaagtaaaacaaggcactgtgtggctgtaaaactgggtgtgggttgccgcctttggtgtgctgtcctgtgagctggggacaggttggccacagtagctgggtttgagctggcatttgctcctgggagtttttggtaacatacagttcagaagactacaccgctgtgtatcgcctcatctctggcagatgaactctggaggattgtgactgacttggtttccattttcttcagctttgtgcagttctcctgtgactttgtatccgtgttttctgtttacaagtcaattttaaggggaagggtaggataagatctagtttattgtagatattctttctcgtgttgtagaaaagcatgggttatacatttgagtggaaacggcactgtattatttaccaaaggtgtattgtttgcatttgtttataaatgcattattttagtactgtaaatttgggcataatttccgagtttactactattgctactgctggcatctgtctttctccttctctgtcatcttttttatccccataaatgtgcaatgtggggtgcatatgtcacagaccaaacaagaccaccagcatgttcttgtccacactttgggaacagcgtgcactgtttcatacacatcggtccctgcagtgttggtttcttcatttcctttgaaaagtcagcattttgctttaaccttccagacaagatctgttgagagtcaccattgcatctcaatgagctctcccttatttgcctatctttgtatgtattttgtatactagattgtccaggaagtattctagaagggagtaatggtttgcattcaaaatgatgtaattt

SEQ ID NO: 24366 - DNA, 3575 bp, Mus musculus
cataaaacagcacaagccagaccccgtggtgcatgcctgtaaccccagcactggggaggtgggaacagaaggcttctaggcctcccaggcagccaccccagcagaatcagtgagctccaggtcctgtgagaaaccctgtctcaaaccctgaggaggtgagccattgaggaagacaccgatgttgacctctgacttccacacgcatgtgcatgtacagagaagagctgccagagtggccgagggtcacaggtctcttttgccacaggagtgactatgaagaaatgcccctgcagaacggccaggccatccgtgccaagtgcagggaagagtcggacagtgactgagccccgggcagcagatgggacagcagggggccagaggcctgcctgagtgacacattctggccccttctatctgtttgtgtctggactcctctgtaagcaaaggtttcctgttccttatttgtttacatatttttaaaagaaaacccaaatggattgaaatgtggggcggagtttgctttgggggcagccccactctttaagaagaggggctgcctggtagagaattcaaaggcatatcctgtacaccgacatcaggtgcgatggagcccgtatgcagtcatgaggagaagttacccatttttaataaaaagaattatgtactttttctttccttttaaaaaagcaattgagtctgtgggaggcctgacgatcaaggtcccagcgtggcagtgatgactctctcctctctgtggcaccgttcttgagtgccctaccctcaagggaagtctaagctgtgcccgcctcaggtgggcggtctgcctccctcttctccagcacatgatggggtcagtatgctcactcaggcatctgctgtgagactttgattgggtttgatgagccacattcaatagcatcttcaggaatggcaagtggccaggttcccgtccatcattgccaccccccacccccagcagaattgccatccaagttgagtccagagtgggctgatagcctggaggaagcccaggcagctacaggccagtagcgctgtgggcaaggtcctgtgtcatggtgcttttcaagggtctgtgtacagttaggattgggtctccctgtgctggaggtggaaaacgaggaggcccttccgaccaaaatttcttcatcttcactgagtgtgaaccccccggagagctctattattattttttttaaatcaaagctacataaaatacaactgtattagaaatactttattgccagaaagactttctgttttaattaggaactaaagtaaagagaaagtaagacattttgaatggctatagagacagctgcagatgaagggagtccccccaaggttgttctgggtttggagtgtggctctgtggaaaacggatgtcacccacactgaagttcagcattggaagtcctcagggccaccgccttccttcccgctcctcagtttccccacacagcgtctctgcgaacacctggtaaaggtagcatcctgcctgcctctgtcttggcaaatccagaggcccagttccggtagatccctcttctgttcccttcgtctgtgcaccgactcagatttccgctctgagctgcaggttactgtccgtgtgggcccgactccagggtggaagacgttcttcagtctgcctgtcttcttaaacttcatactttaatatggattccatgtgcattttttttaaaaacaaaacaacttgtaactatgaacattggaatggaaactcactgcgagggtaacgggtttacatgagtttgcacttgctgtgatcactgagtctgttggggaagataccagaatatcttatgttaccagcccttcccttccagtggagccctgcagctgccatcttatggacgctgactcgtactgatcccaagatgttcgaatatgtgagagtttacatgtcttcatcattataaataagtctccatggtttataacactatgtatcagtcagtgtaagatattttaagcatttaggtacagacttcagaacttttaaaaactgccctatagaataattataaactgatcctagtgtccgtaaaactaagggaatattttttttgctgttgaaatatgaattataaagcagcactcctagggtcgtgtgcatcctgtattagatgctgtgcaaagctctgcttacagaactaagacttcagtgtgtaggcagcagctcaggggtgagcttaaaacactaaactccgccaggacttttgatagtcaccagaagactgttctgttctgaggggattaaaattttgtaaacttaaattataagttcaaagggctgacttagttctttcagggtaacggtttgaatcctcctgtctttggggtattttttatattggtccaatccaggggaacctggaaggtgacggctcccagattcccggtgagagcttcattttccctgtgggtagtaaatctgcgtgatttattgtcattcatggcagcagtgattcggtgccttcaagccccatcgaaaggctagagaagagggtatgtaaacttacatccgaggctcgtgaggcgcttgctctctgtacagttagactgaagtaagcttaggtatgtaaagccatcctgcagatgggcagtttataaagcaaatctcgccagcctcaagtgctgaaccattgaaggcacagttaggatgaacaggttcaaatatggttactaatctttataggaaaaacacaagcacccacaaaagagagaactaagtccctccatgaggaacagatatgaggcttgatatgtattgtatatttgagcgtttgccttagtgattacatttttgggggttgggggagatgtggctcttttttttttttttttttttcaggccaaaggaaaatggatgtcgtcagaagccttgctgaatgtttctcttggtggctcgggtgctgctaggtgctaccattctgtgatctgtcctgtgacacagaacaggttaattccattgtatgacagagggattttctgctcctgaaaactacctttttacaaatgtctgtaaatatctgttaaataaaaacactaacctctaagtccagaaggaacaccgtttgaccatcagtgcaccactgttgtctgagcagtcagtcaaggaataaatgcttatttatgaaaaactcaataaaagtcacattttgagattttgtatgagactttttgttgctgtgaccgaaatctgatgaaaaacctcacaggagagagtcactttagctcaccggtccatggctggctccctccaccatgagcccgggatgaggaacacagtgcctacagagtgtggccaagtcactcacctcctggtagccaggactcaaagcagaatgacgggaaggggccagaacaaggcagagaccctcaaccactagggatacttgctgtatcctgcttccttcagcacgctccacctccaagttcccagatcctccccaaatgtcactgccagatgaagagcaagtgtttgacacacaccttgtcttagggttttgtagtcttttctctctcagcccgag

SEQ ID NO: 24367 - DNA, 1242 bp, Mus musculus
gaggcccttccgaccaaaatttctgcatcttcactgagtgtgaacccccggagagctctattattattattatttttttaaatcaaagctacatgaaatacaactgtattagaaatactttattgccagaaagactttctgttttaattaggaactaaagtaaagagaaagtaagacattttgaatggctatagagacagctgcagatgaagggactcgccccaaggttgttctgggtttggagtgtggctctgtggaaaacggatgtcacccacactgaagttcagcattggaagtcctcagggccaccgccttccttcccgctcctcagtttccccacacagcgtctctgcgaacacctggtaaaggtagcatcctgcctgcctctgtcttggcaaatccagaggcccagttccggtagatccctcttctgttcccttcgtctgtgcatcgactcagatttccgctctgagctgcaggttactatccgtgtgggcccgactccagggtggaagacgttcttcagtctgcctatcttcttaaacttcatactttaatatggattccatgtgcattttttttttaaaacaaaacaacttgtaactatgaacattggaatggaaactcactgcgagggtaacgggtttacatgagtttgcacttgctgtgatcactgagtctgttggggaagataccagaatatcttatgttaccagcccttcccttccagtggagccctgcagctgccatcttatggacgctgactcgtactgatcccaagatgttctaatatgtgagagtttacatgtcttcatcattataaataagtctccatggtttataacactatgtatcggtcagtgtaagatattttaagcatttaggtacagacttcagaacttttaaaaactgccctatagaataattataaactgatcctagtgtccgtaaaactaagggaatattttttttgctgttgaaatatgaattataaagcagcactcctagggtcgtgtgcatcatgtattagatgctgtgcaaagctctgcttacagagctaagacttcagtgtgtaggcagcagctcaggggtgaggttaaaacactaaacaccgccgggacttttgatagtcaccggaagactgttttgttctgaggggattaaaattttgtaaacttaaattataagttcaaagggctgacttagttctttcagggtaacggtttgaatcctactgtcttt

SEQ ID NO: 24368 - DNA, 1210 bp, Mus musculus
gagcaatgttgaaggtccttgtggcagggttggagcagagctgtgatggagaatggtctcagacctttgtaggctgcacagccacatgccagggtgaggttttgctacatagtagggccccaagtcatcctgaaggactgagcaggggactcagtagactgcaaagcatccacatctgccacccacagccttggcttctgttgtggggaggagaggcataagggaaggagatctgtgtagaaaacagcaagctgaaagtgaagagaagcagctatggtacacactctgtctggtcacagcgctgcatagggagcccaagacatgtagactgtgatgcttgtgtggtggctaagcctgcgactcctgtgcagtagagattaccgactggccaggctggtgttcctgcaaagttagcttttctatgcaggtgatgtattcagttgtctgctggagattgattccgatcactgtaagtcccattgggtgcttgctttctaggaaccatccttggcaggcagctgctggcgttctctgagcttttggcggcgagttctcccattcggctcatctgttgttgaaatgagtcgctccgggctgtgggtggcaggggtcctcttcacttgcttttgtgacgtggacctcctcctttcagaaatgtgcagaaatcatcgtggcccaccttggctacctgaattacacacagtacagggttactgtggggtttgagcacctgaaccagcccatcaaggatatgaacttcacggtgagtgtgccgtgcagccagcggccagcttctgtgactcccttgttaggtggtttgatgcatcagggtctcgtacagtttatctcggaaaaccagcttaagtgtgtagaactcaagaatcacttaatcaaacagcccggacactggagaagccagggtgcgctcagccagccagccatcccacgcttagctagctgcctgtgatttaaggctgcagattccgtcctcacatactttacttattttaggagagagagtcttcccacactcagatcttacacacaagtctgtttctttgcatgtagatattggtgttttctagtgaaggttgacttttgatagaaaattaataattcagatgataatttatctgctagattcaccacttaaaaccatttcaataaatgttgatacttaagattttggatctgttcttcagtatagaag

SEQ ID NO: 24369 - DNA, 1172 bp, Mus musculus
cttgctctttatagtattcttgggaactattttgttattatgtattggtgatttatgcccattttattatttatttagaaaaatagtacctttgtaatgccttgtttggtggcaatatattttgctgcaaaaaataaagagaatatgacagaaggtttttgggggggacggggaggctaggtgctttgcaactttcttgagagttggagaaaatcttattgatcccctaaaaaaataaattcactctttatctcagtattgattatatgcaaaataggcaatatctttgagatagcataccctaagacagtatttcttattttgaaaatgttaatttaaaataaaatgtgataagacacaggaagggcaagacatctgagataagagtctcaaaagagtcccttagtaaatgatcttcaagttttagggtttttttttttggttgttgtttgttttgtttgtttgttttgtttgtttgttttgtttttttagttaaaatttaccttttccagaccgcaaaagttatacttacaactttgctaaataagaacatccctaaaagatactctttgtctgtggagatgcaggcttctggccttgagttgcttgacctgtgagctgcaggaacaggcggagagtgagtctcaggttccacatgggcagaaagctgctgctgcagcagttgtggcatcgtatcatttaagataatggcttcttccagtcaatatcacttgattaaattctcctcaaatgaagacttttaagtaacagaattttgggtacttcatggttattaatagcaatttgtgaatgtcccaatgtctcattggatactgaaattaaaaacagtcaactatatagagacccataggaaaagagtatattaaccaacatgaaaactagtgttagatttatttggctctagtatatatagagacccataggaaaagagtatattaaccaacatgaaaactagtgttagatttatttggctctagtatcatcaaaacaaaagttatgggtgaatatacttatttgaatgtatagcctgagaaaaactgggaccaccacagctagaaatactcggctctaatgagcatacaaagcgaaagcttttgcatgttggttttgtccatccagagactggccttctgtgtaatactcactctgta

SEQ ID NO: 24370 - DNA, 1099 bp, Mus musculus
tccaagaagtcctctctctgacagaaagccctgtaccgcagagaacggaaaaattcggaaagaagaaccggaagcgcctggatagccgagcagaggaaggaagtgttcaggccatcactgagggcaaagtgaaaaaggatgctaggactttgagtgactttaattctctcatctccagcccccgcctagggagagagaagaagaaagtgaaaagtcagaaagaccaactgaagtcaaagaagttgaacaagacaaacgagttccaggacagctcagagagtgagcccgagctgttcatcagcggggatgagctgatgaaccaaagccagggcagcaagaaggggtggaaaagcaagaggagcctgcggaccgccagtgagctggaggaattcaagtgccgcaaagccagtgagaaggaagatgggcggctgggcagccagggcttcgtgtacgtgatggccaacaagcagccactgtggaacgaagccacacaggtgtaccagctggacttcggaggaagggtgacccaggagtctgccaagaatttccagattgagttggaaggacgacaggtaaggagactgtggtactgtggccactgagcaagtagggccagtgccttgaactctgggaacaagcatttaaaaggcctccacatgtgctttaaatccaatgacgcgtaccctgttaggcagccggttaggaagggaaagcacagcccccacgcattccctcaccacctgcttttcagttgctggtctctggtatctctttaaatttgcaaaaacatgttttttatttattgatacttttaatttagccatcatgtgttgccttcctcctgagtaactctagtggattgtgctgtctgtttccctgaggagttggcaaacttacttaactgcctctttcctccttttccatttcatgactttgtttcccaccaccttgacctcaagacaatgcagtttggacagactgactgtcatatgtacagtactccttcctagcgtttcattgccagctatggaagaaggttatgtttgtcagccctgcctcccctacctcattagcacacacgagagctagccgtactttc

SEQ ID NO: 24371 - DNA, 2458 bp, Mus musculus
aagaagggtcaggctgacctagaaaggggtgcaggtggatgaggctgggtctgggcccctggctgacactcttaagagcgagatccatgcagacctactccaagtggtagcacttccagtcgctggagaacagagccgatgagcatgtacccggattacaggcagagagaaatggttgtgctctcgagtgtccagggtccggaatcttgagttttctgattgcagtgtatgtgctgtcactccagccaagagccaaggggaggcgggattccccgggctcctagccggccggcagaccgttccatgatgggatgtgtaagggtcctcacttgaccagcattctcctctccaaaggctaaagaagcccaggacgacctggtgaagaccaaagaggagctgcacctggtgatgacggccccaccgcccccaccgcccccagtgtatgagcctgtgaattaccacgtgcaggagggactgcaggacgagggagcagagcctatgggctacagtgccgagctctccagtgagggcatcctggatgaccgcaacgaggagaagcggatcacagaggcagagaagaatgagcgcgtgcagcggcagctgctggtgagtgggcagggacagcagacattatgcagggccccacccctggtgccttctcctgccctaacctaacatacccgcatatcccagtcagtccacaaggagtgaaaccctgacctcacgtggcaagcaggccaataacagataacttgcttcctgtttcagaccctgagcaatgagttgtcccaggcccgggatgagaacaagaggacccacaatgacatcatccacaacgagaacatgcggcaaggcagggacaagtataagacgctgcggcaaatcaggcagggcaacaccaagcaacgcattgacgagttcgaggccatgtagaggccaggctgggaccaagggcagagggcacctcactgcaggcaggtgtcacacttggctctttagttctcttaagtttagacacccccttgctgtgttccagtcccttaaagagcagttacggggcctgcattctgccccgagacccagtgggctcctccttggttccttctaattgtatcacatagtgccaaacaggtcagatttaatgacagttaccgaatcacttcctgtttggagcagggattcggagggctggccctcatgaagcaagattcattgtcactgggacagcactgtggctcacgggtgccatacttttctctagttttacaatgagctcaaatcgattttgttcttgatttttatgaaggatccatctctgtgtattgaggggtaaaaatgattttgaaatttgagtctaaagcatgcccccacagagtctccttcctccagaccgctggcagagtctccaggggtccttcagagtgtacggtacaggactctccgatacaaaattctcatgcttatctgttagcatacattgttggacttatatatctaatgatctgctatagaggatagtatttatatataagcgataatatgggtttgtaacattagttttaaaaaagggaaagttttgttctgtatattttgttaccttttacagaataaaagaattcaacattaagaaccatgtaaccgagacacttgatctgacacaggggcagtcgggaaaccgatgactgcagtaatcaccactgtacaaaaatgttagtgggttttgtgcacgtaaaatgcacacttccatttcctgtcagtttcttatttgaaaaaaaaaaaatacacaccgagagcatccagactccagccctgaagggacgccggcctctttattgtgagcaacttgttcccgttttcagtttgtcttccttcctttcgcggactagcctccttggttgtgatgtctgtcctgtgcgggtgactccgcaccagatttacacacaataaaagctctccaaggccttgtgtctgattgcatggggggggttggggtgggagtggggggtctctcagacttgtcctcgggattcaggaagcatgctaatcagagaggggtcttccccagctcccctgcactgggaggtttgccacccgagaggagcacacagcattcaacctacttctattttcctctgaaacaacatataacaaagctaaaaacgtggttgttaataaatgctgggagttacaggacagtgttgagcgtttattgagatcagaacatttccacatctatctgttgacagtagcctccccgactgcctgggtaacagtaattgttccgtgtcctaacgacacacattactgtagtcagttattggtgatccagtgtgtctgattctgccatgatcccacttcctgttgacctttgtgggttcgcagtcgccttgggcttcacctcagtgcaggacgagggtcatgtctgtccacaggtttgggctggagaggactctgtgcc

SEQ ID NO: 24372 - DNA, 1193 bp, Mus musculus
atgtcattgtctcaaaattctttggtttggttggttggtttttggttttgttttttaaaacatggtttctctttgtacctctgggtacactgaaattcactctgtagaccaggctggtcttgaactcagagagatctgcctgcctctacctcccaagagctgggattaaaggcgtttgacactacatctggtgtcttaaaattcttaatttttagataaggggctctgtgggtttttttggcactgagctcctcaaattgtgtagtcacactgaatcaggccctcttggatctgcatgccctgggttctgcccgcgcggaccctcatctctgtgacttcctggaaagccacttcctggataaggaggtgaaactcatcaagaagatgggcaaccatctgaccaacctccgcagggtggcagggccacaaccagcgcagactggcgcgccccagggatctctgggtgagtatctctttgagcgcctcactctcaagcacaactaggaggcctctgccttccaaggggctcccccctctgctctgcaccagcccgccctaggacctccacctgaatgaacctctcaagccactaggcagctttgtaaccgccctggagcctctgtcaagtcttggaccaagtaaaaataaagctttttgagacagcaaaaaaaaaaaaaaaaaaaaaaaaaaaatgtccaggagggagagagctccccgggcagcgctagggagtctccaggatgtttgtagagtgccgtccaaccttctgtctcactcctgtatttggcaagctgatttttcttccataccactgatgttgacccctatccaacatggcagggcagacatccccatgactagccccaagtcataagtggccttgtcatctgcaaccaccatggccagtctaacccactggacatcagtgtcctgagaactctcactggacatctggtccaccatagctgagaatgatatcattatgctcaactcagttacatagaaccaagagtaaaaccacttgtagaatggagtggtcttctgtattccagcagaatattctgccaatacaaaggaggttgcttggtcacactaggcctaagggacgaccatatagagccttttgaagcagttggtggtcattttccctttaaaggacactgtgtgaaactgaatatagctggcttctgaca

SEQ ID NO: 24373 - DNA, 1182 bp, Mus musculus
ccaactctgctgtgctagagaatcctacatttaagaaagccttgtaccatggctaacttgtgtgtgaagatgcgactgcagagaactgtctgttgagtcacagataagctcattcagaactcagtgtgcggctctcctctgtgaggatggctcacatggtgacaccaaattttgcctgtgtgtaaccgggtttgtgcaatatgtagtaaatgtataaaatgtattattatatgcaaggtattagatgcaaagggtgtctgcgtacatcccttcatgcatgcacttctgtatgttgtttttttgtcctcaggcacttgtttctattaagtagaaagagttttacttttcttaatgttacagcaaatgtcatgcctgtgttcacattagccgccagctgcatgtaggtggaaatgtctgagcctctgatgcatcttctcctaagcaggcttgagacgagtcagcatcatagaagggaacagactgaaagacactgtacttggtgtgtgacccatcagccgcactgggagaaggtctttcagtcatctaatggaatgtgggtggcctggtggaaatgcattctgtcagtagtaactcacgcagagtactttgagcctctgcagctcagtcatgtcttgtgcagctgtgtagtggtaagcactgttgtatgcattggggagtcttgtataagacttcagtagagtttatttattagtcacaataaactgccctcctcctttagacagtttattacttgccgatgttatatcctttgcctcaaataaaaatccaccaagaacattatccacacactgttccattcagccagtgtctgttcactatacactcattgtgggccaacgcatacctcaggaaggtagtgtccaggagatgtagtctctgttctctggggatttgagccacttttttcagcaagcagtcattcaggggacagggaaaagtataggacacaagataacctggcacatgtaaagcttgcatctgagtgaaacagactttccagtgtctatacacatttcggttctgtgatgtcctttatcattagcaagcataaggagggatgtttgtatattagactcttactactcaatgaccaatatgtttatgtacatgttttaaagcatagggctccaatcttcctaattatatccatttttataagat

SEQ ID NO: 24374 - DNA, 1192 bp, Mus musculus
ggcctgggttcctctagatcaggtggatggcccagtctttgaggggtcatcatcttggggtacgtggaaccctggaatgagatcttctttcccataggttgtacttcaagcccagcacagggggtagagctcagggtttgttttgcccaggctagttgccaagttgtaggctcaagcagtccccctgcctcagcttctgaagtagcgctgtgataagttcatgatctgtcaggtctgttgatgtgtaaactagttagtactcgggttttattggcaactatttctgaggtttaagcagagacttaaatatattatattataaatttgctctaatcaggtggtctgcatcacccagttagggctgctaagttccagaccttaggtctttgtcctatcttgactgatcccacccaaccagtttttagtttctcaaatggctctcttgtgtttcagtgcctcttctcccacccagcaagccaatcctggactatcctcacttggttccggttcacattgcctcacagatggcctctctctctctctctctctctctctctctctctctctctctctctctctctctgtgtaatgtctttcaatcttattgtgttttcaagagtttgtttttgtgtgaattactgagcaagagagttcaaagacatttctagcaaatacagcttgcgtgggtctgaacattccttaggtctttgagtgctgggctgtgtgtttccagagatgtttgagatgtaggtggtgtggcctctttctactgtaggtcagtatgggatactctggaaactggaaaggcagctcctatcttccatgccttaaactgatggaggtgaaacagaagacctgagggtcgaatgactgccgaaatggagcatttccacaaggcaagatcagctctgtttccactgacctccagtctagagttcccctctcagaaggaagaatttttgggatcctggatgtcggatgttgggctggctttttttttttttttttttttgtatgtgcattagtgtgacatgtagtaacttaggatctatgttcttatgcttcttcacatgaacttgaactgggcagatggagcagaggccaaggtgcatgcactctgcttctggctgagctatggagatgagctgcacacggactcctcagtctctgctgctggaggaagagactggcc

SEQ ID NO: 24375 - DNA, 1168 bp, Mus musculus
gtgaataaaaggagggaaagaaggccgagtgccagcatccatcactgtctgtgtcctggctgtgagcacagcacaagcagctgcctcctgctccgaccgcggtggactgtaccttgaattgtgagcccttccttcccggagatgcttttcttcgttatcttgtcccgtagtgggaggtggtctctccacacagtgtgtgtttctgggcagtgagacagcacaaggacaggacattgagaggaaaaaggccgacacaaggttcatttgtagtgattctagtttcttgacgccgagaagaccaactgagctggcttggcggacttggcgaaagggagagctgtgtgccgaggaaacctcatctgagaaaatgctgcgatgagattggtctgtaggcaagtttgtgggggggggggcattgctcttgataactattgctgtaggagggcccagcccattggggttggtgtcagccctgggcgaatggtcctgggttgcccaagaaaacagggtgagcatgccacagggaacaaaccagtaagcagcactcttccacgctctctgcatcagctcctgcctccaggttcctgccttgacttcctgccctggcttcctgcagtggtggaggatgtgtaagccacacaagccctttccttccctagttcctgtaggtcttagcacagcaacagaaaccagacaggacactgactcacagaggcagctcttgcacctgcggctctagaagagaggttggaaacataagcttgaattcttcatgggactagactttaagggtgaagaaaatgttttaaaatagaaagtatcaaaggtgaattcctctcagataggtccggataaggggccctcttgtaattgaagacaaaggaaggtaggtgacagcggctgctgatgtcattggtgctcagcctgaggagtgtattgttcttgaaggccacatacctgcctcactttctgcttgactccatgttagccttcctggtcttaaagtgacacctaacggtgccttctctgtccttcctgtccctgacatcagttccctccgcagtcacgtggtgaaagcctgcagtcatgtgacaggaaggaggaagggaagagcacaggctgcctgtggtttcagaagattcagtctggggctgtttgtctccgtgtg

SEQ ID NO: 24376 - DNA, 1229 bp, Mus musculus
tccagggagctcgcccacttagtgtgtatcaggcgggttagcccagagttggtgaactgacctggtaagtccatggtgctgaagagtatcagtacaaggtaaattgatctatgaactttattttgtatctccttccatttggaaggtttgttagaccattacggttatattcaagtactctgtactcttagttttgcttgttttaaactagaaatgattagtactcttaattcatagacttgtcaataacagttaccagttaaggtcacgttcttcctgctgtctgtaagcagctatagtcacagattacttcattacagtcgtaatttattatttttaaaaatgccttgaaacattcaataccaaaatgcatctgaaaccattaagcagtgcttttatttcagatctgtaagttgattatatttaaatccaaattggagtgaaatagtagtaatggcctaagaccatgcatattcagtttgacaaactttgtatactgtacataattgcattgtagttctttaaaaataaagccaatagtagaattcgtggcagatctaatgtacactgtttatgtagtactgcagcgatataggacagtggcgtctgtaatgttaaagtattgaaaatgtacagatagaaactcagcccagtgcatgagtcataccactaaaatttgggactgtgtgaaacttaggtgcattttatttcaattatgactattaaaagctacctttattattaaaagagaaattggacatcactgatccatggtgagtgagtgagtgagcaggtgctgtggtttgtatcagtgccactttccagtccatagtgcgtaagcacatcgacgtttatcaggcgtaagtgtagaggaagtgaaaatatagtaataaagactcgggctctctgacaacagagtctggctttttaaaacttaagtgaaactgagctataatcatcaagaggaagtaggacagaaacagaggtgtcctggaagccctgggtacttaagttcttagtctgccccatgcttgactcttcggatcagcactggatgaagatgctgtcgtcgtcttgttagataatgctgtgccctgtcatctcttcagtactgtggaagagcctggggctgctgagcatctggagtctggatcagatgtgtgccttaatatttggtaggcactccagttagtgaactggcctgcaagcatggcaggatgtggctttgt

SEQ ID NO: 24377 - DNA, 1113 bp, Mus musculus
actgaagcagaactgggaggcttgaggtagctctagaaaacaggttggggtggggagactgaaaacagacttgaccaagagtggtgctcaacattattgccactgaagtgaggaggagctgagggcctgataaggagcctgcgaggcaggccaggtagcagctcctaggacattgcttatttttttaagactagttttcttttgtgtatatgactgctttgtctgcatgtgcaccatatgcatagctgatgcccactggggccagaagacggccttggacacctggaacctgaattgggaacggttgtgactgccatatgagtgctgggagttgaacctaggtccagtgtatctaaaagtgctcttagctcctgaaccccagccccaagactggggtttttgaacaaggatttcagagacagaggaactgcagggaagaaggctctggcagtaagtcaatgggtaggatgaaagagaaaagccactgaagatggattgaagaacagaacggatgggctgtccatgttgaatttggagaataggcaagatctaccatgtaggtaggattggctttgtggccaggaatcctgaaggacaggaccaaggaagctggttaggggcaactggggggcaaagtggctttctacctcataaatcccaggaggagaggggacaagcaagtgtgttgctcggaatagatgtgaggagcagggccttccgcttctgccgattgctgtctttttacatgccagccattgtgggagagatggaggggaacgcagaaatgagggctttcactacattgaaagccacagcaagtgttctggaggcatgggctctgggctgtgtggctgtaactctccctggccctgcaggtggtgtggccctgggccttagtctatcatcaagtacaggtgcaaagctggggttactgtgtggtgcatccatccgttctcctcattgcctgtgtggctgaggagtcagtgtcaggggttcatctttcagccctgattccttgctgtgtcttctcagtggcctcctggtcaaaggctttactgtctcatgtgacagcaagaagttctgaagatgaaaagtgaaaattgtgtgcatgta

SEQ ID NO: 24378 - DNA, 1201 bp, Mus musculus
atcaatggcaggcgctccatggggctctagaaggaggctctaggtaaagtgtcaaggagattcctcctccatactcgggagccctatgggattagaagatggcttccctatatatagcaagtgcttcttcattgaccagcttacagcagggtggcccaatccatggctgatttggaccttctggtcaacctctggattcagttcactctatcagacactgaggggacagagcgggcactaattgctatgtagccaaggatgtagctaaggtgcattatttgactgcagaatcttgggaacccactcacctttgaccctatggtaaggtttgaactgtctactatggtgctaatcctgtgctcatagaacacagagcagtgctcaagggaagtcccgctactccagccttttgacactgtcacactgtaaaaaccaatgagatccacaaaggtagaacaggcagaatctggccaaaggtgcttcccagtttggagggcccatactgctggtcacaaaagggtgagagtctcctggatctgtttgtggctggttcccacaggccagctggactgagaaattaggattacccttgtgtgtgttcgtgtatgtatgtgtgtgtgcatgctcatgtgtatgtgtgtttgtgtatatgtgtgaacatatatgtgagcatgtgtgcttgtgtgtgcatgtgtgtgtatgtttgtgtatatgtgtgtccttgtgtatgcatatatgtgtgtgcatgtgtatgtgtgtttgtatatatgtgtgagtgtgtgtacatatatgtgagtgtgtgtgtgtgtgtgagtgtgtgtacatgtgtgtgatggttactattccagttcactctccagagctaggattatcccacagagcatcacaccactaggagaagcaaaccatgagaaaccacagaattcagtttccaaataggatcttagaaaaagactgaagaaaaggagccgctgacccaagcaggctgtggaagccatagagaggaattttcccaggctgctgcatctgcccttcagcttgtggttggccctgtgtgtgttggtcatgtgcctgcaccagttagggacaactgttgaaaatgtcatgctgccattattaagaaatgtaagttagggggctggagagatggctcagtggttaagagcactgactgttcttctaaaggtcctgagttcaaatc

SEQ ID NO: 24379 - DNA, 1118 bp, Mus musculus
tttactaaccctgatgcttacatcttagcaactcggtacttcaaaagtcttatgtgtgaagtggacataaagccgttattcacttagtcaagtgtttggaaggatcatgcgggtgatgtgtttattgtagcaaatcctgagaaacctcctgccatcaacattgttaagagtaccatttctgccatgtacgtattttctatgccaagaggcggtaaacttgtcttgtcaattataagttggcatataatgaattagaattgtggtagacaatgtaagcaggttgattgcaacattggagtagttaagtatcaaatttcatgtagcttttaaatttccacaacagcttttctttgcattttctttagggactaggaaaggatgtccaagccgaaataagttaaagaacccctgattttaacatttgatagaaccaatgattagagaaataattgtttctattttagaagtctggtaactgtttctttgaccttccatgattactgtgacttctgccttgtattccttcctggatcagacccagaaatgtctcaaaaagaatccatgatgacctaaagcagataggagatttccaattctgtgtaacctcatttgagattccccaaaggtcatttccaatcactttacacaataagcccaagcattgctgtgcttcccatcatccatacagtaaacgtctctgggctgagcttcaatgtgtagctgttggtgactggcgagctgcactaagatctcgaatttggcagaaacaggcagagcactgtgagctggaccaatccaacctcaaatgtcatcatgggaacactacctttcatttggcttgatttgattttctgttactgatgcccatgaaagaataaagggctaagagtctgctcctgtgagaggggagatggcagaagactggaggttgtaaggcatccaccagcttaggaggtagcacaccaatgatgccttctcagatgcgctaggacagaaattctgaaactcacagaaggagttttatgccttgctgtggttgaagataaagaatatgtaagagtatagccaagaagtttcagctgtgtgtggtggttaagaataggaattccagagtgctg

SEQ ID NO: 24380 - DNA, 4118 bp, Mus musculus
aagtgccttatttttcttcatggtcatttagtcaagtgtcctgtaagatcagctcctccctcagaataaagttactgcatgttcctcagtcgcccagtatgtgaaaggagatatgagaggagacaaatgagttgatggtctaaattataagatttgtgtcacattatcttgatgccagtttgccaaatctgatactgtgaaaaaatttgatagcttttctaatgtctgactagtaaattttaaaatgtcattcttttacaaatcataattagtacttttggttattaccgtcttcagtgttagcccaaagattctgaggtttagaaaaaaattatgtaagatctgaacatcagtttgcagacaaaattaaattagagctttattttatttggagaagagggatacaatggaatttttccttaccaattagaaataattgtaatgcctaaaaaactttttcacaaaaatgaatctttgaaattttttattgttgaaaaagtgttaagtaacataaatctaatcagatatcttatgtagtccatctctgctggctttagtaactgctcctaaactttttaactctaaaggagcgtggaaagcccgcatcacagtgttcagtgactgctctgctccattctttctcctctccagtttctctcttgaaagtcaaacagttttgtagttgaagcagtccgtgtgcaaagcctgcatctaaacacttgcgttaataagtcattaaccgctcagtaccagatgtggcaaatctcaagtgattgtggactcctggctcatcaactcatgccctcttccataccctcatggcttcacagtcaaggtcagcaggaagctcattggtcaccttcatggtgacctctccattattctgtctcacttggaaccattttcagtttatttactatgcaatagacagtccttgttttgtactcagctagctttgatttaatgtaccactgctttgtctttctgttacacatatggttttgatttatttacaatatatgctgtgccattttgatttttattttggttggttggttgaataaatatgcgacactcagaacacttgaggtgatagttttaaaaaaaacaaacaaacagtaccagtatttgatccagtctcatctcagctgtgttatacctggacaatttagatgtttatcaaaggtcttttatggggaagaaagcaaatgtgtaaaacagtagacgtgtgacgtttatgagtaatgctggctctgaacaaacttttgaaaacttagttgacagtgttttgagtcaactgaaaaaaagcatgacttttggaatctctgaatgccttggttctcagtattatcactctattgaatttttttttcttattaaagtatgtagtttaaaagtaagacttttttcctgacagtattatgtaatttttagcgtgggtagatgggagtgtcgcttgtatgttaccatacagctgacatgtattttttgtctattctttattatcttagtagtttcatgctgtgtatgtaccataaccaacctattgcctatgagaaacatgtaagataatgtatttacagccattgttacaagtttataatgtatttttctatcttgttttatatgtatgttatataacattcaaaagaatttttttcttgattgagaaaaggatacaaaatgcaaaatccacaattttgataactgaaaattgccaattgttttgcagtactttattatattgggtgtcttgtctttcttgggcttttagttagctgatgaatgaatacattagacacttctgggttttagttgggattttacatagcttgcattttagttctttggttctttgctgtttctattaacccatagcattattttaataaatgttataataccaacctactaactctggactatgtttgtttattaacctttccgtgtttaatgaaaacaaacagggataaataaagtcttgagttcctggactaacactgaagaacgtgatcagagataacatagtgtgacttgttttctatgttgtttgtcagctgacagttgtgcacacctctgctaaaatggctttgggtccttggccttttaccatggagggtaagtgccagtggagatgggagcaggctagcatctgtcagtcatttctcctagtcatgccactggcctttcagcatctgcaatactaattccacactttatttttcctgctccaaaataatcactctctgctcacagcataaagagtcaagaaatttactgtaatgatgcaccttgagagaccagtttgattctttgttgagtcttttgcctaaatttctgtgaacaggccagttttggtctcatagagttcatagctgatatttctcctgtgttgtttagctagctgctcctattagagttaagtcggcctctctaggtcttgcagtcccatcctgtctgtgacacacacatacacaccaccccctcttcagtgtcttgaagagctcaacttgggtagctttccccttacgcagttccagaacagcctagacaactacacaggaagcacggcagagacaaacactgtaatctgacgtgtgtgtgtttggttaaattctacagagaagtagatctaagatccttctttctcccattcttcacttggttgtgctctctgtaaagagacctcttcttcagcacttgagtccatttttgtgtcagatcaacagtaccttgtctggggggaaaaatcttacaggatccagaacaaacaaacaaacaaaaaaaaaaaaccctcttagaatgaattttacttttgaagtaatggtttatattttgaaattgtatttaagaatcctaaaaattaagggttgagttctatcataactttctgaaaggacactgttaaaatactgctctgtgcatatatgaagctcagaatagtgagcttagtttaattatctctgatcatttttggtcctgcacatacggaatatctctgttaagaggaggagaccgtgtcatatcactgggtagacaggtacccattaccttagcaagtatgtttagtgctcagtgagcgtttcagacactgtcaagcttctgctgcacaaaagctccaatggtaatatgttataacagttgaggaagaacttatgtgctgtttaatgttctctgaagcctgtgtatgcagtctcatcctgttttcagtgagggcacttgatttatgtctcatcaccaccattcctattgaaaatgttgctcaaagactcacatggtgcaaatagtgtggtatgccacattttcatgtaagtgcagtagtatcacacagcctgatgatgggataggaatgttctagtgtcactttcttagttgatgctgtttggtgaaatggttatctgtgttttattcaaaaggctggtgatattgatgtacttagtgaagtatcttttatttttatttttctttaggaaaaatatctaggaaaacatgatatgaaaattatattcacttcattgtagtgtagcattttcatgtatggcagtgcctgtgtgaaggagttgtagaaatgccctgtccattaaaaaaagaaaaaaaggttttgtgtgcacacaagaaagctgtttggttaaatttatgggtgtaaaggatgtgtgtgtgtgtgtgtgtgtgtgtgctctctctctctctctctctctctctctctctctctctctctctctctctctctctctctctctgttcgcttgtatgcctggactaggatgcctgactcttccttgatgacagctgttattctcgacctcagggttttggtggaatgaaacatgttgccaaagtaacggttaagtttcttggtctcccacatttttcaaagtacataggatactgtgcttaatcacatcttgtcacattttgtcacaaatcatttaatacctgtacagtgggaatgataacccattttatggacatatcaatttagacatatccatggtacatgtagtacctggtttatcctgtataaaattaactaaattgtgagttgtctttattttaaagaggcctgacaaaagtgtgtgtatagctggtgctcaatgctgaatcaaactggtcaaact

SEQ ID NO: 24381 - DNA, 1065 bp, Mus musculus
ttttttattagttgtgattagttttcatgttgtcattaagctgtcactagctgaaactaatctcttctctatcttttcttttctttttttgttttgttttttgtttctaaccacccagccgccaccggcaactaacctatgaccttctgacctctgaactcttcacccaatgatgacctgaccatgcctgcctgctgatcagttaactggtaatcgcctttgcttgcctgtcgtcagtgcagcgagctgaggcacttgtccgttcgtcttaccatctaaccaaacaaaagacaaagaaattgtcctccaactcagcttttccccccctgtttgggtgaaagtggttctagaacctgcactgaatagtagtaaagcaataaggcccgattcatcccacagcactgatcatctctcaatgccccaccccaagcgaacggtaagaaggcctctcttaagaaggggagacagatggccctaactactcagtgacagaggcagttactgtgagagacttgtaggaatttttttcttctcctagcgaagtcaaagctctctctgaatgtactgtgtgacaatgcatcatgcatgaaccttcggtcagggatgtcgttggggaagtgacttcaaaagtattcaaaatttgacatgctgtttgtttagtcactacagtgccctcaaagggcagacattgcagcctttttatattgcctgccaaaatttgaagtattagaacaaagtgtgccatgagagaaaaacttaacaaggagttttgaaaagaaatgcaaagaacaaaactacaacactattttttaaaaagttgagtatctgagttaaaatttccaaatctttattttacaccaccttaaaaattatatgagaacaaggtacatgcattatgtgtcacattactgggcaaactgttcaaatattttttttaaacctccctgtatagaaaatatcattaaggatgtaaaagccatgcttgcctatttgctgtatacatgtaatgaaattgtagataaagtgtagtgcattgaaacaaatgaacaaaaaagtagatacttt

SEQ ID NO: 24382 - DNA, 1062 bp, Mus musculus
gatactttgaagctgcatcatactgcaaaagtctaacataattattttacagagtgttttgattttgaagtaatttttccccctctttggtttttctttccccgtgttccttttaaattttttcactaacacaataatcctttctcactttgtactccagagccttcagatagttgagaatattagactaagatcttactgtatttggaaaatgacaacacattccatgcatggctcatctggagctgtgtttattttgattagttctgtttgtgttcaaaatgcagtgtcagcaaaccaaaacggtttttatcccccctgctccatctccaacttttcctttcttctagagatagatcacttaggaacacgatcaccacatgtactcactgggtccaagggagaggaccgaagcccttgacttacattattttatgatactactgtttctctctctctctctctctctctctctctctctttctctctctctctctctctctcatcttttgagaagattattattagcattcatttgatgcaaggaagcagcccgaggacatataaccatgtaactgtctgtatgtaagcacttagagtatctagttgcttactaaaaacaaacccacttccatagttatttcacaattggtttgaaacttaaagaccaactgactttatagttgtaacgaactatacgtgattttgcacagttaacattacctgtgtgtactgtaggagtccaggacatggcagaggatgtattttagatgtactggatatgataatgtactttgttaagtaatccacactcaaatataatcagaaattatctaagtaatgatttgaccaaaacattacttacacaaatttaagactatgggacaaccgtttttgttttaaataaaagtctgcttccttttaagaaattcagggaagatttgattatattgaagatacaatatttttgtagtatttataaactgtcctaattgatagactatagaaaccatttttgtcatacaaaggtaaataggtctattatatagaacatttaaaccc

SEQ ID NO: 24383 - DNA, 1197 bp, Mus musculus
ataccatttgtcctcaggacactgaccataataatcagtttctgtgtggtctttttatctgttttttagattaaacactcaaagctgaagtatttaaattttcaaggctgtataattgattcataaaatagataaagtattatgggagcctactgtaagtaactaggttgctgtttcattacgaaaatagtgaaatagtatagtaataataatctggatacctgaaaatattgttgcatctttcaaaatacattattagggggacacagttatattagaaaaagaataattatttagttgataagtgacaaagtaaaatatttttaaagtaaaatgtttttgttaatctttattgcatggtgtttagttgcatgttggcatgtctgagtagcatcttgtattcctaatattttagttgacccatgggtgaaacttgaatcaatggtgggtacatttttaaaggtgtacttgagtgtaaagtaaaggtccatagaggagtcctcccccaccagatctcagagtttcagtagaggtccttagaatccaattggcataagactgtgctgtgtatgaggccctctgctgtgtgctgcttaagcacatgtgacaggacagaaaaggacttacagaaattgacatagactggttgctcccctcccctcccctcccctcccctcccctcctttcaacttttaaaattatatttaattcatttctgattcagttatcttttataccacttcacttttagatgtgtgttctacttagggcaagaacaactagaatcagggttacacatagttttttcttttcttttgttttttggtgttgttgttttgtttttttcgagacagggattctctgtgtagcctggctatcctggaactcactctttagaccaggcttgcctcgaactcataaatttgtctgcctctgcctcccaagtgctgggatcaaaggtgtgtgccaccacgcccggcacacattgttttcttcagtcattggctattaacaatctggttactgtttgtcctgtaatgctatcaggctcaggcttcttaaaacaagtgggagcacctttctgcacacttgggagttttgtacttggtgaagctctgtgttgtctgtcgctcagtgtctcatctatgataatactgaacagcttgcacaaagagccattcctgtgtcaacttattg

SEQ ID NO: 24384 - DNA, 1211 bp, Mus musculus
cactcacaaggggcctgaaacccttggtcgctaattgagaaaatgccttacagttggatctcatggaggcatttcctcaactgaagctcctttctctgtgataactccagctgtgtcaagttgacacaaaactagccagtacaattgaccccttgtcaacttgacatacaaacacatcactagtaagcctcaacccttacattcttattcatccccaaggtctaaataactttaaacgtcccacagtctttacatattcttaaaatttcaatctctttaaaatatccatcgcttttaaaacccaaagtctttttacaattaaaagtctcttaactgtgggctccactaaaatagtttcttccttcaagagggaaaatatcagggcacatcacaatcaaaagcaaaaatcaatctccaaccgtccaatgtctgggatccaactcacagtcttctgggttcctccaagggcttgggtcacttctccagccatgccttttgtagcacacgcgtcgtcctctagggtccagatgcctgtactccactgctgctgctcttggtggttatctcgtggtactggcatctccaaaacactccatgaccccttcagtccagggccgtcaattgcaactgaggctgcaccttcaccaatggccttccatggcctctcacagtgctgagcctcagctgctctgcgtgaccccttcatgccttcaaaaccagtaccacctgggtgacccttacacattaccaagtcccgctgcaacaggagtacaaacttggctatctctggaacacagcctctttgtgctttcagaaaacacttcccagaagatgtcaactcaatgatgctggtctcttcttaatcactgctaatttcttagcttcagctaaccagcatcaatagtcccagtaatgcaaaggttttgctttagtagttttggtatcttgttaatcacagctgattcttcaaccccagataaccagaaccacagaataatcaaactccaaaatagcaatggccctgaaaagagtctttaatccacccccccccccccgaaatttcacaagccaggccttcatcttctgcactgttctcaacattatcttccaagctcccacacaacatctgacagagctcttaacaccaaatgaatcttctagcccaaagttccaaagtcctccccaaaacatggtcaggttgtcacaggaat

SEQ ID NO: 24385 - DNA, 1099 bp, Mus musculus
aacacatataaacaaaagcactaaatataattaaaaaccaaaaccattattctaaaaactgtttctgacagtttgagatgttttctggattgttcaaataattgttcatatgtacatatcttttatagacagtaaagtgaatcatggtaattcatagttttagatttctctgcagtgttataatctgtccttgggtattttaccaagtagttgagctatatgctgagggatgtgaaaatacccctatatgaaattccaagtaatattaacagtatgcacaatctaaaatttcctccatttttagaggtctaagggttgaggggtccccccccatccatttatttatttatttatttaaaacctttttttaaaatgaagttataattatttcaacattttgaaagagataaattagtttagtttgggattactatattccattagttctcaagaactcttaaggattttgctagttaacattttcatgatggattaacatttgtctctatctcaatggcgttaacatctagtggcacaattatctaacacaaagacagctccaaagaacttgttttattgattctgttggatactcagttcttggtaaattataccttaagcacagatatgaatttttttaaacctctttttattgtggaaaaaattgaaacagcaggacaatcagctgcctaatggactgttatttgtctaccaaccaccactacttctttcaggagggcacttctcattcattgcctttcttatttctccccactgcatgttagcttatttgagtagtaaattctggacatacagttttaactttaaatattgtattaggtagctctaaaatagactcaataatagtaatatgttaattttctttatatcaccaaatatgtactcaatactcaaagttcatgtcccatgaatgttcttttttaaatgcttgttgaagttatactcagggttaggtatgttaccatacccttttaacacagcagcattacacaggcagtgaggcatgcaggtctctcaatttgagggcagtctggtctgcacagtgagatcctatttcaaacaatcaatccccccacaa

SEQ ID NO: 24386 - DNA, 1227 bp, Mus musculus
atagctttaactgctaaatgtgtacactacactcagactttggctaaacttggctatgtatttagtctgtgagcatcttgagtgcattagaaatatctaaatcattcaataaggtagtatccagtttaaatcttgctgaggcagattgttcatgaagaaaaaagagctttttttgtcttatgtgttttatggcaattacataactaaaactatcatttaaaatgacagacctcatttttaagcttgaaaatattaggtaaactaaatctatatgattatggctaagagtctgttctgaagttagttttaataggatgtgtaatttgtctagtattaatttgatttgtggtaaaaatgaaggctatcatcttgttagcaggctcagtccagagaatgcccgaataggttgacagctcctcactaaagtgttaatattttatcagtgaagaacccctcccccctttcctggattagcaagaatattttttgtctaacgcatttaaaatttttacttttaacagaaattagcagagtacggaaagacatgtacaatgacacgttaaatggcagtacagagaaaagaagtgcagaattgcctgacgcggtgggacccattgttcagttacaagagaaactttatgtgcctgtaaaagaataccctgatgtaagtatatcttgttgttttgttcatggttttctgcttcacatactatatggagagataacttttgagtaaatgtgtaggtattatcagctgctttaaaaggattgtgtatgaagttagaaatgggactagttttatgtggctaattgttttctctttaaagtatattcccattagaattttgctatgtcactttgggaaataatcatgcagaagactttggaatttcaaaaagaggtcaagagttgtgggaagacttttatactgaatcttcaagatgaagtgcaactctgaccacagaatccatagcttgaaccatgtcattctttctgtacgagagtgctggtcattatggttgcttccagctctaacgtttccgagaaatactctttttagtgtgattcctccttatcctccaagtattagtgagttgctcaaccagtttgtagtatcttgttggaaatagtctcctcctatacgtgctgatttttaagttcctccaggctctgctttttgttacaaaaccctatatgataaaattgattctatttctctgctctcat

SEQ ID NO: 24387 - DNA, 1099 bp, Mus musculus
tgttcaaagaatagactgccagaaaaaaaaaaaaatgaaaaggcagctaactctacaaagtggtcctttgttgtgggcatggtacaagaaggaatgcttgagagtgcttgtggatctgtaaaggaagacaccaagtgagtgctggccagcctaatggagctagctggtgaacttagaggaaagacaggaagcagtttgtggaggtagtgacaataatctgctgggcccagggttgactatgtttttaagccttgttctggatttagtacaaaaccaaatcattacaaagtcagggcacggtcaatttggtcagtagcaagttattgggagctagttttatgatttgaaatacataggacaaaatcaagcatacatctgttaaagtcttaagagcatacttaggaaaaataatacagacttttgggggctggagagatggctcagcagttgagaactggctactcttctagaggacctggattcaattcccagcacccacccgacagctcacaaccatctctaactccagaccaggggcatctgacatcctctcctagcctctttgagcactaggcacatacattcacacagtgtacagtatatcatatgtgcagaaaaaaatgctcatacacacataaaacaagaaaaagttaaaaaaataaggatttaaaaaatttgaaatgttgtataaacttcaatgtcatattctttatccagtttcaaaatttcctcatagatggtgtggaagagaatatagaaataactccaagaaagacatttcttggttgagtcttggtagagggaaaattagtgcaaatcaagtgatcatattcagaactgctaggaccagagatcagaaaaatgtagacatagcagtctggagagggtggggacttgctcttatcacaagtttggttgttgcaaaggtggtgcagggttctttctttattctgtatgctgatctgttttatgatgtgccattcatgtaaggactgagaagaagagatttacaacatatttccacacactgaaaaaactgttagagcttccagttgtgaacagaacgaaaatggaagtaattttgccaattctgtgctat

SEQ ID NO: 24388 - DNA, 1193 bp, Mus musculus
ggccgctcgggcgggacggccggcgcagggccgggccgcggcggggaggacgcgcgccggtggccgcccgcgcggggccggggtcgcggctgagggggacgcgggcggcggcgctggctcgtcggcgcgctgttgctgaggcggcgggcgcggtcgggtgcggcggctgagaggaatcccggcgggactctccgcgacgcgctgcgctcgccgccgcccgggcctcgcgtccgcgcgcgttactatagtttgggttttttttttttttcttaaacctcttcgtccaccttcctcgctaccccctcaaaaaaaaaaaaattttttttttttaaacgtcctgttgcttcactggggactctcgggtgggcgtcacgtgtccagacacgtagccgagaggctgagagcgcgtgcgcgcgtcgaggactgtgaccacgccccttccgagggtcgctccgccccacctggcggagagcgcgccgtgggggcggggggtgggggggaagcgggcctggagcgcgcctgcgtgggggtggagcgggacgaagatggcctgcggacggaggagcgggaccgaaccgttctggcgcggcgcccacctcgcggggcgggaaacccggccgtcggatcgcttggggtgcgaggtggcggcggactgagttggcgtgggcgcccacaccgcaagtgtctccggcggtagggactccagtgaggtttcccctggagccagcgccacgcgtgacgggcctcgcgttgccgtgggctgcgaggcggccccggaccgtgggcggagacggcacacgcgtgcgcacccacgggcgtgcgggcgggctctgttccatgcggcgtgacgcgcggttccgttaatcctcaccgcaggttccagtccctggtggcggaggcgctggctcctcagcggtgcggcccccgcacaagggagcctgtgtgaggagtacatattcggggaaaaaacgaagtggccaacgcctatttttacctacttgacaaaaataaataaataaatgacaggcagagggccaggacaggggctttctatggcgtgtagaggaagttctgccggttacatttgtttcggaaacaatgttccgaattgcagcaatgaagtcctgcgatttatagaagctgtcggtcattaaatctgcatcatccctgttttgttgcaagttctctataac

SEQ ID NO: 24389 - DNA, 1147 bp, Mus musculus
attgttgtcgtctaacagatttacaaagcacatggcctcaaacagaacccttgtgttgtcctcagactctggagcccagctgtccagagcaggcctgagtgtgttaaaatcacaggcctccagagtggtgctcctttctataatccctgtgtgaaggtgcacatccttgcctggccttgcatccgtcccctacacagtccttccctgctgctgcagagctggccgtaggacagccttcagacacttttgctttcatcgattataagactcatggtaattacagtagagtgtcccagatggcagaggccttcagcatctcaagaccatgatattcataggaatgtagtcccctctgccacatatgtgccatgttcatggactccaggaattaggccaggggcttgcatgtagaggaagagaaatgattctgactggcaccccgttactagagtggtctttctaatacacatcttaccctgctgcccttatttactaacttctgctacagaatctggtgttgcagggtccgcatcttctgtgtcacagcctatagcatcaccacttagaaaagcactcccatttatttgtcccatgacaccatgacatcatgacaacacgggctgtaggctggtgtgtaactttgtctccagccagtgtccagcctttgggcagctttgctagaggtgagactgtgcactctctgctcggtgccagttctgtctgtcagtgcctctgtcttctgtcttctcctccacttcactgtaccttattgatcagcctggcagaggtccctcccatgggaaggcgagccctcaggagcagcctgtactgtgactggaccccagcctttggtgcagttactgcaaatgtcagctgtcagtgaaggaaggagtgcagaacgcagagatgctgccctgacaaagatgcccctgcccttcctccaacaatacagaccagtcatctgaaagttcggtaaactaccgtctctcctaataaagagaaaagacacaggccaactctttagttacacagcccaccggatagtgaaaagaaaaaaaaaaaaaaacccacagccctccatcagcccctgtgctctgtctctcctcatcatttgggccactttatgcttttgccatgtcagctcttc

SEQ ID NO: 24390 - DNA, 1162 bp, Mus musculus
acagggtgggcgggcgggacatggactcgtttgtgggctggctacaagagatactggggacaggtgatgaaggaacagggcttcttagctctgaagtcgatgaaatatattgccctgaaggagctgtcctgtgtgcagctcagccttccataagagcagacattcaggaggtctgagttccctcacatgtcggaggctggtgccagggacccactcggccttgcctgtgggccagaggccaagcatccggacacaggcagatacaggaacgtgcctgcgccagctggggctcagcattctcttgcttcctcccaggtttgcacagatgaagagtgaagtgaaccagtccgtggcctagtagtgtgtggacagaatcccgtgatcactactgtatgtaatatttacataaagactgcagcgcaggcggccttcctaacctcccaggactgaagactacaggggtgacaagcctcacttctgctgctcctgtcgcctgctgagtgacagtgctgaggttaaaggagccgcacgttaagtgccattactactgtacacgggccaccgcctctgtcccctccgaccctctcgtgactgagaaccaaccgtgtcatcagcacagtgtttttgagctcctggggttcagaagaacatgtagtgttcccgggtgtccgggacgtttatttcaacctcctggtcgttggctctgactgtggagcctccttgttcgaaagctgcaggtttgttatgcaaaggctcgtaagtgaagctgaagaaaaggttctttttcaataaatggtttattttaggaaagcgaagtcagcgtctgttactggctcacggcttaagagcaggacggcctgcagaagtctgcccttccccgctccgccctgcacttgattccactcagcacagccaagcttgcccactgggacgctgagctgggtgcgtctaacctgcagcccgtgggccatgtgcgtcaaaggatagctctgagtgtggcccaaggcatttgtggatgacagcacatcagtgtttaaggtatggaaggggaacagtgccgcgatcttgtgataggccggccaccatggtttcagagcataacctgactccgcaggtaggactctgaagtagctggatattgtcgtcgctggtcttggtgctt

SEQ ID NO: 24391 - DNA, 1198 bp, Mus musculus
aagcactgagagcttaaattaagacatgttcctcagcctttactctgttgctattggggacggtgattctttgttgtatggtgtagtgaggtgtctcctgttatatgaggtggttgtggggtgtattctgttgtataggatagtggtggggtgtatcctgttttatggggtggtggtgggctgtcttctgttatatggggtggtagtgggttgtctcctgttataggtcatagtggtagggtatatcctgttataaggagtggtagtgggttatttcctgtaatatcaggtggtggtggagtgtttcttgctgtatgggatggtagggtgtcttctgttgtttggggttgtaaggggatgcctggcgcagtccttgccgcccgcggagacaagaacaacacagacaccaagacagacgggttcacgcagcttccgcagcttcctctttacttacagcttactccacagctttttctacttagggcaagggctatatttatacagtagcagcaactgacctcatctcgctccacaccacctcatccaatcagaatcacacactctccaggcacgcgctcaggtcagtcacagataggctgacagatctggatctaacttggcaagcagcttatgcgtgcagttttactgcgcatgttcgggcaaggcagtaaacatgtgggtttcaacaggcctggcaatgggctagggcaccatcttggcccatgcggccgcacctacttcctgtatctccccctttttgttttattagtagctctgggattggcatctgtcttaggttgcccccatctgtgccacatccttacctgtcatgggagtgacaaactcactttcgccatcctgtcttaggttggtatgtgcatgttagggtcttacccatcattgattactgatccagcatgtcgagccaacattagggggatgttcctgcttccaaggctgccatagcctgcactaaggctcgtctatcagccctgtgccaccttcgcatatgtgccatccatcaaagcattcctccacacacaacagtcagcaggagcgctcaaaaggccatccctccccaattttttaagaatcccacagttccctggatgatctccagccattggtttgcagttgcaatctccacacgggtgttgttcacagcaacaatcgatgctcgcaattccttcatctttgt

SEQ ID NO: 24392 - DNA, 1226 bp, Mus musculus
ggagcattgccttctccagcaatggagccggtttcaacgggcccttggtagaaggccagtgcagaacccctcaggagacaaaccgtgtgggctgctcatcgtaccacgagcacctccagcgccagagggtctcgtttgagcaggtgaagcggataatggagctgctggagtacatggaggcactttacccatccttgcaggctctgcagaaggactatgaacggtacgccgccaaggactttgaggacagagtgcaggcgctctgcctgtggctcaacatcacgaaagatctaaatcagaagctgcggatcatgggcaccgtgctgggcatcaagaacctatcagacattggctggccagtgtttgaaatcccctcccctcggccgtccaagggctacgagccagaggacgaggtcgaggacacggaggttgagctgagggagctggagagcgggacggaggagagtgacgaggagccaacccccagtccgagggtgccagagctcaggctgtccacagacgccatcttggacagtcgctcccagggctgcgtctccaggaagctggagaggctcgagtcagaggaagattccataggctgggggacagcggactgtggccctgaagccagcaggcattgtttgacttctatctatagaccattcgtggacaaagcactgaagcaaatggggctaagaaagttaattttacgacttcataagcttatgaatgggtccttgcaaagagctcgtgtagctctggtgaaggacgaccgtccagtggaggtaggtttcaatgggggatgtcccgtagtgtcacgtctcaaatccctcttgccgtgtagtattgatcatatggactttaatattcttagcatttcaaggcataaatgacagatatgaattgcgttataattgctgctgtaagttaaagtgttatggcaagtggatcaaatttaatgaatgaagcacaaggtggtgtgcggatgaagacaatcgtataaataccagttgggaaaggacaaactaggtgtaaagtggggggcggggcctgggtgaccacaagctgcaggtgagtcagtaatgttagtgtcatacacaggtgatgagctatccacccacccacccatttagtccccctagccctgagggaccttgtgcgagttaagcaggtcctccacctctgagctggatctctggctctttggattctttgaaaaagcttgg

SEQ ID NO: 24393 - DNA, 1207 bp, Mus musculus
gtttctttggacaccacactgtgccagggccgtgcctccctgtgtgggccatgggaaatgctgtctgctgctgttgagcctgtgcccttcaggaagagctaggctaggccctacaatcctggcaggcgggactgtgcttgccccttcattagtgtgcttgccagagcgggtgcacaggtctgtttttagctctgtctgatttgtaacttctagtcttttgctgtttcctcttttaatttgtagttttaagtttgaagctcagttagatttgaaagagctccagaggcatcagacacaacacacagattgtgcccacactgcacctgacagttcgcagcttgtggccacaagcactgccactactcccttgaaagaaagaaggatgacgatgctgaggagacaggcagagaagttttgcagcattcccaaagaaagctgtgaatgtagctcctgtgatactaaccagctctttctgcatctgttatctttcataggcaggagtgcatgttgggagagtcggctcgcaaaagtatggaatccgatccagaggacttttctgatgaaacaaatacagagactctctacggcacctcacccccaagcacacctcgacagatgaaacgcctgtcagccaagcaccagaggaacagcgcagggaggccggccagccgatcgaacttgaaaggcgagcctgtcacttgcaagatccacgggacagggcgtgacacctttatgagacaagcctttgacagcattagtgattcctttgttttaaattgtatctcagtgttggcggtagggttgttattttgacttagcaccacaggctatgctgctggtagaaggggcaggtgattatcagtgcaggaggttttgtcctgagttgtgttttaagtcttttgaggctatggtagaggctgcaaacccaaggtggctagatactacacgggtggcccacagttaccctttctagctctcaccgaggtttttgagttcttttctccagcagtggtatattgggcatctggtaggagacagccaggctaaattctggaaccaaccaaggtctctttcttctgccagagactcagtgtgtggggctcttgcatgctaagctgctgccagatgggacttcatatctgaaagccacagagggaacctagatggtacccagatcctttcctctttgtgtagcatctcagagccc

SEQ ID NO: 24394 - DNA, 2200 bp, Mus musculus
gaggctcttgccacaggctctactttgcaggttctcatctcataccccagagagaggccctggggtggcctgtatcaggagagctctcctgcagcagacaggtctctttgctgagtctcatggtctctgcttctgttccctgttaggtcagcaaggaggaggagacagatgagaatgagacagaatggctgatggaagagatccaggtgccagccccaagactaggcaaggacgggcaagaaaatggccatatcaccaccaaggcggtgaaagcagaagctctctcgtccctgcatggggacgaccaggacagtgaggatgaggtcctgaccgttccagaggtgaaagttcactcaggccgaggagcggaggtggaaagctcacagcccctgagaaacccacagcgcaaggtcctgaaggaaagggagggtgagaggctggggctggtccgaggtgagaaggccagaaaagggaagttcagacccggacagcgcaagccaacagcccctgccaagctggtgtccttccatgatgacagcgacgaagacctcttacacatctaactccgtggtgcctacagaagaaggtggagccatggacagccaagcacctccaaccaaataagacttcagctcgatgatgcgtctgtcattttgcctttaacaaaactgcttcaaagggaagagtttctgtaatgggggagaggatgggggaggtgggcaccactccttcatgatcgtttacagtcaatggaacaaggtgttgcttgaatcggccaaagggcggtacttcgtgcccaggggtttgccccaagtcctcacttacgatcatagctgctgtgtgcttccaacaggtgcccaagccacatgcatctcacaacagagggctgtgtttgaaaaaaacccttgctgctttagaccctacggggtgaccatttatatttttagcattgtaattctctcccctatttattgactttgacaattactactcaggtttgcgaaaaaggaaaaacaaaaacaaaaacaaaaccagtttcttttgccagcaagggcataaggtgaagctggccgtctgccggagccgttgtccatggctcctgaactggtccttgatgcacacttagtgagctgcagtattctattcttcgctttgcattttgtgagggcacacacacatgcacaggtccccgagtgcctaggtttgggaaggcccacctgctccgtgccctacctcatctctgtagttgcagctctttgcacgaatccctctgggtgttgctcttgccagctggtgactcccagcagctcacccaggcgggcgttcgcgcacacggtggagtggaggctcttggggaggagctgcgcttcaggtttgagctgtaggtctcatctcttcagggtctcatagtgccacctttactgtgctttttgctttttttttttttttttttaagggggaaaatgtttatcacccattcgacctataagaagccttaatttgcacagggtgacttattacagacaccgtgaaacgcggtgggccagtgttggtgtagggccagtgttggtgtaggggctgtgctagggcagtgtcccaggatggaagggcaggcccagtccactggctgtggattcttttcttgatgtgttcagtgacttgtcacattatagagttgtatataggtggcatttacatacccaaaagcaaagtaccccgcagaatttcttggtttatgcctgattttgctagcttatttgatttcacattgagtgtatttttaaaaattgatttttctcttcatttttaatcaacttgactgtaatatgaagtattcaatttcaataaagataaattattaactaggtgtaagtgactcaccccacccccaacccccctgattatgataacttctgagctagtggccaccctgaatgcctggcttttccttctgtttacctttcagaaggcattcgcatttggttttttaccacagtgtcctgtaaagctactcctcccctttcctggagttgtctaagtctgtcttcagctgtccctggatctcagggctacactctccctatgtgagcctctgctgctctgctcttcccgtctgccaaagcaaaactgccattcatttctagtgaccagaaaggcccaagtgaatgcatcaagtgaatgcatggcttgcttgccacct

SEQ ID NO: 24395 - DNA, 1128 bp, Mus musculus
tccttgcaggttactcgggatgcccgcacatacagtataggggtgtgcacagcagcagctggcttaggccaggaaggctgcaaggatggcggtgtctgtctgctctctgggaacaaaggagcttcttttgggcgccttgcatcgatgcagctggattacaggcaccaagatgaagcagtcattctgagttatgtgaatggtgatccttgccctccaggtaactcttcacagtatggtcaagttcaaatttcttgtaaatagattgacttagcagaaaaatacttgaggaatgaagcttcagacctgtgagcactgtaccctgccacatctccttccctggtatgaatgcctgtgtctggaacatgatgctgtctgttgcttgtctgtttgggtgaatcctgtctagcagggcaggtacacagcttcttagggagtctttgggtggcatctaaggcatggctgattcattgacgcttgtgtataatccatgcctctttccttccagaaacggatgatggcgagccctgtgtcttccccttcatttacaaagggaagagctatgatgaatgtgtattagagggacgagcgaaactgtggtgtagcaaaactgcaaattatgatcgtgaccacgagtggggcttctgcagacagagtgagtgggtagctgaatttgggggaggggagcaggtgttgttctatgggtggccaagctaattagtgattattatgtaagttttgttcttgttggctaaggatgatgttcatggagagccaaatttgagcaccatagctcctttgcgacttaggggtggaaagagagtggcgtgaaggcccacactctgtagttctctacatgatcgaggacaagcatttgactcatgactagctccaagtcttctatgggtggccctgaagttttgaggttgttacagatgcttggctgattctttaaattcttgccattattaatgtgtaggcaagtattgaatgctttcccaggagggattttggtgtggtctgaggaactgagtttgtaagtggatagattaaggagtgagacaaactgtggctggggctgcacttggggaaacagccaggagtaataaagaggtgggagaagtcaaggtt

SEQ ID NO: 24396 - DNA, 1183 bp, Mus musculus
gacgcagctgcacccactccagtttgctggttcctagcagtccaaggctgggcggtcttggtcagtattccttaggtttttatttattttattttagtttttattttaatactacttctttttttccttcttttgggggtaaggttcttttttttttttttttttttggttttttcgagacagggtttctctgtatagccctggctgtcctggagctcactttgtagaccaggctgacctcgaactcagaaatccacctgcctctgcctcccgagtgctgggattaaaggcgtgcaccaccacgcccggcggagggtaaggttcttacactttatccaaagttggccttcaactcactctgtattccaggctagcttgaactgtggcaattctcctgcctcagtccattgagtgctgctggaactgtagacatgttctatcatacctaggtttagcttttaagctgtcattcatggtcattagaaaaaaagttacttgtagactcaaatgtagtcttttcttttgaacagacggagtgtactgtgcggaatggaagctcgattattgacctgtcccctctcatccaccgcactggtggctacgaagcatacgatgaaagtgaggatgacacctctgacaccacccctgacttctatatcaacatctgccagccactgaatcccatgcacggagtgccctgccctgcaggtgcctcagtatgcaaagttcctgtggacgggccccctatagtaagtgtgtaaggtcggggttggcaagtttctagtcatagcctgtgtgctgggctcagacagctaagtgtgagatcgaaagtatgagagtgtacatggagcgggcggccaaccaacagtactggccagggagtctgagctgcttgaaaattgaatagttgcttccatttgcattttgaaaatacatgtgtatgtgtgagtgtgtgctgtacatgtatttagcctgtggaggctagagcaggggtttgtgtgagtgtgagctgtacatgtatttagctgtggaggctagagcaggggtttgtgtgagtgtgaactgtacatgtatttagctgtggaggctagagcagggtttttgatcttgtggggttggagttacaggcacatgtgagctgcttgatgcagtgctaggatggggacctgagcatcctctggaa

SEQ ID NO: 24397 - DNA, 1399 bp, Mus musculus
aagtaaaagttaggactcagctgagtaggccatgaactgcagggccacagagtgtttctgaccctaagcccataggtttttcttgggacacaccacatgaggtgatgatgagtgcctccaagcagtctatcccagggctgcatcaaagaaggttagatggaaaactgacaaggctgtacttggctcagtagttaagagtatggcctgctgttgcagagaattgggattccattccagcacccacatggtggctgacaaccatctgtaactatagtcccaggggatctgagacccttttctgactttccaggcataaacatacatgcaggcaaacacactaacacacatgacataataaacctaaaactgacagagttgacatggtggtgtctgtttttgcatgtacactgtcacaggtcttgcattagcaccgcagcccaggagccttacagatgtgctttgtctggagccttacagatgtgcttttcttgagcaggactccttagccagaagctgactttcgaaaacggactgttgaaaatgaactatactgggggggatacctgccataaggtgtatcagcgctccacaaccatctatttctactgtgaccggactacacagaaggtgagcccctgtggcactcccactgccgtcccactccagctgctgttctttcagggctagtctactctcaacgtctataagatgcattatttactgagcacctgtttgcatggccatccttcacctgggctcccatgtttacatattttctccttaacctttccagccagtgtttctgaaggaaacttcggactgctcctatatgtttgagtggcgaacacagtatgcctgcccacctttcaatgtgacagagtgttctgtccagtaagttcacatatctattggctttttgtgtccttccttggcaaaattttgcttcacaggtagtgtcttggtcagttcacccacttcttttcacactgggtagatggctccagatagccacatgtggggctggtacatcagacgcacatggagaggaggagtcaaggacagaaacagaggttcggagccttcctggtttgtaaggatggagtggcttcaggtctagagagcaggaggcttggtgaggcagcttttggaaatggctgtgggtgcatacgctccgagtgccagggggtggcttctgctggccactgagttataattgtcactggcctgtgtgtggacagacttttccaaacttggcttttcagatagctcattttgttgaagtgaacatggactcatcaaagctcaaggctgtgccttgctcactctgcatttggaaagttatgttctgcagtaaagcttgattcacaggacatcagggacacattgatgcttgagccct

SEQ ID NO: 24398 - DNA, 1156 bp, Mus musculus
tggacagagccccaagcgtcttcttgctgtgtgcttgagctgcggcggcagtgcccatcttgaatttgtggctctgctggatttactggttccagcacaggaggattccccccctacagtcattcaaaaggcttttagatgcggcctcggacagaccccctccatagtggagtttacaagaaggccatcatagtgtggttgcttggctatgccacatttgtgagacctggagctacaggtttgaacagggttgtagggctcacacagtggaaaagggcaacggcgaggacctgtgtccaggtaggagatagtcactgcaggaatggtagcttaaaggcaaagtgacctttctccttcagcgctgttttgctctggcagtagtttctgtctgagaagcttgcgtggtccgctgtcccctgtgccatgactggcctgacatacctgtgttgtgtttatgttactcagggttttcctttgatttgtcactcctcacgaagaagaatggtgcatataaagttgagacagagaagtatgacttctacataaatgtttgtggccctgtatccatggatccttgtcagtcaaactcgggggcctgccaggtagcgaaaaggcaagtaacctgattctgggtttgctctttgggattgtgggctagcaaatgtttcgtacagaggtagttaggtttctcttggacaccattgcttgacaggcatctaactactgagaagacctggtcagaagaatcgcaggaccccagagaaggggccaagccttatccttaggctgagagaggcctgggcttattgatgctcacctgggaacttgagctttactgttgttgcatacttatgtatgtagttctccttactgtatagaataggtttagttgtaatgaattgagctgcactacaggccaggagtactgagagaaagttgtgtgtgtgtgtgtgtgtgtgtgtgtgtgtgtgtgacttttctctttccacagccaaaagagccacatatgagattcccagggactgcagtgtcttggtctggccttgcttttgcccctatttgtgtagccttagagaacagaactcctgccccatggcactcactcccagagtgacatttctgtgttcattttagtggtaagtcttggaacttgggg

SEQ ID NO: 24399 - DNA, 1135 bp, Mus musculus
ggggattaccctggcattcagaactagagacgcatctcagagtgactgaggtctgtttttgtcttactaagggctcaggcatagacatcttcagaattcagtgtggggtgccacagtggggtgagtgccacacaggtgtgagtttctgcttggtcatgagtaaagcttgtgacttgggccgtgctcctcagctgcccacgtttaagggcagctgaggctctagatgcggaatagtgtcttttacagataatgatggtgcccacacaaccctgtccttcagatgcctttgggggaatcccatgtatcattttcagcatggcaggaggtggcctcgatgtgattgataaattttttcttttaagaaaattggtttccatcacagtcaggttaggtgggctgaaagaaggtcctggtgacccgctggcattcggctgagtcttggtatactttcaaatgtttacatgatgagaattttctactccaccttcttttttttcccccagataagaatgggagtaaaaaccttggaaaatttgtctcttctcctacaaaagagaaaggacacatacagctctcttacactgatggtgatgactgtggcagtgataagaaaatatcaactaacatcacacttgtgtgcaaaccaggtaatgtcacagaagaagagacatacccacattttccatcatttctgtagtagagctgggagcaagggcggtgctgagcactgctagtactagtctctggtgatgggaatcaagtcgtttggatttcagcctagaaatggagaaaccatatgctctccacagagagttgtgctgacacactccaaaggagtcgtgagtctctgcatgacatcctgttcataaggactgtcagaagatcaggggtgtggagtgctgagtttcctccacggggggatcataaacggcttagaaatattttcttgattgcagcatctcacccgtggctgtccctcccctcttgagtttctgcatttgtgcgtgtatttcagtgttcccaggatgctgtgttccacactccacagttctgtttatgatttctagggatttccttgttgacatggcatagttttactattttaaagcattttactgctgggaatttagatgtt

SEQ ID NO: 24400 - DNA, 1218 bp, Mus musculus
aggagacaaaggacaggggtggttcaggagtttttctctaagctacagagatgggaaggtagctgagggagagccaggaactagaaaagatccttgtaagtcagtggatgtttgtagctgcaggaagtggtctaggactgggaaagaagagggatgtagatgggaggaggtacttgcagacataagccttaagaaggggagagagaccttgggaatggtacagagggctgaactgttttttgagacagggtctcattcactttgtagccctggctggcctgggaacttgctgtgtaaactaggttggccttgaacttacagagctcctcctatctttgactcttgagtgctgggattaaaggcttgcactaccatgtctgacagaaccatgtttattctatatataagggacagaaatcactgttctgtatgttcatcacaagtttgagatctatcagccccatggggtgaaggaagtgtctcacttcttctctgcttcctcaggtaccatgctatgcatttgatgacaagttacagaagcatgatttaaacccactgatcaagctaaatggtggctatctggtagatgattctgatcctgacacgtctctgttcatcaacgtgtgtagagacataggtaagagttggtttaggaagaagggtggggtgtggtcagtgcctgccctgacccctttgacatgcacatcctcattagatctctgagaacgctattgtcctgaaagtgttctctggagagcttcgtttgtctccctcagcaaatctgatcctttccttccaccaaatacaaattctactcaagctattgatggaggttttctctgccagattatctgaaaaccttctgtttgacatttcctctaccagacactctgggatttggggctccatggtgagctttgtttcaatttgctgtgtttacccaaaccttctggctttaagttggagagtgggtaaaagggctgagggatgacaaagactctaagagtgtggttgtggtgtgtgcttggggtgggataacccctctggtgttctccgtagaactatgcgagaggccagcatatctctctttgatagacagaggctgtaaatgaaggtctctatcttagaagaggggtacagttttactatgtatttatttattacctgctaacctcactagtttttgtgcttcccttgtgggttcaatactgggagccc

SEQ ID NO: 24401 - DNA, 1190 bp, Mus musculus
gctagctgctgatttacttctgttgattgttcttaagagcttggtgtttactgtaggagaaacaggacttggaggtgaacaccttggtctttctcatgggctggggaaggtagaagttaactgttgctctgcaggggttaactagagttaactggtctggttgccagaaggggctgtctggggtgggatctggtgcctctgcccaggctctgctgctcgtgggctcctcggggacctccttacaggatggatgaagtcatactttctggccctgattttgctgttttttggttcagagaccatttggctcttgagaagaaggcgaaggataatttcccatgagtttactctgcttgtggaattggggcagctgggcagtcagttagacaggatgtctggagactctcatctcccaacttacttttctgtttgggcggatattcttggtgaacttgttgaagtaaggcagttatgtttcctcttgttgcacccttattttcaggagattttacaatgtttcaggtttaaaaacaaacttgtattactgagtggtgtgttaacattctttttttttttttttttttaatagggaactcctgaatttgtaactgccacagactgtgtgcattactttgaatggaggactactgcagcctgcaagaaagacatatttaaagctgataaggaggtaatggggtttgagactatttggtcatgaaatctactctggagagcttgaaagtcagggtgtggattctgctggggaggaggtgagagagggaaaccataatcagaatgtgtcctgaaaataaaaatctatttttcaataaaagaaaaaaagatagaaaattaaaacaacctcttacaaagaaggttgtgactttgcgatggaaagatttaaatgacttattacagtctcttgaggtgagagtttgtttctgtggatgtgaggttccatttgcacagaggtaccacgagatttaattgttaaaaacgtctaggccagcttctggtgcacacagcacagcacagcgcagtctgttttggctttagggtttgccctgcaccccttgggccctcaggaacctgactgcttcatcttcctctgtacctgctccctacccatgaaacatctcacttggatgattcgttctctgccagtttcttttcttttcttttttataaaattt

SEQ ID NO: 24402 - DNA, 1137 bp, Mus musculus
ggagggctggcattttaactgctgaacagtcagctcagcttgttggtttgtgatgttaataaggttatcagaggctacacatgctatttcttcacaaaaaccacgtaggcagaccaggacttgtacttgcaatcccaggctggtagcctgtggcagaaggactactttgagttcaaggccaacctggaccaccatatgacatgtctaaagagtcctgctctgcaagtactgggatcataccaggggctcagcaagaaactccactgggcaaagagaacctcccaaggcccaatcctgtgcagcacagctgcacctcacttagaaacagtgacacacctggggcatgccatccacggcttctgaacataatcacttagtcctcaccgtctgtcaaggagcacaccaacctccccattttggagacttgaaactagagcgtgggtgtaacttggcaggcagtcccagatcaccaagtgaccaaacacagcaggaagagccttgccatgccctctgctcccagcacggaccacttcccactgcattctggctgcagaactgtcaccaacttcagtacctgaacgataagaagccctctgcacaaaagcaaagaaatcagaactttcgggcattttttattttgtcgtttttcagtctcctttaagttcaggctcatccacttgcctcagctgccaaatgattatcgatatgagccattgtgcttcattccaattttggagctgatttccaatagctccaaagtcaatatggtcgcgtctgggatccagccccagctaactcttgacatctctcctgtcccgtcccatcccatcccgtcctgccccgccccgccccgccccaccccatcctgtccagtccctgtccataccccctccaccacccaccccacttcaaccacattgaccctttggtctcaaacaggcacacttagatcctgcaaagactcttccccattacatacagtaacacacatacccctcatttccttccaggccccctttagattcgcaccttacagaagagcctaggcatggtgagcccttttggacccacacccttgtttattcccaaaagctcctcaatcctctctctcattattaagggatgccaagcctcatg

SEQ ID NO: 24403 - DNA, 1181 bp, Mus musculus
ggtacaggagtagtcccttgatagaagctggagttcatgtttgtcctctctagtgttagaactaatgcaggcaagtgttgtcagtgagaaaaccgctaaatgaagagttagctgtgaaccagaatgtaaacttccactcaaagtatcatccccaaaatacattttctttggatggctttggaaatggagcaccccataaaccaagcctttggtgaagtcttgtgtccccaggtgatggcattattgagaggtggttgtatcacgaagactgtgacctgatcaatgaagtaatccattcattgattcatgatctgatggcatctcctagttagcttcagctctcaatgtgacacagcccagagctgtctgaggttgtctccatgttgatggccccatgggcatgtctgtggagcattttcttgatcaaaaattgagcgacaagggtacagcccactgtgagcagtaccatcccctagacagggaatcctggactgtgtaagcgagcaagctgggcagaagctaggaagagcaagctggtaagcggcattcttcagtggctctgtttcagttcctgtctcagtcctgccctgagtgcctgtcctgagttttctcagtgatggactgtgacgtggaatgtaagccagtcctgccctgagttcctgtcttctcagtgatggactgtgacgtgccatgtaagccattgtaaccctttcctccccaagctgcttctgctcagagtgttccatggcagctggtatcacaaatttggggaggggaaaaaaaaaaaagacttcattatctcttcttgaagtgatgccataaaaattcagtgaagcggagttctaaagcacagagccacctcacaggtacagaattgatgtgtcaaaaaaatatcccttacgttattcaagtaagaactgagatcatgttaaaacagactcaaagggaatttaaaaacaaacaaacaaacaaaccctaatacagacaacggaaagttgggaatgcagaagagaaattagccaatagataaagggttggttaaaaatcaaatacttatctgactcagacacagctttaatttctcaagtcaaacaattggatattttactaacagtattctacaacttacagagttgtaaagtacctcgtgacaatgaaaagctcgggtgccatagattaac

SEQ ID NO: 24404 - DNA, 1084 bp, Mus musculus
agcaactttgtagaccaggctggcctcgaactcagaaatctgcctgcctctgcctcccgagtgctgggattaaaggcgtgcgccgccacacccggcttgatttttttttttttaaatagtaattacagactttagattttagcaaatcataggtagttgagtgtcatagtttatgtgttgttctaattagttttcactgttcatctacagttatggctgcagcttctattgccaacattgttaaaagttcttttgggccagttggcttggataaaatgttggtggatgatattggtgtaagtatatatctaattgctcttgcttgccttgataaaagtacattgttttaaatttcaaaaaaaaatctttggtaaagtctttgtttttacctgagtatggatggcatcctagagcttggtttctgtgttgaccacttattccttcatatttcttaggatgtaaccattactaacgatggtgccaccatcctgaagttactggaggtagaacatcccgcagccaaagttctgtgtgagctggctgacctgcaagacaaagaagttggagatggaactacctcagtggtgagacgctaccaggaaatggctagagaatagtcaatttattagagttgaatccatgagagagtcatactctaggtcagaaataagtcaccttttaaggcagtctcacaaacttttgaaaactaaccattgtaactagtttgtgtaatttaagtaagggaagaacttaaggtgattaaataaatacaagcttgttttaaatactggagtctcgtgaatttggagccttatttaaacctacttaaccatgatgatgttcatgtagaaaatgttaccaggtttggacttttttctttgttgtttaatagatacttttgtattttaaatgtgaacaagaaatctttggaattcaaaatagaaatttgcagaagttaatttgctaccatatagtgctaatggctagtcagcaaacatggcgaatagtgtaacattttgtgagttagcctgcttaagtagtaaaatactgtttggtgaggcagattttagacctggcaaaataa

SEQ ID NO: 24405 - DNA, 2083 bp, Mus musculus
ccaaggagagaattcagaagatcctggcaactggtgccaatgttattctaaccactggtggcattgatgatatgtatctcaagtattttgtggaagctggtgccatggctgttaggagagttttaaaacgagacctgaagcatgttgcaaaagcttctggaggtacgtcctctcctggccgggacacgcggctgcttagagatagatgtcactgggtcagaagggttggagtgaaatattgacactaaattttagaaatatttttcctctttgctgtgctctaatagatttatagagccattttctaggtagttgaaaacattctttgatgctgaatttattggaaatgagtaaactaaggtatttttaccttgaaggtggcagtattgtcttgggttacggtagtggcttgtctggaaccttgagataatgcactgcttttccatatactaaaactatgagaaaaaaatgtatcttacatgactcttatagcaagtatcctgtctacgctggccaatttggaaggcgaagaaacttttgaagtgacgatgttgggacaagcggaagaggtcgtacaggagagaatttgtgatgatgagctgatcttaatcaaaaagtaagaagtgcttttgtaagttacagagcaatgcagattgtgttgtaaaaataattctttcccattaatttgctgctctagtctgtcagtgataggagcggttatacgcatgggataaaacaatattgggccattgtacatggagatgaaatgtgttttgtctctcgtacatggtctagacattgttcctggtgccttatgcctaaatacctttctttttgtttgtttggtttttttctgtctttttgagacagggttttaccgtgtagccctgactgtcctggaactctctttgttgtagaccaggctggccttgaactcagaaatctgcctgcctctgcctctgttaagagtgctgggattaaaggcatgcgccaccatgcccggcatgtctaaatatcttattagtgggatttaatcaacgtgtctgcagttactgttttcactaacaaaaatgctaatagcctcacgtttgttttttgtagtactaaggctcgtacatctgcttcaatcatcttacgaggagcaaatgatttcatgtgtgatgaaatggagcgctctttacatgatgctctttgtgtggtgaagagagttttggagttgaaatctgtggtcccaggtggaggtgctgtagaagctgccctgtccatatacctggaaaactatgcaacaagcatggtaaggctgctttcaaaggcatagggtgcggtgttgggttcaccgtagggttttaccctgtcaggcccgctgtaggctttgactcctttcatgggcacacctcatggtttcttccttagggatctcgggaacagcttgctattgcagagtttgcaagatctctgcttgtgattcctaatacactggcagtgaatgctgcccaggactccaccgacctggttgccaagttaagagcttttcacaatgaggctcaagtgaacccggaacgtaaaaatctaaagtggtgagtatatgatttccttgtgttctattgtcaacttccatgggtctattgtaagttcataatagtacctttgtccctccctccacgtttgggaaatatatgaagggacttgtcacatattgaaacatcacaggcatcgttttcgagataacatctttacataatggtggctgataagttttagtgctctgccctaggtgtcgcaacacttggtcccattctgactccttgggtagtctatagaaagggccgagaggatgatattggggtagggctttctcattttaggcagctctcagcttacagtgaatacagtttcagaatattgtatccgtagacaccctggtgtttataaagattcataaagcatatttacaccaaccagaacagtatgcaacatgtcactatttgctaagtgttcgatagatgaggtttccctgctacactgtcagctattcttctcccagaggcaagcttgttgtaactcccacagtcttttggactag

SEQ ID NO: 24406 - DNA, 2083 bp, Mus musculus; identical to SEQ ID NO: 24405

SEQ ID NO: 24407 - DNA, 1442 bp, Mus musculus
ctgacttaggctcttcttctctataggtcaacatcgatggaggagccattgccttgggccatcctctgggagcatctggctgcaggattctagtgaccttgctgcacaccctggagagagtgggcgggacccgtggtgttgcagccctgtgcattgggggtgggatgggagtcgcaatgtgtgttcagagagggtgaactgcatgacagccaccaccttggacagttcttgttaaatcagtgcaacactaagcagaaagggaaaccagaggaccaaactgaggacaggaacccaggtggacagcttgctgtactttaatgtgagacacccaaggctacggcattgcacctgacactgttataaataagagggaaatccaatcagtcatcaagggctccagagtgaacagcattttcataacttccatgtttatcgtctttactttctgggtgtaattttctctgatcattgttttttgttttttttgtttttctttgtttttgagttagggtctcaccatatagcctcaaaatcgttttgtagatcaggttgactttgaactcccggagatccacctttctgtgcctcctgaatacttgaattaaaggcatgcaccattatgcagggcccccaaaatgatccattcaaaacatggggattcggcttctgttacgaacttcaggctcttcactttaactatggttggttcaaacgcccctgcgtgcctgtctctcggtttcccattgatcaaatcaagaccaatcctgtagtgaaagtcggattcagtgacctcttccaggctgaggtggggtaggtattccagctgttctagtcagaagactggcagtgccaacaagtgtgcctctggattgttgaaaggtgggcagcaagcagcatccacgtacttatttctctgcttgacgggatgggatgttacctgcttcagatatctaccttgacttccccaaaatgatgactggaactggaactgacagtcaaataaactctttcctcccttacattgcttcttgtcagtgagtttgatcataacaacagaaacaaagccagagcagaggatgtggtgagggcagccagcttcaacagaaaagccacagtttacaatatgttcatttgtgatcgtttctaataaacaatatgttactcagatgaacctgctgggaggtatgcatgtactatggaaatcataagcaaactatagtagagatagcttgcaaaagtcagctatttaagccaggtgtcacacctgcatgactggtcaggtgatgggccaagtgcacaacagccatcccctaagagtatcatggatagaaagtacctacccaagggatgtcccagcagctgtagtcagggtggtgcatccctaacaaacaggactacagccagcatggtatgcactaacctccatagccggatgtgtcgct

SEQ ID NO: 24408 - DNA, 1959 bp, Mus musculus
gtgagtgggtgtgtgtacatacagcagagaaatgttttaaaatgttaagatattagccgggtggtggtggtggcggtggcggtgcacgcctttaatcccagcacttgggaggcaaaggcaagtggatttctgagttcgaggacagcctgtctacagagtgagttccaggacagccagggctatacagaaaacaaacaaacaaaaaattaagatactaaagtttggctctcctttgcacagaactgaatgacttcatcattcaacttgatgaagaagtagagggtatgcagagcaccattctagttcttcagcaacaattgaaggagacacgacagcagttggcacagtaccagcagcagcagtctcaagcttcagctccaagtaccagcaggactacatcttctgaacctgtagatcaggcagaggtcacaagcaaagactgcagtcgtctggcaaatggaccaagtaatggcagctcctcccgccagaggacgtctgggtctggatttcacagggaggggagcacacctgaggatgactttccttcttcttcagggaatggtaataaggcctccaacagctcagaggagagaactggcagaggaggtagtagttacataaacccactcagtgcggggtatgaaagtgtagactctcccacgggcagtgaaaactctctcacacatcactcaaatgacacagactccagtcatgaccctcaagaggagaaagcagtgagtgggaaaggtaatcgaactgtgggttcccgccatgttcagaatggcttggactcaaatgtaaatgtacagggtgcagttttgtaatatttttccagaaaatttttatacagtgtcatttaattggggaaaggatactgtcaaaaaattaatgcatacttttgtcacaatttacctttttgtgggtgtgtttttgttttgtttggttccttttttttttttttttttttttttttttttttttttttaattgcttcaatacctctgccactttgaaaattgtaacagttaattactttgaacattgctaaaaggacattttgtgtagggtcaagttatttttatatgagttaatgtgaagttgtaaatgggaatctatagcaatgatgtctgtataaatctgtcttatctagaacttgtgctgtcagggcactcttcctcacgctgttgttactcatgcaccattcagacttgttagagtagatgtgggtttaggactgccaggtttgcccagtatagtagtttttatcactaaaaagttggacttggagtcctatagtagtttcagcgttagataaagtttttccaccatacatctttaggtgcattcatctttaggtgactgaatgttaagaaatctgtgtgcatagttactaagtttttatgaactgttgtgtcctgttaatgcatattgccctgtgactccagtatatctcacctgtactgaccaaacctaaataaacatttttattacgactcttgtttgttttttccttttgtcttgggtgtgtttagcaattgtcctttcttttcactgaatggctgaattgctacttactctgtagtatatacaaagatcacattaaaacagtctatgcattaagtctgactatccacctaattttaatttgcacttttctttgcagaatgaagtgggagtttgactacagctcaaggactttggttttggtttttttccctcttgacgtaaagatctcattttttaaaaaaactaaccaaattttaggtttttgttgaagagcagtttgttcttcagatctgatttcagggaataggtacaaagatgtttgctttaaagcattggccaaataatgctttttccagaaacagcatccttgcatgtattgtaaggaggtctatgggtctggacatgtgaaacaagtacccttaacagctgtgccatctctttgtcaccactccc

SEQ ID NO: 24409 - DNA, 2209 bp, Mus musculus
gaaatatcccatctctgttttggggggcctgtaggagagtctgtaatcctgttctactgcagttagaaaaaaagttgagttgttcccccctgccccctgagttgttgaatagtgaaatagagaaccaaatagttctcttttctattaaaaattgctattttttgtaagtaatcctctatttagtggacatcacctagtagtctttgtttatggtcacagtttcacagtacaccatttttttcactcaaactctgtaactcaaggctgtgaatggagttcagtggtagagccttgcctgtcttatgcaaggccctgggctctacctcagtaatgaaaaaaggtcaacagacatagctttgctcctgcttgaggagtgcttattatgagaggaaggtaatggtgcctctgggttttctataggcagacatgcaaaaacagctaatcttgtctttacaaaccaacagtgtgctgtatgaatgtgttcaagatggacaaagtaggtagggcctgtccgatgatgtcagccatgggcactaggccacagggcattctgggaagccattcagccccatgaattgtatatctctggagaactggaccctgggtgtggtggcacctttctcagtagcggcaaatgggtttctgagtgaggtcagtagggtgtcttcagaacattagtttttagagacacagatttttcatttttctttagtttcaagaacttacagtcacaagagggcctttgtattgttattcaatagaaggctgccctttccctgacaaggtgacacagtgcttctgactgtgttcctgtgcactgtggagatatctgtcacaggggtccttagtgaatttgccttttcacattcgtctcaccatcttcctgtcatccttaatgtccatgtgatgttttatcggttgctcaatagtcaatagtttgttggtgtttaattgttgtttattaccaaaaaggccgtgggcgcctctcatgcatgcaaatccttgttagtggagtattttttaaaggtttgttttctttttaattatgcatgtctgtgtatgttctgttcattgtgcccatggaagacagaagagcttgttgggtctgggtcccttagagctggagaagttacaggtggccttgagcggggacttggatcatctgtgagagcaataagcacttgcccgctgagccatctttccagcccccggaattttttttttttttttaatattgattgttttcttaaacgtattttgtaatttgtcccaagtttttttttttttttttttttttggctttttgagacagggtttcattgtgtatccctggcagtcctggaactcactttgtagaccaggctggcctcgaactcagaaatccgcctgcctctgcctcccgagtgctgggattaaaggcgtgtgccaccacaccctgctctttttctttttttaaaaaagatttattttattcatatgagtgcaatgtagctgtcttcagccacaccagaagaaggcattggatcccattacagatggttgtgtgccactctgtgtttgctgggaattgaactcaggacctttggaagagcagtcagtgcttttaaccgttgagtcatctctccagcctggaccctcttttttttttttcccctaattgaaaatacttctttttatacaatatattctgatcatgttttcccttctccaactcctctcagatcctccctacctccccacccacccaaatccacaccttttctttctccctcccattagaaaacagttaacaacacacacacacacatgaataggacaaaacagacctttttattattttaaacagagaatctcagtgctcactcgtgtcatcttttcctttcttagagtagattttgataaaaagatagtcatacaagcacaggcagcttttatatgcccaaacctatcgtgtccatttggaattttaatacttggatttctgactggcagcatttagggttcccttgcttttaatctagtggcaagttgtttcataacagtacagcatactgttaattcctgagtgtgtatacgtttctttggctcattgggtccttgttatatttaatgttgtagacagcattactgaactgttttgatggtgtactatttttaaccatttagtgaaataggcttactattaaacattaatttataaggacattac

SEQ ID NO: 24410 - DNA, 2227 bp, Mus musculus
aatagcggttgcagatgctcttaacaaccgaagagcgagagagaattctgttagaggctagaaaaataacccggaagccaacggcggtctacacagctacaaaatgagatgaacatgggattccctttgactcgccccacttggaactgcagcatggctaaaggtagggagagcttaaaaatctatcgccaggctccggtctccaaggtgcctcaagatgggcccactaatttggctaaggtaagaggtaatgcaggggtggatcgaacctctctcaatgttccttgaaaggcttatagaagccttcaggcggttcactcccttagatcttaccttgaaagcccagcaggcctcagtggccatggcctttcataaggcagtcagctcccgatattagaaagaaacttcagagattggaaggtgtattacaagagggagacagtgatgtgatctagtgaaagaggcagagaaagtgtgtgtgtgagagagagagaggcaggaggcaaaagaaagagaaaacaagagggatcatagacaagaaagaaatttgccacagtggtaggagaaaaaaaaaagacaggatctagacaggaaacctgggcaactgaagaccgagcctcagctaaagaggctcagctgtgtcagactaaagtgacttatttgggatacacccttcgaggtggaaagcagtggctaaaagaagccagaaaaagactgtaactcagatccccaccccaactacaccaaggcaagtaagaaaattcttgggcactgctggcttctacagactctagatacctgggttggcgactttagttgcccgttgtaccccctaaccaaagaagaagtgtctgtgtggaccccagatcaccagaaagcctttaagaaaatgaaaaaggccctactgatggccagcctttgcctgacctaaccaagcctttcactctttatgtggaagagagatcaggggtcgccagaggagtccttactcagactttgggactttgaaaaaggccagtggcttacctatccaagaagttacaccctgttgccagcgggtggttttcttgcctgatggatgatgaccaacgctcctgtgacacatcagagctttttgttgtctgaacgagtgaccttcgcttcattccacctgctgtcccactgcgtgagactgcacctactcatcactgcgctgacattctggcagaagaaatgatctgaaggatcagatcagccttggcctgagggcagtagcctctcggttgaaggtaagcagaaggcggggacagcagtatggtggtgaacagaaaacaagtgatctaggccagcagcctccctaaaggtatgttggcccaaaaagctgaacttgtgactttaagacaagctctataaatggcaaaagaaaagtctacactgacagcaggtatgcttttgccactgtacggagcaatatacagacaaagagggctgttggcatctgcagaaaaagacctaagatgctgtggctaaagaaaatcaggtggcagatctaaccgccaaacaggtggcccaaggagcaatgatcctggcagtcaaggagcctaaagattattaagacatcagagagaccagctttaaatacaccgctgagcactatcaagttatggacagtatttgacttggcctgggggccaagaaattcaaaggtgtggttaggtcctttgactactatgttacaggactctctgacttggcagaagaaatagtcaaaagctgcaaggactgtgctatgacgaggtagaatttctaaaagaaaccttcccaaggtaatggacctgcctttgttgcccaggtaaatcagggactggccaagatattggggattggttagaagttacattgtgcatgcaggccccaaagctcaggacaggtagagaaaatgaatagaaccattaagggacccttaccaaattgacagcggagactggcgctatgattagatagctctcctaccctttatgcccttcagggatagaaacaccctggacagtttagactgacccccctataaattactctacagggggcccccctccactggtaaaaatagcctttgtacatggtgctgacatgctgctttcccagcctttgttctctaggctcaaggtgctccagtgagtgagacagcgagcgaaaaagaggctccagaaggcctactcaagagaagaagacctgctacattagacgt

SEQ ID NO: 24411 - DNA, 1171 bp, Mus musculus
actcaggacctctggaagagcagtcagtgctcttaaccgctgagccatctctccagcccacatttcttgttatttgaactacatcccaaatgaactacatccatgcctaacccattttcagactaacaaaagaatatgaacccagatccaaatgtataaacatagagcccagagccaaactcggggaacactgaggagcctgggccctaacctaggagcacgagagggcccaaagccaaaccaaggagaatggatcccagaccccaacctgggatcgtagaagagcctaggtccacacctaggttcatggaggagaccagacccaaatccaggagcataaatcccagacccaagcaagaggctatggagacaaatgggaggccatagcagagccctgatccccgagtcagaacggtcagacagaccctgacacagggcttatgacactcctgctttactccatgcctctgttcacataatagttcctaacaccagtcactccccatccccacaactggcaggcagtcaagctaactgcttctttggatactcctccctaaggaaggttcccaggccgcagcataaagcttacattgaatatacgtgtatgacagcctctttctaggccgtctgttgtagactctgaggcatgagctacttgattaattctagagggcgtttcagcccctccctctcccagggttggggtggccagtgagggccgctcaggaagatgaacttacttggagctcaggcaggaaaagaatatgcctgtggctgccacctctccttggagtcctttccctagggtgggtacaggcctcagagacccgggcctggtttgtgctttgggcaggtgaccatgtttgtttttgtttttgttttccccatacgtgttctggcccttttagtgcagaggacatacaccttttaaaaaggaagctgcctttctgtgaagtggtagtcatggactgattccatgccagcctcttagattccatcagggaaatgcctttaatgggattcaatgtctaaggaatacggtagcttggtttcttcagagtaaatagtactggtcacgtggttctctggtgtcttcagctgcctcctacttggaacctgagaaggaaccaggctggctcaagtcttttccatcttccaaaactatata

SEQ ID NO: 24412 - DNA, 1169 bp, Mus musculus
ggaaatctaaattgtccttcctacctccaggcccctcagatgactgtacacctacatataaaattagtttatagtgcctaggattgaaatagccccaccatggtggcaaatgcctcatgaagtctttggattaagtacttgaggtcttctgttttctagttcacttttaaaatactggtttgttgagtgaaattgatccttggtgtatttgggctctgtttgcttcagatgaaagcttcaaaagtagaactggaggaagcaggtcttgtagttacagggttgaggaagttggaaacgggaagagaagtacaccacagaagagtgtcgtagaagccagccccaggtccacactggatgtatctgcaccactgtggctggtgctttcctagtgacagtcagtgtcagcagcctctgtcagtgacctaagatgaagatgcactcaaagatgtaaaattctttcttcaggtggaacactgaggatatatgcagatagtttaaaaccaaatattccatacaagacaatcctgctgtctactaccgataccgcagactttgctgtagccgaatctttggagaagtatggtctggaaaaagagaatcccaaggactactgtattgcccgggtacgtaactacaaatcgacttctccccaggattgttcataataagacttggcttttaaaggaaagattgttttttaaaattttggtgtgtgttcactcatatttatggcccctatccccttacatacacagaggaatagtaaacaaatgtaataaaaacaaatttatattcttaaaataaaagataaatttaataaaatgtagcccaaagttgttttaccaaagttaacctcattattaaagttttgataggcattcttccaatttttattttgtgcatatattatatgagtcaagaggagtataaccaattttatgtatgtataattacataatatataaataaaatagtctcagcagtgctgcacattggagactgagagaacctggtggctgttaagtctaagatgtaaggatcgcatagatagagggtccagttgtgcagtcctggtgtgaagttgaaggtctgacaactacctggaaagtcactgttgtgatcctctgttgaaagacttgaagaaacttgggtgtgaagtccaggcagtg

SEQ ID NO: 24413 - DNA, 1213 bp, Mus musculus
atagatggatactttaaaatacaaccaccccccaaaaataaaaaaaaaaaacaagaataagtgcatttctagcttcatacataatttgcaatattctagacagttaatacagcttaattttgaaaattgttttgaattttgagttaattcatttgaattaaataaaaatcaggtcagctgacatatttgtatatgtgtgtgtgaatgtttgctgataaggctatccacagtgcaagttcatttatttttaaactaatgtgccatttactagttagtatatgctgttcttgctagctatcttgctttgtttggagtttttcagagcacacagactagactagtttatccttcactgagtaagatatcagttgtgtgagcttttccttgctactccttggcagatgttactaaaatatgtcttcttggttttgtttgggcccatggttgtcatttagtgatcatgcccctggtttgcttggctgataattgccatcgtcactgttccagggattttagtctttcagttgaagaggagaccaccggactacatcccaaagaaaatgaagaaacatgttgaagggaagtcgttgaaggggaaagacagagctgacgggtctggctacggctccgctcttcctcccgagaagctgccctacttagtagagctaagcccaggtgagaacgctgggtagagtaggaatgtgtttttaaccataaatgtttctactttctaatgtattaagtggccattcattgaagaaataaaacattcattaaatggcaattatttttcaaaaagctaaaaaaacccttaaggccatagaattcattaattcatgaacaaaaattaagttcacatgaacaaaaataaatataacacaagttttaaagtaacaagtagtatttaaacattttaaataatcagttccttttaagaaaacttttccaaagtaactttagttaatgtactagaaacaaattgaaattaactcttcctggagtcaacctctgtatgtatgtgagagagaaagggagaggttaccctaactgtttatgacatatgtacagtatttattagatttaactataactttgaaacctattatagtaactagtaggctattttaaaataacacatttattttcatattactcttctaattatatcatagaattcttgcaagctgaagctgttgtcataagttagtcacta

SEQ ID NO: 24414 - DNA, 1172 bp, Mus musculus
aagagggcatcagagtccatagatttggagtttaagcagctgggaaacaaactttggtcttgtggaagaacagtgctgctgcactgcaacaagtgctcttagctgtgaaactgtccttccagccccaggcttgtttcttaaatgactgccttattgtagctttgagatgacttccgaagaactggctgtcagacttaggagtcattttcacttttgctttgcttctttaaaaaacttttaggtaaatttatttgaatagtggttagaaactatgtgtttaagaccacacccctgctttctgtttgaatttggtatttgtaactggtttgacacatttgttaattgttataactacctttgtctgaagttggtatgactcagaggttctgctgtgaccctgtggcccctgacgatttgtcccatatcctgaacagatgatgtgctgcacacactcacaggagccatgtccttgctgcggcgctgcagagtcaatgctgccttgaccatccagctcttctctcagcttttccacttcatcaatatgtggctgttcaacagactggtgactgacccagattcaggcctgtgctcccactactggggtgccattatccgccagcagctggggcatattgaagcgtgggcagagaagcaggggctagagctggcagctgactgtcacttgagcagaattgtacaggtgtggacagtggctgtactccattctccttgcttctccctcttccctgccagtacatgaactttagattgacatgatgagtgacaacttggggtgatagagcctcagtgtttttcccatatgcattcagtcaagcagctactgtggttgtagcctctgggctgctgtaacaagccagctaaaactaaatgtctcagccgaggtttattgtctctctctcctggaaaccagaggttgaaatcaaggtgctggcctctgagggacttgaatataagttggttcttccagcccttggtagtttatacccaacttaggcattctttggccagtctttgccacagacttcatgtggtattcttgggtacatgtctgtccaagtccctggtttgtacaggggcatcagtaaaactggcctccttttaaccaattgtatgcacaaggcccttcctcaatagtactccagcctccagca

SEQ ID NO: 24415 - DNA, 1191 bp, Mus musculus
ggactgtctccaggggcagctctgctcctcatatagaagttgtggggaagtgcgctgggatcttcatgttaatgagcctcagaatggagagctttctttctcgccactccctgcactcccagatatgtgttagtaatatatcttgtaatgtaaatcatccacagacccccccccccgcctgccccccactcagcagttcttctactgattggcttccaagctagatattttacctgtgtttttatttgcttttgttattttctcattcattttccctgtgttattttatgtactataaaaataattattcacaacttcataacaatgtgttaaagagttatacaaatcacctgctttggagaaaagaacatcaggtgctaaaacagtgttttaaagccttctgttctgtctttaagtggtgtgtgtctgacatgcaggcactctgtgaagccagctcctattgctcccctgaggtcacatctgtgaggtggtgcttcccgtcagtgagcatctcttgatgagtccatgtttgtcctctgcaggatctcatagaaaatgttgtggctgttgctgagaacacagctgatgagctcgcccgcagtgatggcagagacgtgcagctggaggaagacccagacctacagctgccttttcttctgccagaagatggctattcctgtgatgttgtcagaaacattccaaatggtttacaagaatttttagaccctctgtgccagagaggtaaatactacttgtcacacttcagttggagctccaactgggttcaagtgggctttgtactgactctctggataacaggcctgcagaattgtgccagctctcctgaggaagctgtgctcctatgactccagaagagtttcactgagattaaagatcttgcatgtccagacatgaccccatgtgggtgtgttgtctcccttgactttgtgcctgctctcttcccacacggtgctgtaacaaagcatctgtaaccacacctttctcctggcatggagagcagtagaggatccctgggttctgagggatccagcccactgccagccactggactgtcatgggcaggtcaccccttaccttagctccttccttataaatcagtgcaagagctcagagaattggacaggttgcctttagggggagggttctgtgtagattctcaggccaccacat

SEQ ID NO: 24416 - DNA, 1235 bp, Mus musculus
ccactcagcatttggcaagctctgcgctgggtcttgtatactacaaaggaaaacaaaacagagaagccttaagttctatatttcctgttgtagacatgatcttttcacctgatactgggctgctagagagtggctgttattcccagttgaaaaagccttacagtgcatttctgtagactctgtctgacttatgtttgatctcctggggtgctgtcttgatgctaaggaccttgcgttctgtcatatgatgctcaaggtcggtcttgcatccttgtccactcttggttcctctgccaggtatcatgtggagaagtagggcatcaagccaagctcagagtcgtagtccagcctgtgttccctgaaacctgatttacaagaacaggcgtattagttcctctctgagattcaaccttgtgaaggtgcatcttgtcaaaactgtacgttttagtgtaagtgagagagggctttgactagggtatagtatgataactgttatgttgtgtggggtggggattgtaggctttgatgataagcttttgttgtcaccatggctggatttagaatcaccaggagacacccagacccctttgtgttgtctgaggatgttttcagagattgaactgagaagggaagacccatgtctgtggccaaattgtcctattgactgggttcctagacttgaacaaggaaggaaagggatggagccagctgagcaccagcatttgtccccctttgcttcttaactgtggattcagtgtgaccaggcccctcttcttctcgctgccacagcttttcaacagtgatgatggacttaaccgcctcaaaccatgagacacgaacaaaaactatcttttaagttgcttttatcattttttgtttgtttttattgttgttgttttgagtttttggcttttctttttatagcaggagaaaagtagctaattcacagggtttctgcactcattttgcaatgaaagatcctagtagcagaggtggcagaggtaatcagtagcagaaatgtaccagacccttgtgagggaatgtgttatctcctgccttgatgagtggcaggtagttccttggtcatggtcagtggtggtagatacttgctgcatggcagtgctcagatgggatgaattgaggggagaaacagagaatctggttctgacttgagccgctgggtcctgaaggcaaaactgtcagaaaaagaacaggcagaagttggtggaggttaa

SEQ ID NO: 24417 - DNA, 1172 bp, Mus musculus
aggataaactgggaatctacgttaagtcggttgtcaaaggaggtgctgcagatgtggtgagtatttgattttttgtttgtttgttttgtttttgttttttttcgagacagggtttctctatgtagccttggctgtcctggaactcactttgtagaccagcttggcctcaaactcagagatccgcctgcctctgcctcccaagtgctggaattaaaggcgtgcgccaccacgcccagcgactatttgttttaaaggaaactgtgaagggcattatgcgctccagctttgtgaaatactgtgcagatgcttatagctgtggatgctgtatggtgaagaatgctgctgttcattgactgtggtgggaagactgatgcgcgctgaccatgtggtgtgaagaatgctggtgtgcactggctgtggtgtgaaaaacactgctgtgtactgactgtggtgtgaagtacacagctgtgcactgactggtgtgaaaaatgctgctgtgcactgatactacctctttttcttttctctctacactttcatctctctggtggctcaggatggacgattagctgctggtgaccaactcctcagtgtggatggacgaagtctggttggactttctcaggaaaggtatgactaattggttagtgttaaagttagtcttagtgtattgaagtgatattttacatttaattttgaaatttgtattcaaaaagtagtgctataaagtcctttatgctctgtgagtacaccttcacctataatcctagttcttagagcacataaatctcattttctgttcactcatatgtgttttagtatagagcatttctttaagtaattctataaatatgtgcacatatacttaaaacttgtgaaatctttaaatatatcttaatggtatagcatagaacatatttaaatgtttttataattaactttcaactgtgatgtgaacaggagattatctttctgaaagccaggctaatttctccaacagcagtcaggctgaggaacaagagttctgaacacagactgtcatctgacactgagcgctcagtttctttatacttatattttcttcctagggcagcagaactcatgacaagaaccagttccgtggttacactggaagttgcaaagcaaggtgccatctatcacggcctggccac

SEQ ID NO: 24418 - DNA, 2394 bp, Mus musculus
tgcaacaatgagtaagtctcactgagacggtacagtttttctgaaagtttacttagttacttgtattttgatgcactatctttgtgtttcctcttgccagccaagacgcagacttacctggcagttctggagcccctgaaaatctgacatttaaagagcgtcagcgccttttttcacaagggcaggatgtgtctgacaaagtgaaagcttctcgtaaattaacagagctcgagaatgaactgaacacaaagtgagaagagagaggtctgcccttggcgggagctttgtgggggcgagcctgaagaggaaggaacagtgctacttctaagtgatgtttattttctgtacctgaaatggttgcaatttagagatgttccaattccaagaaacttcgttttactttaccaagaaaaatcctgtctagttctttgtgatctgactcacatgaagttacctgtttctgttagcttttggggagactcttggactcatagggcagaatgaagggctgtaaagatgagggggtatttcttctaccctatcttctttcattgtcattccaagggcagtaggccaagaaattatctttctggtttttttcctctaaactccatttggttagcagacagtgacagctgagcaggtctgagcactactgtgtcatagtggaccctgactgcaggagtcaggcctctcagcccagggcagatgctgcctttatcttctatcatttgtatgacgtggctggatggagtttcttttgtaaggtgcacaacacattcttgacaaatgtgagtctcctgatcaatttaaatgtttgagattgaatatctaattaataattcaattttgaaaattctcaaaaaaatttgaggatttaagcctagggattttatttttataaataccaaatcatcattagactaatcactggtggaaattaaatatggcagttatgttaggtttcctaatatttcaaaggttccaaaggatctagagctctctagttacatagcattcatataggaatgagcagagacatctgagaagagtgggagctcatgggtgacagtaaaacttaggtgtctcagaacttaacatttagtaaagtgatgtagatccaatgtcaggaaaggaaggactgtgttactgtgcctcctctgactcatgtgcttttcagcataatagacttatttaatattaattcctaaactttgcactgtcaatcctctgctgagttgtgggaggcagacctcagtttgcttgttttttgtgaaagctaactttatgatttcaagcacactttctacatgagaaacccctaatgtgtgtccatatgatctttctgtacattctattctcttacaaatctgtgcatcaggaaaatatgcatactttcaaatagaacagaggtatttgcaacctgaaaaaccacttttaataagagctgtatgataaattgttgaaatgcaagtgtaaatattttttatgttaatccagtttcctattagaaagtgtgtctttgctatttcctctgtaagagaatagaatggccttgagagtttatgaaggatttgcacactcgtcttgcctaggaagtgcaatctccttgtgactggagcacactggcagccttcaggtgtcataatcatacatcccagagaagagcagtcacctgctgtcactagtgcatgggaagacagatgcacagaagagccaggtagcacctgaaaacgctgcacgtgtgtttgtgaaacctgtagtgaagtagacttggccgtccctggacagtgaggtcagatgtgaatacatattgtaagagcacgttgaatagtgtgcattactgtggggaaacaccgaaactgctgttgtttttcatttctactgtattttagttgcagcctatttttaataaactttgtatctatttaagtgtatttgctattgttttcaaagtgctgacaaagtttatatttgtaatgccagcattcctcttccccatttccagctgtcactccttcattaaactgctgagtcattccttcctttgtcccttggttgtttttctgtctgtgggaaagtgttctttaatgacacaaccagctgaagactagggtggcattttcacaagagtcccttgtgagagctcggtcacctctatctacatgtctaccccttatgccttcagcatcccaaaggagcactgggaccatgtctcctttcactaccccatctggtccctggactccctgaacacactcacggataagctcattgcctaaacagtctcctggtcatacacagtcaagattgctggaatgaaggtatgttttattgtcatggcacaaggtaccctgaccagctggaactggtcagtgggctggtgtgcctccc

SEQ ID NO: 24419 - DNA, 1233 bp, Mus musculus
agccatacagttttgttacctcagtttactccccaagcaggaaaagcagcaagcacaatattttagagattaaaattcctataaaaaggagtctgctcaataaaatgtttaaatgcattttggttagtcaggtgagtaagaagattacagtaacaggctgtataaatcagattaaactttactgctggtgcagaagttgatgactgtagaatttatagacatttaaatgaagtacagcacttcgagttttaaagtctttaacattttaaagccaggtggaaaatgcagtgacaggttcgctcttcccagagcctctgcacagtaggggtatggtacctgatacccaagcaagctctcctggcagcaagtattgacaaactgttgctgtgctggtgatttagagtccaaatcctgttgtaccagatcttgggccatttgccctttcctctgcttagccagattggagctttctggttattaggtaactatgatactacctaatcaggtcaagacagagtcataacaagtggtaactttgttatattcaagaagaaatacttcaaattaagttgctactacctctttctgctgatctctggaaaaaacaacactatgaaattaaagcctggggaaatgagccatttctctgactttgtttcaagggtagaagttgctaataaagaaataaatcaacttgatgtttaaggtcatcgttaatttcaaaaaagtttttattggcataaaaatgaaagtgttgtaaataaattggcaccaaatatcccaaacatgagggtcaaagcctattttacccctctttgctgtttttcccccttctgcccactttcctgggtgttgggggagctcgctgacaacagtcacaaatccagcgacctaggagaaaaattgttagttaatatagagtggaattttatttttataggactgagtacaaaccatctaatctcattcctgagctatctgtagtgataactccctgggatttttcagtgggagggagtacagactggttccttaagccaaggaagagaatgtaaacaacccttaatcagtgtaaccaatgcagtgtgaacgttagtgcatggccaaacggcattgtaaaaatcatttgtaccttaaacaaaactactgttacccttctgaaaattcaaataccatcatgcttttgaaagctcaacaacacaattcctaatgtagaacatgttaaagaagctg

SEQ ID NO: 24420 - DNA, 1148 bp, Mus musculus
ggcctactatagaggtggcctactatagaggtggcctactatagaggtggcctactatagaggcatctgtgtgtcaccaggttcttaaggggcagagtaagttctaagactataggtgtgtaacatcatacctacttgaagataagcttgaaaagaaaatcactttacagccaatgtttttgaatataaactgttgctctgtgacctcaggaatggagttagcatctaagctgagcttgcattgtaggaagccattcttaatgagctgccctaatgtagttaagtgcttaactttgggttgttctaggttttagtttttttaatgtttatttcttgaatttgtaagatttgtgtgtgtgtgtgtgtgtgtgtgtgtgtggttacttaagaacacttagaatattcaacaacaaatgtgcttaaaatagtttttttaaggctttagaagttctaagatgtacagtttcagtttttaatagttcttttgttctgcttttggagatttagagcgacgagatttatctcacaaggagaaactatacctgagagaattaaacgtcatcacggaaacacagtgcacactgggtaatcagcacctgttgtgtcttttaagctgaacacttgtaggtggtaggcaattagatcagtgatccatctcctaaaatattttacaaaattaatagattatttaaataataacttgtttacttcattttaattgttaaaatgtaaaaggcatgattaaattttttatactacaatataattttctaatgataactttaacagagttgtcaggtgttttgggtgtagaatttttatctaagcatagatctttatcgtttgtagtactggggactgaacccatagattctttggcaaatcttgtcaaacttttagctccttatagcatatgctttcttgataatttatttttggtgagtgtgtcaatgccaacaggctcttcccagcagtagggaaagatgttgtgaaagttacatggcgtgtgtagactggcgaatgttttgagatgtgactcgatactatttctgatatatagatttggagactaagaaagatatactgagaaataatttttacatatcctgtgttaattattagtggttagtatatatcattcataacta

SEQ ID NO: 24421 - DNA, 1266 bp, Mus musculus
agaacaatttccctgatcatgacttctattgtcatttattttgtggttttaacatttaaatatttcgtgcatttagatttcttttgaaacatgctatacggtattgtagggtggtagatgtggttgtagctctttttcctctccaaaagctgatcacagtcttccttcctaagcttcctgcatggacggtcactggtatctgctgcttcacctaatttggaagttcatcatacttatttttatgaacagctgcatagttgccaaatgccacattctacatagtaatttttcaatgataatttgagttgtaacttaatatcctaatctctcacatcttttggtgttcatcatagttttatgctttctcttaccctttgccttactttatatctttcttttatctactgcaacaaagatttaactattaaaccattataacttaaaaattgacagagcttcaacctcccctctctggactctggatttttctgtctcttcctgaagtttggaaccaaattcccagcagtgaaagcatatgtaaaaacataatgatcataagagccctcaactagtatattttttcaagtgtattagtctatagactgtgccagggagaaagacctcttacaatgtccactccatctgtccaaagctgccattgttcttgtgctgacttaaatactcacgtgtggaaatttttgggtgtctgaatttcatttcataaaagctttcactttgacgttaggcttattactagagatgtcttttctttatggctgtgtggggcattcctttacatcttcaaagctgttcattcctatgtccatttcatatgcagctctggcaatcattagattttctaatttgtgtgtttttacttgattttgttttttaggggtgggatattgctgagatagacgtaattgctatcatatcataggattatttattttttaatgctggatttcattactatttaagattctatgagtctaatactactttttatttttggacccattaaaaggtagaattacctctaaccagtttttgaaataattttttaaagttcttgaatgtgatcttgacatctttatctattctcattactatgcatcatacaaaacccagtaagaatatatattatttcctaaggtacctataaccctgttgagttcctctcaatttcatttgacaaaatattgaccataactaattacacattaattactaattaattatgataaagcttacattcttccctgc

SEQ ID NO: 24422 - DNA, 1173 bp, Mus musculus
aaccatgcatgctatttgcacagtaaaaagtacgtcagtaatttccttgtgagtgaaccgtggatgggtggaaagactcactttgacatgttcagatttgactgacaacaccagtgcagagttcagagtgagccaccagctgcgcgtgggacagcaggggaggcagggctccagggccacatttctgggtttggctgcttttcatgcctccacttgcttagtgagcctttgatacaactttaaatggaaggcaacatgatttttccccccctgttgatggttttcctggcgctccagctgtagttaaatggatgtagcagaagatctgacagatggaaatgctacttcatacgaatgactgtttattattcataaagttacatttccagtaattaaccgtctttgtgtctctcaagaagggactgtcaccaagtcggagccacttttcctttaacggaagggtggctaagggagatcttgggcttaaccgaggcttacctctgttttttccccctgctctcagcttttcctgggctccagcacggagttcagtccactgactgttcactgaacttcaactttcctgcaagtttcaacaggtctgggctcccaggatcaatttgttgactgccctgaaatctatctccacagaggggtccatgaccttcagaaggtgcttgggaccaaggttgctaccagctagagtgtgttccccctggagcacaccaaataacggtatcggggtccatggcctttggcacggaggccttgccagccacagctgcctgtgacggtcaccccttcttcctgggccctggtctggctttgaaatgacctcattaagaagacactgtgaccatgtttcttctgtctaaaacactgtggttccaggaaacgggtagcccaagtctgaactgctctacctgggtctgttccactttagacaccttctgtgctaactccacctgagtctcccttctttctggaaccttcttatacttttccttctaggacccaaaagctctccagggcacctgtgacacacccctgttcttgcctctgtacactggcttccctccctccacactcacctctagccaagatctttcccttcctcttggtcctctccagaccctggaacggtgcctgacacagcaccacttttgaatgttt

SEQ ID NO: 24423 - DNA, 1155 bp, Mus musculus
atggggctacatggggctcatgtctccaagctccacagtggctcatatgtctgttgagttgggttctgcagaagggctgaactttctctgagtccaaagaatagtcctttggtctttctcaggctgaccaatatcaagaggagcaaactcatgaaaacaccaggcagagagtcatatactacatgcctactcccacccccagtggattcatacatagagatctggaaggggacatggcctctcagagtgtagaccaggagaaaccacaaggatcacccttcaagaggttcatcatgtccctcttgacacctcatgtcctttcagtgactgagaactccctggtggctccgaggctcagtgtctgccatgaactaaatgttggagatagtcccaggttctcggctcaccagttctgggataggagcctgcaggctagggatggaacacttaagttcccaaccactcccagctggctcgggtaagctggcacgttagtggaacatttcatatatagagaagcaccttgacttaattaggcaaagaggaattagccaatggggtaaactctgagattctgttgcctttgaggacacggctctagctgaggctgacgtaggcttagatgagatactgtctgtttacaaacacaaagcctggccaactccctaaattctaagatgttccagatgcccggaagactcattgtcgctggtcagatgctcagccaacccaggccagccacccttctcaggctttggaacttccctcctcaacaattttcctcaagtagggattaggggcaggacacttttgggaagccctgggaactccccagtggaattctgctcttgaattccaagaaagttcatcatggaaccaccaattcctgaacctcactaagtggacacatcaccttcctgattcagcagtgcattctggctgaatgctctatagcttggggaccacatagctctgcacctggtgggttgtcctctccaggccaaccagtacctgtttaaggattcaaaagtcacaaacctccatgggaaatctgggaagctgaacccctggagacacttatggggtctctgacatctgagaatgtgggcatggttcagtgacccagcttgacaagtgaaggtgaataggaagagc

SEQ ID NO: 24424 - DNA, 1189 bp, Mus musculus
gaccaaaagcaacttggggaagaaactcagttcatttcagtttaagagcttgtactctgtaatggagggaagttgaggcaggaactgaagcagagaccctgaaggaatgctgcttactagcttgtaataactggctcaaactgcttccttactcacctgcccacagtgggctggggcctcctacatcaagcattaatctggaaaacatcccacagacttgcctgcaggccagtcttgtggagacatgttctcagctcctagataaccctgcctaaatttttctgatggagctgcctaggccccttcttcctccttgttaaattttttacattatctgtatctgcctccatgtgtttgtgcttttgagaaattgggagcattgccccatttctgttgtatttaagctgggactagaatatccttaaactggaagacatcctgatgtgacttgatacatccaattcaaatcctgggacatggggatgttgtatgctgtgggaggttggggccttaggtcttggggacacgtgatgctccatgtgagtttctgtctctccaggttggcttcaaaaatatgcagaatgtagagcacgtccccctgacgctggacagagccatgaggctggtgaaagatgtcttcatttctgcagccgagagggatgtgtatactggagatgctctcaggatctgcatcgtgaccaaagagggcatcagggaggaaactgttcccctgcggaaagactgacatgcgggtcatatattggagctgtggcacaagtttgttttattaaaaagaatgtaaagtactcattttcttacactgtgtcttctctaagcatggcaaattgggaagaatttcttccttaggggtcggagagacaactctcagtttaaaaagtatggctcttgcagaggacctaagtttgattcctagcacccacctgtaactccagttccaggggctacagtgtcctcttctggcctcgacaggcacatgcaaatacccacatacaaatgtatgtaatgaaaaataaaaccactaatataatttctttttctttatctggatatatttatttattttgagatttacttttcatcatgtgtgtgtttccgtgagcatgtgccacgtgcatgcatatttatgtgaacagggtatgcaggtgcccagggaagccagaagcaggcg

SEQ ID NO: 24425 - DNA, 1099 bp, Mus musculus
aatctgcctgcctctgcctcccgagtgcttggattaaaggcgtgcgccaccactgcccagccttttcttttcttttcttttcttttcttttcttttcttttcttttcttttcttttcctttcctttcctttcctttcctttcctttcctttcttttcttttcttttcttcttttttctttctttctttcttctttccttccttccttccttccttccttccttccttccttctttctttctttctccccccctctctctttttctttctttcttcttttttgttgttgttagcacagttgtttttaaaagacctcttctaggggccggagggatggcttagtacttgctactctttcagagactgcaggggttaagttcccaggacccatatggcttctcacaaaggtctgtaacttaagttccaagggaaccccgccctcctctggcctcactatgcacatcatatacctacaggcaggcaggcgggcaggcaaaacactcagacacagttgttaaagactgtctaaaattgtagtgatgtgttctttgataaaaattccaggtctatatacgcatatggtactgtcttagttagggttttactgctgtgaacagacaccatgaccaaggcaagtcttataaaaacattatttaattggggctggctcacaggttcagaggttcagtccatcatcatcaaggtgggagcatggcattatccaggcaggcatggtacaggcagagctgagatttctacatcttcatccaaaggctgctagtggaagactgacttccaggcaactagggtgaggatcttaagcccacacccacagtgacacaactactccaaccaggtcacatctattccaacaaggccacacctctaaatggtgccactccctggcccaagaatatacaaaccatcacttgtaccttccagtttttctcaatagtagaaattttaaaagttctgttttaaagtcagttccttggatggggtgtgtttgccctggtgcagatatgaaagtcagaggacaaccttccaaagctggttctggcctgtcacaaggtaggttctggggatcaagttcaagtcaa

SEQ ID NO: 24426 - DNA, 1185 bp, Mus musculus
ggcgccgcttatattttagttgggtcttcgctcctcaattaaaccttgaaacacccgcatagacgcatccatgggttttacctacatgatgctaagttctgtgaaattaacaatattaaccatcatattctggctaaagaaatctggtattgcttcctgggtctcgtggctgcgtacaccacacagttgacatgcgtcctgattggccttgaatgcagcatgaactactaacccgtctcaaacgctgtgccacttcgccaatgtgacatccgagttgtcgttgctctgtaattgggttaatttttttggtatggtcagacttttaattttctatccgccatgagtaaatccaaacgttttcttagggttataaaacaggtttctctgttggcaggattggcggatccaggttgtgcgctagccggacgcaggcgtagacctccaagagcaacgacgagtgcaggctagaggagcctaggggggcggggcgagggaggcggaagtggaccggtcccggcggccattttgccgtgagacagcaggagttaggcgcgatgctttccactgctgcttaccgagacgtggaacgagagctgggaatggggcctcacggctccgccggccctgtgcagctgcggttttcgccttatgccttcaacggagggtaaaagcctgggcctgctgccctcacctgggtcgagcctggggtcgcgacgggcgggtgtgggaatggcagggatgtagcctgcagcccagcactcagttgtgcatggacgccctcggtgccgtttgctccagcaaccgggctcccacctcaatcttccgccctatggcctgttgtttggtagggcttgaacacgtttctaaagccaacgggcgaacatgaagttatgatttgtcttggttgttagacgagtagctgtttctgtcgctgggccgcctgatcacttgttgttttaagaggaaactaacatgattaaccagacttaatttcagggatgaaagtgaaggttgttttgttctgctcttgagacgtagcctgctgggcaaggtctactgagctgcatccacagccttaggcagtcggacccttgtgtgtgtttatttttactctcaaattactttagcattttaattatccgctttattcgaagatatttttcctttgtatttaggaccgttgac

SEQ ID NO: 24427 - DNA, 1109 bp, Mus musculus
taaaattagagtccagatttgttattttgaatatttgtgtattttattagtttgctttctgtggtaaacactgaccaggagcaaatgggaaagaaagggcctctatttcatcatcctttcctgtcctgaaaggaagtcagggcagggacctggcgccagggactgaatcaggctatggacggccactgctcttcaggctgacaggggctttttgtttgtttgtttggttggtttttcaagacggggtttctctgtgtagccctggctgtcctggaactcactctgtagaccaggctggccttgaactcagaaatccgcccgcctctgccttccaagtgcagggattaaaggcgtgagccaccaccgcccggctcaggctcacactttacctgcctttcttataccttccaggacctgcccatggtgacaccacatgagtgggctgggcccttacaccccagtcatcactcaagatgatgcccacagacttgtctctaggccatctgatggagtggctttctcattgagggctgttctccccaactgaatctcactcgtgttaactgggcgcgcacgcactcattcacatgctttcctggcctgagttattcccacttggagtgtgttattggaatttattaattttcagtgcatatataatatagtactatgtattctatagtgaggtagtctactctgtcagtacacatatttgtgtatatatttgtgtattctagtgtcaacacacatataaaagaaattttactttttaagagataactggcatgcataccactttttttggtaatattcttttttatgtgtcttagttaggttttggttgctgtgataaaaacaccaagaccaaagcaatttacagaaggaaggatttatttggggcttaacattcctgagggataaagagtccatcactattacagtggggaagtgggacagcaggctggcatggctcctggagctgagaactcaaaccatgaactggaagcagagaggtaaattgggaatagcccagttttcaaatgttaaagctggctccagtgatacttcctccagccaggacatacttcctccgcccacccaaagagtac

SEQ ID NO: 24428 - DNA, 1099 bp, Mus musculus
ctgtggtttttttaagagttggtgctggtttgcttttattagcttttaggtttattatatgttaaatttgatatgtcagtagtatttcaacatattacagttaatttacttcaatataaatcagccctttatcattagaatttgttgtgtgacttgtacttgttaagagaaaacattactgccacatctcaacccttcctgtttttatctgaagtgaagtattatgctgaattttatgtttgttattgctacatggctttatgtgttgaaatcttgtttattgatcctcatgaagatttacatattagttactgttgttgtttacatgttttgagggtggcgcccagagcgttgtgctttttcatgtgcactacttgagccacagaccggcactacttaatttttaatgttgccattcattttaatagtatcactaataaaacacttcaagttcataaagtcagttgtaaaatgacttggagtcatgttggtcacagcttagatctgaaattttgtatatttaaaattccttgcaggatttctgctttttgctttctacccgagctgggggtttaggcattaacctagcctctgctgacaccgttgttatattcgattctgattggaatccacaaaatgatcttcaggctcaggcaagagctcaccgaattggacagaagaaacaggtattttaatttgttattggacttgtattatatttttctaaatatagtataaaaactgcaatctcaagcttgactgggataatggagactcccgaggcccagccatgccgtctttgtcgagcagctggactccacaatggacagaaccaagagaccctactatcagggtctgcactcagtttagattgtaactagagtgagtgtcaccttttcagtatagaaacttcatttgttggcattctttatcaacgtttgatagttcaagttcacagttctctgcacacaggagccagccccatctgaccggtctttgtactactaactgctgctgtttgaacaaaacaagggcaggtgttcctttggccagtgacacaggaagttaaagctttgttcacagtggggcttctcttagc

SEQ ID NO: 24429 - DNA, 1052 bp, Mus musculus
agggatcagttgaagaagatattcttgaaagggccaaaaagaaaatggttttggatcatcttgttattcaaagaatggataccactgggaagacagtgctgcacacaggctcggctccgtcaaggtgggtactgctctgtaagagaaatgctgtgggggaggggccaccccaaacccaggtaaataaattgcactgtgctgtagtgtggttaattttatacttttaaagacgttagactgatttgtgttagaggcatacacacaggtaccttgcttgactgttacagatagatcgcacagaggaattctaatttccatgtttcgtagttttaaaataactagattaaaacttcacccacatgactccctcatcacttataaagcaactatactgaatatgctctgcaaatattactataaagattgaatttgtgttttacatgtttccagttccacccccttcaataaagaggagttatccgccattttaaaattcggtgctgaggagctctttaaggagcctgaaggagaggagcaggagccacaggtcagcagcgtccatctcccatcggactccgtgttgtctggtagagcagggggagtgcacgtgtacttaaaataaccacacccttttaatacaggaaatggatatcgatgaaatcctgaagagagccgagactcacgagaacgagccaggcccactgagtgtgggggatgagctgctttctcagtttaaggtaggcctcttcctccttccttcttcacaactgcacactgctgagggttgagctagtgtttccatatctttctttaaaaggaagtaacaagatagttttcatgttaaagtattctgtattgtacaaaagtttgtgctcagtcaaaccatcagcacctcggatgaccagattggttatgggtaattacattcattatgtgcagtgggttcctaatttacagccaggatgactcttaaaacaacagcatgctctgcatattaagggcaatacatgcatgagtgtgaactttattcacatttccatgactcagctgct

SEQ ID NO: 24430 - DNA, 1105 bp, Mus musculus
ataactggaagaaaggtgtaacatctcatgcttgcacattatttattgttacaccacttgtatattaaaattattttccctaactgtagttcaggatgaccctttgaacaataaaagtacatgttagcacagttcatgttacagctacattcccaggcattactaattttgcaggtgattaatttagctatttttcttgttcaacattgaggtgattgtgtttttgaaagtagtcattcattcctggggctgggatggaactcagcagtagagctcagactttacctgtgtaagatcctgggtgcatcctcagcaccgctaagaaggcctctggtctaggcaagtagaagtggaaggcagcctggccaggaggctgagcccgcctcttcccagagcacccagagtgcgcaggtctccaagggagagaagagcttagctgggcagtggcttcacctgtaaagtttgataaaagcttgtgcatttttatgttttagaagtttgtttctttcaagttatttttaactcttttcctttaaatcatagacctgacaaagcccttcctcattgttcctacaagaaaactaagtgcattgttagtttttattaagggaacctttatggccatctgatttgctggactttctgtctttagttgaagaagcatttcatcttctactttctggatattttccctcatccatcaaccacttaagttgctttgttgtgatgtaaatttttgtttactgttgttggtataatagtcatccgaattaaacccttcaagtaaatcttggccagcttaggatgcgatgaggtgtgatggttggtaatcattttggagacaattcctcttgtggtagctttgaacattttttttgtcttataaaaataataaagtaatttctaaaataaaaattagcttctattgttttatttatattgatatcttagcttcttgggtgattcagtgttatgtttgctgtaacttaatgccctaacaatttatagcttagtttcttcttttcttaactcagggaacaataccttagattaagttttttgtttgtttgatttggctttgttattttgacatagggtctcatgt

SEQ ID NO: 24431 - DNA, 1178 bp, Mus musculus
tgaagtaattgaatttaaataatctcatgattttgctttatttctgaaatatattttgttattaagacaggtatcaattatttgcataaaacttttccgttattaaagtaaacaaaaaggaaacttaaatttcttataacaccgttcttagaaatctataatcttaagtaatgtctcgttggttagaactcttgatcctcctgacatggactcactgtgccctagcaaatcagatattttcagaaaatatcaactaatgttacaaaattgggtgactttattttgttgcctgcctgcctcccttcttccctcttcccctctttctctctttctctccttctctcgttctctcgttcttttgctcttgcataaaatgtaaaccttggaagcatttctttgtgtgatcttttccctgctttttttttgtgtgtgtgtgtttggatgggcagctggtcatgtttgtggaggccagaagacagcactgggtatcattcttaggaagtctgtctatctctttcaagatacagctttttattgtttgagaaatttaccattagatgagactgactggccggatagtccccgtatcctcctgcctcctctgtagtgttcatgggacacttatagcatgaaaggtcttgttgccttggtgtgtgtgtgtgttttgaggctatgtgcatccctgtgtattttgacatgtctcactaacttgttcacccaggttggtttaggcttgtgatttctagtgttggttgtactacttagtacttgggagacaagaggattggcacaagtttgaggccagccaggggtaaacataagcagggagactggatctcagtaaagaagagaaaaatggcccggcagtgggggcacgtgggaggcagacgcagggggatttctgagttggaggccagactagtctacagaaggattccaggacagccaggcaacagtgaataagcaagcaacaagaaaaagaaacagaaaaaaacagaagagaagaatgagtttgcttccaaggaaattaaagctgtttaatggcatctgatgttctcttctggtattcatgaggactgtgtactcatacacacacacacatgcatgtatgtgtatatatgcactcatacacataaaacactatctttaaataaaactattttgtgactgcacatagt

SEQ ID NO: 24432 - DNA, 1537 bp, Mus musculus
gctgtaaattattgtaaatggattaaatgagctgccctgccctgcccttctcaggcttcttttgactgttcctttccctaccaactcaggccttcttattaaaaaaaaaaatcagtgtaataacactttttaatgatttgtcttgatggaatcattgtttagaatgtaaaaatggggaaaggggccacttatttcttttagtcctttttatattgagtatttttattagatacatgttttgcccctcctttttaaagtcaatattgtgtttgtagttttacagaagcagtggcgagggttacatgtgagacaaactcggtgctctgggagagtccccagtgcattgggttgaaagggtggtaggtgtatgaacacttaaaatccaaacggccaaacgttcttgtaaatgcattgcttttccctttcatgtgggcaataatgtcaaacgtgctatgcagccaggttaacatttgaggtaaacttgattggctttaatataaaaactgttacagtacacactgattgtatataaaaaccttatatatgacaaattaaattttaagaaaaaggatatgtgggctcctgtagttttctgctgcattcttgtttccacgagcatttaatctttgctttaagtaacagctgccagaaagaaaggtattttggtcagcaactgagaactgttgatatgtaatcctaaaactgcctacgtctgtatagatgaatcagtcttctatgaagtaaaacagattctagcagtctcggcttcctgtagacattcctctaggatgtcttactcgtcacctcgtttctccttatattcagtgggaattttggatgtatgttgtgtaaccattaataacctttactcctggtcatgtctccatggagtagctgtggggctacctaaagttagtctgtggctttgtattttcatatctttttttttacatggataaatataaaatttatgctgtgtatacaaacaaactttttttttttaaaaggaatttcatctttggcctaaagttatcctgaagcaaacaatgtctttttatttttgatatgcaaggtaatgtgttggggaataactcaacttttaaacgtctagttataattaaagataaaaacgatgatacgattcagtgctggcacacgacttttaaaatttttcattttcctccacgtttaatgtaaatgatcattttattcccaaagaacacttcccataaatcctaatattaacacagcaaatagctcagggttggcgctacatgcctttgtggctaggtcatttgcttaaaagcctgttgtaaagaatttgtagaaaaataatgcaattttgaagaatgggctttttttttttttttaacaatttgccatttaattgagttaactagctgagttgaatgaagcattcttaaacctgtatgtaacatttgagtgttaattatatgtaaaaagtaacaactacatagtaaaggagcaagccatacagttactaagatgcacggacagcgtcagtccttagggataa

SEQ ID NO: 24433 - DNA, 1232 bp, Mus musculus
caaggaagggaaaatgttggatactttgaaccactatttctgtgcaaatataaaagtaaaaacaatagacgtttctacaaggtctgcctttagagtgtgtgattgctacaccttttatccttttgaggagaacaaagccaccgtgtccacccaatagtttggaaaagaaagtttccttatttagctgtattgtttagctggagagggtgccctgagatgtcctacagcagtggcgttagtaataatgtgttagtgttctccttcagaattggtgtccctgtgtgtcctttacagttcccacagataacttttagaaatcaagtacttttgtagagaagggccaggttttctttggggtttctaaggaacataaattgcttgaacttgtcctatgaagtccaaagccagaagaatttcagaccatactgccaagcaaataggctatagcttttcacgggtctcctgggagagcttaaaacttggggcaaaaccctgattttcacagatcttcccatgtctctctttggaaatactcaaaaccacattgccccctctgctgtgcttgacccccccccccattgtgtcgaatctttgcagagaaacctgtagatgtggttcataggtatattgagtaagtttctgtgtaaaaacagtgagtgtgtagtatgtaaatacgttaaattattatgctagaaaaataaaggttccagaccatgctgcccgatgtttgttctctgcttatagtgacacctactggacgagccgaggaacctctgcagaagaaaaaaaggaagggaattcacaaaaccctaatcgtttttgatgggatgtactgcctgctcccctagctcactcttaagcaatctcaaataaagcagtgtccgactggtcctaagatctgtctttaaacgagtacctttgccccttgaggacactgcactccaggtcttgtgaagaccaactggaaatcggcaacttaaccataccgaaaatatgtgggaggtaggattggttttcttgtctttgaagacttgcaaaccctcatttcttgggtgttttaaaaggagatgtcctgtgactataagttatctgtgttgaagaaatagagggtagaataattgggagaagaaacaggctcaggaaagcgccacctggtgccaggcgggatgctgagtggagtaagcccgggcagagggacccagagttcttgagtagagagcttgctgtgtgtt

SEQ ID NO: 24434 - DNA, 1490 bp, Mus musculus
atgcctgcctggatgctgccatgctcccaccttgatgataatggactgaacctctgaacctggaagtctcgtgagcagctggccgctggtgccctctattgtgaaggaggagagcagcgaggaggagattgccatagctgctacttctgctaaagaactcggacatgagcctgtccctgctgatctgggagaagtgcgcaccccagagcccccagaatctctcaagcgtgaataccaggagttctcctccccggaaacgagcctgccctacaagtgggtggtagaggcggcaaacctcctcatcccggctgtggggtccagcctctctgaagctctggacttgattgagtcgtttctgaacttctggaacaaacacgataccctggagctggagagcccctcactgacatccactccagtgtgtagccaaaaggtggtcgtcaccacgcccctgcacagggataagacacccctgcaccagaagtatccatcatcagaagtactcccagatcagaagtactccatggacaacactccccacacgccaaccccgttcaagaatgccctggagaagtacggaccgctgaagcccctgccgcagactccgcacctggaggaggacttgaaggaggtgctccgttctgaggccggcatggagctcatcattgaggatgacatgaggcccgagaagcagaagagaaagcctgggctgcggcgaagccctatcaagaaggtccgcaagtctctggctctcgacattatggatgaagatgggaagctgatgtcctctatcatgcccaaacccctgtccttgccaaccagtgtcacacccagctcctgtggcttcacctcgccaggtagcaaagagggtaacagcctgctcaaccagggtttcctacaggccaaacccgagaaggtggtggccgcccagaagactcggagccacattccaacccctgcccctatgacccatgcctggaagacggtggcctgtgggggcaccaaagaccagctcttcatgcaggagaaagcccggcagctcctgagccgcctgaagtccagccacacatctcggaccctcattctgtcctgagggacttgaatggcaagagccggctctcatgtttacaggggtagggtgtggggtaaggttaaagtcacattaagtgaccagcttcaggatgtcttctgccagcccctcaaactacttaggtggcagaagtcatgtggtaataccccttccctgagtctagctttgggaagttcctggtgctaatagaacaaggtcccactcctgggcctgcctgtcctctacccaatgctagaaggaaccctatcagggtctcccaggctctcatccagtctggcctcatctcagactcctgcttaggatgggggtgtggctaggggtgcgcctttcctcgtctcctgttggtacactgtccccacaataaaatgccattctccctctgccaaaaaaaaaaaaaaaa

SEQ ID NO: 24435 - DNA, 1207 bp, Mus musculus
aatgtcctctattatcatcatgagaagtgattttaaacctaaaccttgcttttccagtgtgatggggtatccaggacttgctatgctgggggagctgggtgcagatgatgccagatagccttagtttctgtggcttatgttcttgttcttgcctctctccatctgattatctctattgctacttgcactcactgtctctgactggagcctgtctctcctgttttgtagttgtgtcagaactcagagtccagctctgtctgtgatcctgagatcctgggtgtaagagctcctgggagtcaagatgcctttgggatcctgaaatcctggtgtgaccaagttttgccatcctgtgattctattatcctataatcctgggtgtgttagagcacctgggagtgcagcttcctctaggtgttgtgggattgggtgcacagctagcagccaggtctgctcagggactggctcagactaaaaaaagacttaatgtattatatagtgaatgtatcatcaatactctgtaacattaaagatgattttttgattgtttgtttttattttttcattttttggttttttgatacacagttttgtgtgtgtgtgtgtaccctagctgtcctggaacgcactctgaagaccagcttgcctggaagtcagaaatctgcctgcctctgcctcccaagtgctggaattaaaggcttgcaccaccactgcctggccataaagatgtatttttcatttgaacattaattcaacattaggttttcttaaagggaagcaagaatattttagaatttagtgagcagttacctttgtaattccactattccaactattgaaaaataacacaagaaaatgacatgagtaagttttatgttatatgttttgtgtgtgtgtgtgtgtgtgtgtgtgtgtgtgtgtgtgtgtgtgtgagtgtgtgtgtgtgtgtgtatttctcactttgaggtgggcaaaactttgatttcctgcattaagttaggacctaggaatgtgcttgtcatgaactcctgcataatgttcatcttgtacccaaacagaatgagaactgtatctgtcaaaataatgcttcccttgtctccattttatgctttgtttattgttgtttcccttcttccatgaattttcacttaggaaatgttggactcatttaattggaactagattcttctctcatacagtgtaccaaggc

SEQ ID NO: 24436 - DNA, 1099 bp, Mus musculus
atggtttttgtcctgggagctggaagtatcctttcaagctctattactatctagttttctaattttgaaggggatcttatgcaatttgtacattacttttggcaagatgggtattaatcatattaatctatgagcatgagagatttccccatcttcttatatctgcttcagtttcttcacatagttgaactattttattattttttatttatttttttgtttgtttgtttggtttttttggttttttttgtttttttgtttttgctcaagacagggtttatctgtgcagtcctggctgtcctggaactcactctgtagaccaggctggcctcgatctcagaaatccaactgcctctgcctcccaagcactgggattaaaggcgtgtgccaccactgcctggcgtagttgaactttttatcatgcatgtacttcagtttctattttaaattactgtaacctttttacattatttgaagctgttttgtttctctgatttttctctatttgtcttttgtataaaggaggcataggagaggtctactgatttatttatttatttatttatttatttattgacattgtgtcaagccattttcctgagagtatttatcacctatataaagttggtactggaatttttagagtcactaatgtatattattgtatgatgaattctaattatgatactttcacttattactttccaaattattgtttcagattgtggttttctcgatttttaatggatttatgtttaagggcttgaacctattttgctatattctcctgtatatcttttttttcattatatctatcatatattttattattatttttattaggtattttcttcatttacatttccaatgctatcccaaaagtcccccataccatccccgactaccctacccacccactcccacttgttggcctggctttcccctgtactgaggcatataaagtttgcaagatctaggggcttctctttccactaaggaagactattccatcttctgatatatacgcagctaaagacatgatgtcgggggggggggtaactagttagttcatattgttgttccacctatagggttgcag

SEQ ID NO: 24437 - DNA, 1162 bp, Mus musculus
gcaccaggaaacacaggctggctaaactctcagagttccttctgataggacttagcttgaccatcactgtgattctgttggtagatgtacaaacatggccttagacattgagggtcatttaatgtggaattcccctggagaacaagagactctacagctctgatcatagaaatctgtgttgcttataatataatatcactgcccagtatacatgacaggtgtaacttttgctattcattgggaagaatgttattttttttaattttttgttaggtactttcttcatttacatttcaaatgctatcctgaaagtccccataccctacccccacccctgctcccataccacccactaccacttcttggccctggtgttcccctgtgctggggcatataaaatttgcaagaccaaggagccgctcttcccaatgatgaccgactaggccatcttctgctacataggcagctagagacacagactctgggggtactggttaggtcgtatttttttttccaactataaggttgcagacccctttagctccttgggtaccttttctagcctctccattgggggccctgtgttccatccaatagctgactgtgagcatccatttttgtgtttgccagacactggcatagcctcacaagggacagctatatcagggtccattcaacaaaatcttgctggcgtatgcaatggtgtctgcgtttggaggctgattgtgggatggatccccgggtgcagcagtttctagatggtccatcatttcatctcagctccaatgggtaataacacatgctccactatgtttatagcagccttatttataatagccagaagctggaaagaacccaggtgtccctcagcagaggaatggatacagaaaatgtggtacattgacacaatggagtactactcagctattaaaaacaatgaatttatgaatttcctaagcagaaggatggatctggagggtatcatcctgagtgaggtaacccaatcacaaaagaactcacatgatatgtactcactgataagtggatattagcccagaaacttagaatacccaagatacaatttgcaaaacacatgaaactcaagaatgaagaccaaattgtggacacttcaccccttcttagaattgggaacaaaacaccc

SEQ ID NO: 24438 - DNA, 1575 bp, Mus musculus
catacactacctcagagtaaaaggctagaaaacaattttcccagcaaatggtcccaagaagcaagctggagtagccattctaatatagaataaaattgactttcaaccaagttatcaaaatagataagggaggacacttcatactcatcaaaggaaaaatcgaccaagatgaactctcaattctgaacatctatgttacaaatgcaaaggcttccacattcataaaagaaactgtactaagatttttgcgaacggcgagcagcggcggcggcgcgggaagtgcagcggaggtttttgctggtttcggaccccagcggccggatggtgaaatcctccctgcagcggatcctcaacagccactgcttcgccagagagaaggaaggggacaaacgcagcgccacgcttcacgccagccgcaccatgccgcttcttagtcagcacagccccggcggctgcagcagcgagagttctagggttgcccttaattgctgtagtaacctgggtccggggcctcggtggtgctcctgatgtccctcacccacccctgaagatcccaggtgggcgagggaacagtcagcgggatcacagtctttcagctagcatcctgtactccgacgagcggctgaatgtgacagaggagccgacgtctaacgacaagaccagggtcctgagcatccagtccacgctcacggaggccaagcaggtcacctggagggcggtgtggagtggtggtggcctctacatcgagctcccagctggacctctgcctgagggcagtaaggacagttttgcagctctcctagagttcgcagaggagcaactccaggctgaccacgttttcatctgcttccccaagaaccgtgaggacagagccgccctactccgaaccttcagctttcttggctttgagattgtgagacccgggcatccccttgtccccaagagacccgacgcttgcttcatggtctacactctggagagagaggacccgggtgaggaggactaggtgccagccctgcccagtgtccctgtgccctctcctgggttagtccacatgtcgtgattgtgcagaataaacgctcactccattagcggggtgcttcttcgagctgaatgctgtgtttgtcacactcaagtgttggctttaattctaaataaaggtttctattttacttttttattgctgtttaagatggtcaggtgacctatgctatagcagcctcctttgaagtctggaaaaatagtgtcacctcccctggctcaaatccaataaagtgatctcgttaaaaaaaaaaaaaaaaaaaaaaaaaaaaaaaaaaaaaaaaaaaaagaaactgtactaaacctcaaagcacacattgcacctcacacaatggacagatcatgggaacagaaactaaatagagactcagcgaaactaacaggagttatggaccaaatggatttaacagatatctgtagaacatttcatcctaaaacaagagaatatacctatttctcagcacctcatggtaccttctccaaaattgaccatataatcggtcaaaaatcaggccttggctggacagtggtggc

SEQ ID NO: 24439 - DNA, 1278 bp, Mus musculus
gagttcacttcccagcaatcacatggtggctcacaaccatccataatgagatctgacaccctcctctggtgtgtctaaagacagctacagtgtacttacataaaataatatgtgtttaagattaaaatatggaaggccggctgaactcacttcacatttattagagtggtgctattcatctcagatatcttttttctgtgttatttaatgctgataccttcgttctctaggaaggaggattctcttgatgttgaggtctctgccagtggttacacaaaggaaatgcaagcagatgatgaactgctacatccagtaggcccagatgataaaattactgaaacagaagaggactctgacttcacgttttctgatgaagaaatgttagaaaaagccaaagtgtggaggtcagaattggaaaaggaagcagacccagcagatgaatcaggtggatcctggtgctgctcgtctacagacagcaaacaaataaaggatggcggcttaccagaggagagtgctcatgtgtccagtttcgaagtgacggcattaagccaagctgtagaagagatggaaaggcaggttcttccccacaggtcggttactgagttctctgaggagagcaggagaactgaaaatgatgggcagccaggtcagagaagccctgctggctctgaggactgtgacgatgaacccccccatctgattgccttgtcatcagtgaacagggagttcaggcctttcaggtacagaggtgttttgtttgtttgtttgtttgtttgttgcttttacctttaatcttgagatctttgattctgtcaagggaggatatttgaaaaaagaaacaaacaaaaaaaaaacccactgtgacaagattgtgtcgtgccattatcatgtgtaaaaatgaaagttaactttattgtattgaaacaaatttgtcttttgaattaatctaattcccaacactcgattgactaaatttcacagaattttaccttaaacttagactcactgaattaatgtaggtctcttaatattaggtctgtttttagaatgggtaaagtgttctgtttcattgatatatttaaggtatgtttaaactatgaagtggatgtgagtatgtgagacatgcagtaaatgatttctatgttaattatctacagagcatgtttcctggagctttggggcttccatcattttgtttgatttcttatgtgcacttaaagccacataatagtattatgttttaactttgtgtttgtttgttgtttgttttttgtcttg

SEQ ID NO: 24440 - DNA, 1543 bp, Mus musculus
gtggcactctagcagttgataatttaaactgaccacttttgctgtataatctgtatttctgggaagaatataaattttaaaaactttcaacagcttctcctgttttatctactagttcatatagtgtccttaggattcttaaaattcatctttaacatgtaaatttgaaagatactaccagtgtaaatcttggataataatttgataatgatttctctgctccttatcaagatggttgtcagtgatactaattcacaagatctttgcaggaactggtgaagcagaaggtgaagcgtcagctgacaaggcagcagaaggcggctgccagacgccggctgcagaaaggagaagccaatgtgtttaccaagcagcggagggaaaacatgcagaatattaaatcgagtttggaagcagccagcttttggggagactaatagatttctgatatgtattatttttttagatgctataattttatttttagccagtatattggtcttttttggaccaaagccagtaaattatggaaataaagcctctttagactcagagcttccaaggtctgattaatagtaaatctgccaagcactctgtttcttaaaatttttcaggtaactaatttaaatataaaataacgtgtgaaaaaaacttcattggcagtaattgcaaaacatggacatcatttttatttcactgtgatgttcagactctgccttaaacaggtagaaaaatgacttgcctcagattctggatttacatgtaataaataatagaacaacttaatgcaatctgtagttctctcttttctccttcagtcggtcacacttgggcttttactacattggtgagttggctttaggatcacctgagacagtcagtacacagttatttgaccattggagtgaaactgatcgtcttctgtttctttagacttctggagtggagatgaatcagtaatgggtagacgagcagcagcgggtcttttggtgccgttctcattggccctgtggtcgtgggaaaaggaagtttaggttcctaccagtatttttgcagttgtcagctttccccaggtttcagcagaagtggggggagggagggagggagggagggagggagggagagagagagagagagagagagagagagagagagagagagagagagagagaatgcatgactccaggatgtgttcctacctcagtgttaacaagtctctagaacaacactctggtgtgattcatccctcaagcgcattctaattcagtcagtggaagtgagtgtaagtatacaagcactgtcccttcagcttccctgagcagatctcgaatagaagatcgtcttcagcaagaagtgaccaccagatggcagtgtttgccagcagtgacatgataaaaacaccagcttcccttttaccttagcaaaattcattctgactatttgtaactgatcactatctaagcgcatttaaatgtttggatatatgaatatgtcaagtgcagtttctttgaaaattagactgatttttggaagtgttgatatagcc

SEQ ID NO: 24441 - DNA, 2526 bp, Mus musculus
ttagtttcataagatgacagcacattgtttcttgcatatttcctcatttagtagtaggtagtacagctgatttgtggttttcctggttattctgagatatatatatatatatgtatatgtacacgtatatgtatatgtatatatgcatatacactatatatgatacaaatattatactattatacatacatatttaattttctcccttgctctcattgtttccctttaatacttatttccttgaaggtttttacatgtacctagagaaagaaaacaaaaaaacaaaaaaaccaaaggctcattacatgttgagtgtctgactgaaagtgtagccctgggactccatgtgtaacagtagcaatgggattgcagcaaataagatgggagaagacactcaggtatggctgcattgaggaaactaatcatatccagcatttctggtgttgaattaaactgacatggtgaaagtcaagctttggttttgtaaatgccagagaaaaaacagagaacattgcacagtaaacctgagtttaaatggcctcagtgtttgaggcaagctttgaagctagggtgtcaatatctgtgttttctgtaactaatctgaagagccctcgagagtactgtgtctgtgaggcctgaagttcagatttctctccagagttcttttgattgttcttatgtacccaggagaagtcattgtgattcttagaatggatcatttgagtgattactgctcctctggtggctgacaaacaacatggtcccaaaagaatttcaggggtaagacctttcggtcttagaacatccacatgtggcagggcacattggccctttcttacccagaactcttttgtgtggctgcatctctttctccagttctctcttaactggagcatgcctattctttgtccttttgtctttagtatctttgttgttgttagatgccatctgaagttacactcacaagtttaagcaaatgctgccttcttgtcagccttgtgattctgtgtgcatttcatgcaagggaacctgtatgtttgctctctgcattcttacatttcatattgtctcttcttccaccacatggtaaatgttatgactacacatttgtcttcatcaacgaaaatgcatgtgaaaacctctctgtccttcttgcatcttagctttgttttgttctcacatttttactgatattccacaagaaagatttgccatatccatttaggaaacattgagcgatagatagttctcctagaaattctcaaagacatgttatttaccatatcaaactctcaggaatgtattggaaaattatcctagtaacattgctgttacttatacctgctgctggaggaaaaaagtttattcatgacacatttacctttgatcataaataaaagagaaagggccacctttttggagttagtcatggtagtcattagtgatatttttgaaccgtttttaatttgaaatacttcaaaggaagtaaaggtcatggcttagctcaaaaaaatgctccagaagttgggctgcttaaatcatcagtacaataatatactgtgtgtgcgtgcatgcgtgtgtgtgtgtgtgtgtgcatgcgtgtgtgtgtgtgtgtgtgtgtgtgtgtgtgtgtgtgtatgaaatgagaattgccacataattggagcatttgcattcatccgcaaatcatgttgagacaaactgtagctggccgtcttgattaaagccaagtggtccctgtggctgtgaggaagagtttttcttgcaaaaactttggcaagtgatgacttcgaaacttacaaagctattgcctttttttttttttaacaccagtagtgaccttcagttccttcagtctgagtttaagggtagaattctaaatttgtattctaatctgtcttttgtggaaaattttgaaaatagtatgtatatgtaatattgtatatgcaaattgtgttgttttacttgttttgcatatgaccagcactgactgaaaggcatgtttaactataaacactgttgctttctttgtgaaatgaaaataaaagtatttaaatacaaatattgtatggattcatctgataagactgattatatattaaaagtatttcatctcaggttctaagttccgtcagaactgttcccatatatattatctaaattgcttcctgccttactccagagtccttaacacataaaactcaaaggaacccaaactcacactgtgaacattttgggttgcgcaattatttgctttgagagactcttgtgcacactgtagaattttcaacatatactactgatgctggttgcatctacgggtaaccaactgcccatagcaacccctcactattctggcccttgtgagaaacaaaaacgttacttcatagatagaaaactgttccctggactggcagttaaaactgtgtgtgggtgtttggaacaacaggctcagtaaaggggttgctggttttagggcagttacttccttgcacaggtgcaatccttatgaacactcagatcctg

SEQ ID NO: 24442 - DNA, 2738 bp, Mus musculus
ctacagagaaggggtgttcttgaatgcaatgtgaaaggtacgtcttgattaggaaaagtagaattggaattctagacttgagaaaaagaatcgattgggagatctgagagtttattaaagctgggaattggaggagacaagtttcctctgctaatatgacattagatataataaagtagtggtcatgcccccaccccagaggctcatgctctcttctgtctcattgtattagtcattgtttcagagtgttcaaagactttcttgctatcataggttctacttaattttctttgccatatgtgtttttatttttatgagattttagccaccattggagcaaaagctgccagaagagtcctgggtataaacaaacaaatccagctgcatgaggtttactgggtacccaacaattcttgctgattattgcgaagcaagaaactaaaattaagtcctgtgttgttgcatgattgttagtctgttgttaaattggattgtaaagatggttacttaatctaaagaacctgaactgatgatcttcagccagactgctgagcacttatagagaccatgtgttgtgtgggctctaggatagcacggtctgtctcaggtgctctgttgccaaggagtgcaatgagtttgcatctaggaatgcgttgctttacatagcctctaaggattgggaccatgggtataatgtaggtcttcttacctttgccttacttttgtttatgtggaattaaatcttcttctactacttcttcttcttcttcttcttcttcttcttcttcttcttttttggtaatgttctgtcttctcatgtttgtatttcttgaaactcaggtatatatttttgctggggtttttgttcttttattttgttcttaaagctctaaaatatcaaaaaagtttcaaatgaaaaatggaggtcccaaagtatgacagattactctttccccatcctttattgcccggttagtcaacaactagtagagtaagttattgacctttagagagttgtagaggtttttgggcggggcgtggggggagggtgttagtgttgatacatattttgaaacatatacatgtatttttagatgtttttatattttataaattttgtcctgttaatgaaagagtgaagtactgctttctgataatctctcctcttcccatattgcctactataggcaaagttgtaaaataatttaagttttgaaacagtgtgagtttcaagaggggaacaaggtagcttcttttaagagtgtgtagaaatagttttgctgctatttggcgcttacttaatgctgctctctatacatttttcttgtggacatgtacataagccatgcaaggacacacagatgtttggcaataacagaatgataatagtacctgttgttttgctctagtcttaggaacttaggttgtcgctcatcctttcaaacatgttgtaagtgcagtgccacttgtatttcactttgacttgtctctgcataggcacgtgattaccatggtgattgagaatgactgattcttccctttttcttgttgcctcttaaggcaagaactgtagaagagagtagaatagtgcttgctatggccttttattactgattcattaggttctatgcccttcaaacatatgtgaaaatacctgatgaaatgtggaagactacatgtgaacagtcctctcttctctcacctcttacggcctgttggccatctgagtggaagatggagggaaatgtacttaatgtctgtatatatgttcttactactgtattgctttagttctctgggtgatcacagtggaagatccccaatgtaccatggagttaagatgtacagcagtgccctctttccctttattgcctcggtacaatacttcttaaaagtattttgaatgtttgaaagttgggtttgggtttctggtggtggttggttggttggttggtttttgctaagctggaaaagtagtttggaggcagagtgtatacttttcaggtgtacaaacgtgttgtcgctgtgcttttccttccttgttttccctgtcctttctatggctttatgagtaaagctagaaatctctccaagaggtttcttccttatgttggccatgcagtatcattgacagtagcattgacagtgacctggagctgctcctgggggctgaggagctggcatctgcttttcctatgtgtgtccctaggtgctcttgcttcttaatcacttaagccatttcattgggtgcctgtcctgatgaactgtggagctccgaatttagtgtcctcccattcctgttccatctctgtgagtaggcttttctttttaggttttttttttctcttagctttactggggactaagggcgagaaatatattctttataaatataaataattttgttactatactgtattatttcatttggtactgaatcctttacatgggcatttaagtacctaatgaaacgtggaggtccggatgtatgaaaacttcctcttttcccttttcctcattgcctctgtgggcaatagctgtagaatagcatagattttctaattctcttccacccagtaggtggaagtatgtatatactttaaaatgtaaatataaattttttaaactttttgttgttacttcatttgtacctaaatctatttgtggacacttaggtacataaagaatattgaggttcattctatgaaaaatctcccctttcccttccctcattgcct

SEQ ID NO: 24443 - DNA, 1099 bp, Mus musculus
aaactctgtctcaaaaaactggggggaaaaaatattcctgtctgatttttatcagacaggtgatgcatttgggtctaaggccacttctgttgacctagttcttgctggactctagaattcactcaacatatatttccctgttttcttttttgtgttctgaggatgcagtattcaagagttcagggaccattgagaagagagggtggaaatatttttaagggccagagttctaggaggactagacaaagtggtgtgtcctggacatgttctgctgtacataaagcagctgtggttgcctgcacaagatcaagtctgtcgacattccagcactgtgggggaggggctcacaagccttcacctctatctgaggccatacttacagtggatggctcttgcaggaattagagccaattattttcaagggtgcatgcagtccatggtagatctgtaggctgatcatgctctagtggatgttcagcacagcttgaactgagtggtttactatagtaaacaaacaaacaaacaaacatgaagagggttgggaggagtaggaggtaggtaggttttgaagataggagcggagataaatataaaatatattgcaggcatgtatgaagttcttaaagaacaaaaagacattgattaaaaatatatcaaatgccaggtgtggttgtgtgtgcctttaatcccaccactggggaggcagaggtggtaggcagatctctgagttcatagcctgcctggtctacagagaagtccaggccagcctggaacatagtgagccactgtcttgaaacaaaatgccaaaaagatggacttaacccattagcatatgtaagcatctaaattacatatacatctgtgtagctgcaaactggtggagcctatgtacactgtgtacaatgagagataggggtgggggactttagtacagaagtggtgtgatcaaaacccttgcagtgataaataaggtgatagagaatggtggggagctgggcaaaagatgtttataaattaaagagttccaggtaacctagagatagaaagtgggcaagagttcctcaacagagaaataggaaactgaaccagcatagtaggg

SEQ ID NO: 24444 - DNA, 2058 bp, Mus musculus
accataccttaccattcaacctctgttgaatgacagctgggaacacagacagaatctgatcctgacaggtcctgctgtgtagaaaaggagagccaagtaatcatggctgctagcagcttaggcaatttgcataacctgtgtacttctgatacttgctctttgattaatgagggcagtattaagactgttttacaagattcacatagaaggtgtgataaaaaggtgagcaatgcaatagccttgcctagttcatgggtattgaagccctattatcagtgtttactgtacattgagagctacacacatggacctcctgagagattcttataggaagcttgttatcccaagaatttgggtgagagatcagaggagtctccagtcaggccatgaggtagggttccacagtggaaacagtgagaaaaacactggtttctaactttgtgttcttattacagccaccccttgagtcactggccacagtggaagagacagtagtgcgagacaaggcggtagaatccttgcgggccatctctcatgagcactcaccttccgatctagaggctcactttgtgcctctggtaaagcggctggcgggtggagactggttcacctcccgcacctcggcctgtggtctcttctcagtttgctacccccgagtatccagtgccgtgaaggcagaacttcgacagtaagttctcactcccatcaccttacctaaccttcctctaagcctcagcccctttaggtcttccatgacctaatgtctaatgtccttgatgactccctcctccctcctcagttctccaaagaggcttgtccttcacagtgatcactggacactgtacttcagcagtgaatttgcctggtctgccttcatggaaatttattcctgccattagttacacattgtgggcttggagcagaatacagcataacaaatagtatctggtattatttccagcctgctccaggtttagacccctcatttgctgactgccttgttgctcataactattaagcagaagttgctgagatgtcacttcataccacatgctgcatgtctccaattgtttcccatgtatctcttaatgaggcaattgctcctgaaatggaaggcaagttttaaaccgttcttagtactgtgttgtactgtttgactgatacgtcaaatcagctgtgtggggacttgctattgccattggtccgtataatagtttatagagctgagaagacagagaagtcatgagttatacaaagtcaccattgtcagcaccagaatttactgcagaaccagcagtgctctgtgctgtgccgggacactagcagttaggactttccaggattctaagtctggacctccatccaatcccaggtacttccggaacctgtgctcagatgacacccccatggtgcggcgggccgctgcctccaagctgggggaatttgccaaggtactggagctggacaatgtcaagagtgagatcattcccatgttctctaacctggcctctgacgagcaggtaagtcagtcgtcagctttcacaatgcaagtaagcttagaagggagtgcacccttaagactcagtgggcctgtgtttccctacccctctgctgttttccctaggactcggtgcggctgctggcagtggaggcatgtgtgaatattgcccagcttctgccacaggaggacctggaggccttagtgatgcccaccttgcgacaggctgctgaggacaagtcttggcgtgttcgctacatggtggccgacaagttcacagaggtaggttgccatagttccacaggtgtggacactgaggctctctgaggggagaagggagcaacatacaggaactgacatactgtattttaaggatagtacggtcctgagtcttaaagagaaacccaatgatctcccagagccagtcctgggtgggtgattcaaatcagaccgctgtgttgagagtgattctgaagccaagtttcaactccatgaaagcattttccctaaacttataacctctctaagaaagacacagccccagtgatagtggcagcaac

SEQ ID NO: 24445 - DNA, 1194 bp, Mus musculus
caactagatgggtggatttctaagaggcagaaatgggcccagagcatcaaatctcactaataccttcctctccctgcccacagagttctgtgaaaatctctcagctgactgccgggagaatgtgatcatgactcagatcttgccctgcatcaaggtaatagagtatttggttgtaggatttggttttagatacaatcagatccaaggccttttgagatactgtaactgtttaacagtcatggattaggctgtaggcaaaatctgaaggttgaaactgaccctcagatctaagggatgtatttactgctcagagaccagagttcccttatccacagagttttggggaatagggcagtggccccaggatcggggctcacataaccatctctttaaatgtagtgcagccctgagatgccctgcctatgaaaagcagaagactgtggtcttagaattggggctactgtctatgtggccagttatcattaaaggggatttttctgaccttggctccctccttccttctcttctgaaggagcttgtgtcagatgccaaccaacatgtcaagtcagcactggcttcagtcatcatgggcctctctcccattctgggcaaagacaacaccatcgaacacctcttgcccctgttcttggctcagctgaaggatgaggtaagagtggcaggaaggttttcaaagtcaatcaaattatccaaaagtattttaaaagtttggcaccacactctacactctctgctttgataagttgatgacaggcaaaagtgtctgcttgttcactcgttcttgtcagacatgcctcatgtgcctttaattttgtactcatccgttccctgagtgttgaacaaagaccaagacaatggtgatctttagggatctatagaatgtgccagtagagaggacagatggataaattgtcccataattcaactcagaaactaggtactgggagaagtgcgccatagtttaaagcttcatgtttccactgaaatagctctagcttgtgtcttctacatgctctgttggccatagccagtctggtcaccatacttgcctgtgcactgtagtaacagtttagggaattggatttgaatctgtaggcaagtgctgcagctgcaagagatctttctgttaggaaaatatagccagtgttagtgagagataggagagatggccagaga

SEQ ID NO: 24446 - DNA, 1304 bp, Mus musculus
gaattttccatgtgtatgctttgtgtgttcatgttctatactctgccttatgatttggtgtgttcctgtcttgatacttaccttcaccggagccctctttctacctgtgggcacaactcctccaccccacccacccccgaacacacacacacacacacacacacacatccatccatccaaggcaagactatctcactatcttcttttcccttcactttccagcaccctgcagagtgaagtcaagcccatcctggagaagctgacccaggaccaggatgtggatgtcaagtactttgcccaggaggctctgactggtaagggcctgagagtgtagagcctctggcagaagggtgagggctccggggaatggggcagcactcagaaatgtggttggagaatgtggtgtggttctgaggcgtattgttcttgtttccccagttctctctcttgcctgatgctggaagaagaagcattgccggcctctggtgtccaccctccaacccccacaaagttacctcccttagggaggtggtgggggcaaatgactgtcactccctgtgcatggtctgaccccaggctcctcccccagcacggttcggttcctcctctgtagcctgggaagacttctctgtccacctcccaaggggctggagcagtacaagttgttgcaggacagcagcctgaaaagaagggctggttgttcctgcccatattgggagagatgggagcatcctaggtcactggcttttgctgctgtaatggggacccctcccccatctacttaccaccaccctttcccaaccccaaccatgttttttgtgtgtcaattgtgccatttttattttattcctttccctactgtacacggagaaataaaggtgtagaaatacttggttctctagtcttagtaatcggaatggaggaaagcccactgccttgtggcttgttctttgctttctctgaggagaccttcctgcagatgtcactcctgctatcacaagagcgtgcacttgggatccagcaggagggcagcaggagacacagcagtatccagagactgctcagggcaatgtcctgtgatgcagttcaggttttcaggcactggcagagcagagttctcagatttggaccgcataactgagatagcacctgtgagtgtgtgtggagctccccatttcctgtgccgtcactttgggtggtgaatccatatgtagctctgcaggccaagcctgcctaccaggagatttggttagggccctgtgaaaagtctccgcacacacctacaccagtgctttgtaggaagt

SEQ ID NO: 24447 - DNA, 1192 bp, Mus musculus
gacaaatctattaccaagtgctcatatcttagaacatatcagagagttcatactggaaagagaccgtatagatgtacagaatgtgacaaattttttactaagcactcaaatcttagacaacatcagaaaattcatactggagagaaacctcccaagtgcaaagattgtgataaatcctttctccggatttctagtgttagaatacgtcagaaaattcatgctggagagagacgttatcgatgtaaggaatgtggcagatcttttacctggttctcaaatcttagagtccatcagcgagttcatactggagagagaccttacagatgtaaggaatgtggcaaatcttttactacgggctcaaatcttagagtccatcagaaaattcatactggagagaaaccttacaaatgcaaagactgtgacatatcctttctgtggatttcaaatcttagaacacatcaaaaaattcatactggtgagaaaccttacaaatgccaggaatgtaacaaatctttcacaaggtgctcatatcttagagaccatcagaaaattcatactggagagaaactttacaaatgcaaagactgtgacatatcatttatgtggatatcaagtcttagaagacatcagaaaattcatactggagagaaaccttacaaatgtagaggatgtgagaaatcctttactcagtgttcaactctaagagaccatcagaaaattcatactggagagaaaccttacaaatgcaaagactgtggcatatcctttttgtggatttcaagtcttagaagacatcagaaaattcacactggagagaaaccttacaaatgcaaagactgtgacatatcctttctgtggatttcgaatcttagaacacatcagaaaattcatactggagagaaaccttacaaatgtcaagaatgtaacaaatcttttactaggtgctcctatcttagagtccatcagagaactcattctggagagaaactttacaaatgcgaaaactgtgacgtatcctttatgtggatttcgaatctgagaagacatcagaaaattcatacaggaggaaaacattcccttgtaaataatgtgacataacatatatctggtattctctgcttgcaaatcaaatgagataagtgattgcaacataaagataacataactagatggttaaagcctttaatgagga

SEQ ID NO: 24448 - DNA, 1136 bp, Mus musculus
tcttccattcatattgctaatcatgtatttgtaccaatattaaatgactttcctttctataattttaatgtagttctttactaggatacttgatgcttttaagtttctgcttcaaaatttgggagcttattgcattttccttggttctaaatcttttcaagttattttcttcaatccataaaataatgccagtgtaaatttgacaagcattgcttagtatctctctgaagtattaaactccatcttcactgtcttcccattaactctctcctgttgttagtcttcattacagtactcaacagtttgcatcgctataattttaatgtattttgaaatctcctctaggtttgatccttctcttataattttttaagtctatggtttctcataagttagtgaattttagggttttttctaattctacaaaaataaatgtaagattttggtatagattgcttagcatatttataatacatagacctcctctacattgtctttctatgtttgaattagaatattctagcactgtgtcttttaatgtattctgttttccatctgctgatggtgtctgtgtttcagattcagggagaatttttaaaacattgatatttgttatttttttaattctggtatttctaggacacggccacactaacaaatatcttttgaagttagagaattctgcctgggtgtctcctactattatgtggctgatatttgtggatacctgctagacaattggttttctgtctgatttcattgtgcctcgaagactggtggatgctgaagcttccctgcatcgctgtctattttctccttacagttctacattgattgcttctcgtatttggatgcttttgtgaaatgcatttatatcgaatgcaatcctgtttgtcagtttgtgttcttttgtcataatatgtagttctgttcatgagtaagtccctatgtccccatatggatgtgtttttactttctcttactatacaagtttcattttacagatcatacatgaaggtctgattcattgtacactgggagagaatttgacccaggttcatatttctgtgtggataaatagttgtctcaacatcattagttaaaacagctacctcttatgcagcacataggtgttg

SEQ ID NO: 24449 - DNA, 1112 bp, Mus musculus
aatcttagaaaacatctaaagtttatagagaaatattatactattggaagcttttcattaaaacattatacttgttcaacctcaaaaaatttataatgaagacaatgtgttaatctaaagaatgttaccaaacctttagttattccctgaaataatattagagagaaatcatatatgtttgccattgtgctatattcatgcctcactgcacagtagaaattcctctctagagaccccaaagaaatatcattgaatttggcaaagcctgttcctactagacttctggaaattcttcctgaaggaaaacccaagaaagtgctttaataaaggcacccttggttttttggttttttgttttgttttgttttttgtttttgtttttgtttttgttttttgcttgtgtgtttgttttttcaccttcaaaatactcattctggagtaaaaacctgtcaatcacaagatggtgagaacttaacagtgatgatctgtgtgctcatgtacagttagaaaatcccccaagaatgtacaggaaaattatttttcagtactgaagaaagttgacgtatttagtagaactgcagagcatagtaacagtagaaatttcatgtacaaataataaaacacaaaggtttgtaggcattagagaagccagtgtactacattagcaaatggttatatataattggtatcaattgctgctccttcagagctgatgaacccaagtcaggagtcacgaaagttagtagggactgacaataaccatcaagggacctcaattgtctgcataatcttaatgccaatttcaagcactctatgtgtcagggctccttggtacacagattctgcacagatcaaagcccatttaatgatctttcagtagttttcttcattatcatttaaaaacaattcttagccaggtagcagttgcacaggcctttaatccaagcacttgggtcagggaggatagaggtgggtggatctccatggaagctagcctggtctacagagtaagttccaggacagccaaagctacacagaaagaccctgtctcaaagacaaacaacacacacacgcattcacaaagggagagagttcacaaagggagagagaga

SEQ ID NO: 24450 - DNA, 1095 bp, Mus musculus
ggatttgaactcaagacctctggaagagcagtcagcacttttaaccgctgagccatctctccagcccccggtgggaagtttttatgttgctactctgtggtgacaataagggtagcatattttctgaatgtagccacaggcagaggtcattaagtgatgtacaaaatgaaaatatcctgatttttctcttaaaagttctggcatagctttgaccatttttcttaaatggcatgttattgagcatgaatctcctgtgtatggaactttaaatattgtaaattcatgccagcattattattttttgagaaagtctatccctggcaaccgtgaaactcattatatagaccagactggccttgtactcagaaactccatatagttatgagaagtctaacacaatgcgcctgtaggtaacaatgagttctaggttgatctattttattatttatgggtagatgtgttttgccagcatttggctatgtataccatacttgtacctgcaaaggtcagaagagggctttagatccctgaaacaggagtacagactgttacaatccaaatttggttggtgggaatcaaactgtcatcctgcgcaacagccactgagcaaactctcacatcaatctcaaggattttgagcaacagtttcatgtaattcagtagtgcttagcattgaaatttatatagaaattaccctataaaaacattttgaaaaatgactttcgtttgggggttttatttatttttaaattttgagacagtatcaccatatatttcagatgtcttagaacttcctatgctggccttcagttcacagatatcctctgctttctgcctcgaaggtgctttgtgacacctgacactgaactttttttttttttttttttcgagacagggtttttctgtgtagccctggctgtcctgcaactcactttgtagaccaggctggcctcgaactcagaaatctgcctgcctctgcctctcgagtgctggaattaaaggcgtgagccaccacgtccggctacattgaactttttaagataaacattcttgccagatagtgatggcacaagcctttatttcttgcactcagga

SEQ ID NO: 24451 - DNA, 1282 bp, Mus musculus
agaaatacatacttcagaatagctaatgaaactgacagccttctgtgtaactcaaaataatttactcagacaaattatgcttcttaaaagaggatttgacaaactgagccataaagataggatgctctttatcctgtagatattcttatagttatgtattttgctcccagtgtccagtattcataatctgtatcatatgctggttttaagtttcaggatggcaattgtctttgagtcccttgggctctcatttactctttcctcttagtcatgtatgtaactccaataaagctcattggttcaacaactcgaacttggttgtgctcaatttccacttggcatgggtagatgaatatatatgttgcatcaccccaaaaaatgtctcccacaaaaaaaaaacacatgttgaacccattaatattttctgcaaacttgtaacataaaatgagtattagaacaatgtttttcagcgcatgggtagaaatatcattgagggtggaatgaaactctcacagggacaggggttgtttaaaaccataagaaaacacatattttcagtggtcttagaactgaaacaccactttttttttgtctcctcatgagtctgcctgcataaaactgctttgaattatataaaagttatgtagagctcttccagccagcaccttctgccaggcaggtctgcagcttgtctgctcccctgaggacatcacagcctgaaggcataccaggagttctgctgaacacagggcaactggtaagggaccctctcagaggcccaaagcctcggggagcccagtggacttgggacccataacccccataaaccccttgcccacagaattccactcaccttccgcctgggcagatcaccagcttgtctgctcccctgaagacaccagagcctgaagtcattctgggactttcactgctggcagggcaactggatagagaccctcccgaaggcctacagccactgggagcccagtgccatcattgcccaggtaagatttatattttcaattgagacaatttcttgagcaataatatgttcagaattagtgaagaggatcttggttccgggactcagcagaacttaggaaattagtatgaacaggttagagggtgcgccagagaaccggacagcttctgggacgggcagaagcacagagccgctgaggcagcacccttggcgggcagcagacagctggccaccatccggaccagaggacaggtatccgcctggcttgggaggcagcctcagcctcagcagcagcggtcg

SEQ ID NO: 24452 - DNA, 1193 bp, Mus musculus
agattattattaaaagtgtaaatttactcattacacttgatcatgtctagagtgccaccaatgctcctaaggctgtcaccactgcccattacaatgctgctgactttatttaaaaaaaaaatacattaaaaagaatacaaattggtcgccagagaccagcagaacgatggggctatggccggcctcaactcactggaggcagtgaagcacaagatccaggccctgcagcagcaggcagacgatgcagagaatagtgcgcagggcctgcattgcggaactggaaggcgagcacgagcggcgggagaaatctgaaggagatgcagccgctctcaaccgctgcatccaactgctggaggaggaactggacctggctcaggagcagctggccatagccctgcagaatctggaagaggcagagaaggctgctgatgagagtgagagaggcgtgaaggtaatagagaaccgagccatgaaagatgaggaaaagatggagatcctggagatgcagctcaaagaagccaagcacatcactgaggaggccgaccgcaagtacgaggaggtcgctcataagttggtcatcctggagggtgagctgaagagagcagaggagcgggcggaggtatctgaactaaagtgtggtgacctggaagaagagctcaagtatgtaactaacaatctgaaatcactggaggctgcttctgaaaagtattctgaaaaggaggataaatatgaagaagaaatcaagcttctgtctgacaagctgaaggaggctgagacccgagctgagtttgcagaaaggacagtttctaaactggagaagacaatcgatgacctggaagaaaaacttgcccaggccaaagaagagaatgtgggcttacatcagacactggaccagacactaaacgaacttaactgtatataaactaaaccagaaaagtctgttttaacaccaactccactccagggagtgtgccctgtcttcctcttttgtaagaagttctgcttattaccaggtctccaccttgcaggaaatgccaagcagataattaattcatgaccaaatattttgttagacaagctttgaacaccaattatgtttaattctttccttttccattcaaatggtaccagctcctctgattattcttattcttaaattgcatttattcctaaaataggcagggaattttaca

SEQ ID NO: 24453 - DNA, 1193 bp, Mus musculus
cactacagtgatgagctgcagtctgtcatctcacatctccttcgagtcagagctagagtagcagatcgactctatggtgtatataaagtacatgggaattatgggagagtttttagtgaatggtgtgccatcgaaaaagaaatgggggatgggctgcagagtgctgggcatcacatggacgtgtatgcatcttctattgatgatattttggaagatgaagagcactatgcagatcagctgaaggactatatgttttatgcagaagcacttcgggctgtgtgcaggaagcatgagcttatgaagtatgacctggagacagctgctcaagacctgactgccaagaagcagcagtgcgaggagctggccactgggactatgagaacattctcgttgaagggaatgactaccaaactctttggtcaagaaactccagagcaaagagaaaccaggataaaggttctagaggagcagataaatgaaggggaagagcagctgaagtctaaaaatctgggaggcagagaatttgtgaaaaatgcatgggctgatattgaacgcttcaaagaacaaaagaaccgggacctaaaggaagccctcatcagctatgatgtcatgcagatcagcatgtgcaaaaagagaattcaggtttggaccaatgctaaagaatgcttcagcaacatgtaatcccatgaagtgactttctctgcaatcaaagtgccccaaaccaagcacaagtaaaaaaatctatttctaccttatacataaaagcatacagtacattgaacaaatccgctttctttaagcatagttgtgttcatatagcacaaaatgatacattttaatgaagaatatatattataatttgaagttttggggactggtgctgattccaaaaaaaagttaatttaataagataaccaacagattgttagtcaggctcctgaaccagtgcctctgtcaggatgtgagttaatctccatgtgtgcatctcagtgccccctgtccagatctctttacaggcagttcttcccaagaccagatgccaagatttacattgtaggacccacttctgctgcacagttattttatcttgccttagagttgagctgtttggattgacaaagctcagcagaaacttgttgtgacgtctaaggttttcttctgtgttcctagatactgtaccatctgccacacta

SEQ ID NO: 24454 - DNA, 1174 bp, Mus musculus
ctctctctctctctccctccctccctccctccctcccttccttccttacttcctttcttgttttgttttttttgttttttgtttttcgtatttttggagacaggatttctctgtatagccatggctgtcctgtaacttactctgtagaccaggctggcttggatcacagaaatctgtctgctactgcctctcaagtgctgggattaaaggcgtgtgctgccactgcctggcactcttttaaaagtttcgagtagctgagcattgctttgtcagtacctaatctctgcagagagacatgtctgtcatgttgaactatatgattgtattatctttcagtcaattttattaatttctatataaccctcgaaatatgtctttaaattctacttgcatttttacattttaaaaaaggtttatttattttatctttatgaccactctctcttcgtgtacacgtgcacacgtgcctgccagaagagggcatcagattacattgtgcatggttatgatctaccatgtagatacaggagtgatgtgagcacactagatatggtgctgtgagcagtggagacagctcaggtgatgtagtgatacaaaccatgtaaagcaagcaaatcaatagtacccctccatggtctatgtgtcatctcctgattccaagatcctgcagagcattttcagtatttatacactatagcacagttggagaatcatttgtagaatcctcttttgtttttcttttttaaaaaattggttattttattaatttacatttcaaatgttgtcccccttcctggtttcccctctctaaacccactatcccatctccctccctctgttttctttttctttttttcccacattttttattagatagtttcttcatttacatttcaaatgctatctgaaaagtcccctataccctcccactcccctatgccctgctcccctccccactcactcccacttcttggccctggtgttcccctgtatggagcatatagtgtttgctagactaaggggcctctcttcccaatgatggccgactaggccatcttctgctacatatgcagctagagtcacaagctttgggggtacaggttagttcatattgttgttctacctataggtttgcagaccccttcagccccttgggtactttctctagctcctc

SEQ ID NO: 24455 - DNA, 1177 bp, Mus musculus
ctcaaatgaagaaactcagaaaaatcatatttgttaaaagagggtttgataaactgagccaccaaaatggaatgctcttcatgccagtattcctacagatacagtttgccctcagtgtattcaaaatctgtatcatgctggtttcaagtttcaggatagcaagtgtctttgagtcccttgggctctgatcaccaactccttccccatagtcctgtatataactgtaataaatattgattgaacaagttggacttggttgttttcagtttcaacttgggattggtggatggatatgtgtgttgcatctctgtagaaaatgtctctcatacaacgtgttgaacccattactattttctccataattgtaacataaaattaatactagaccaatatttttcaacctatcgatagcaactcctttgtgggtattatgaacttgtaacaggttacacaagaccttaggaaaacatgtatttcctataatcttagtggaacatcatttctttgtctctaggtgaatccacctgcattagtatactttggattttatgatagtgctgtagtattagaaatgttagaaacactgtattagaccacaattgtgttaactaaaataaggaatactgtgctcaaatctcctgctttactgccataacagtaattttaaattaaaatgcctccacacagaattgtagaagctttaggggtctgagaggtaaggctgtttcctcttgaattcaagaagattgagaaaaagttctaccaagaacaaatgaaactatggcttcaaggttgtcagtgacagtcaaaatcatctggattgtgtcactatgtgactcttaactcaataccacgtgattcagctcaactctaataatcctcagtacaatgctacccatgggaaaatattagagaccattgtggtagccggtcctggtgtagcttaacacaatatatataccacaagaaattcatcagatttaaattatttttgtcaaataatttacagattgataatatatacatctgagaacatttaatactgaaacaagattcaataattggcatgcagatgaaattgagaaatccttggaaagttgggttttgagtaatattaatttattttttatttatttgaaacacagccttagaacctgaatttatgcaactttctgtt

SEQ ID NO: 24456 - DNA, 1132 bp, Mus musculus
ctggccttacagctagtagaaaaagctattgaagagcagtttgtcacttatatagattattccttgccgctgcacctgttaatttttaataggactcatgtgcctacaggactgctatagcaaaaaatttcctataatatagatacactcaaggatttctcctaaatgtaatatcttaccatatcacaaagcagtgggtcaaatgattatcactggaagaaggcagacattaacttatttcggcaaagagccagatatcattgttcagccttttaagagaactatagacagctatatcccccaaggtcaccaaaggctcatcttccctttaccttatttgttctaaatattttgcaaactgatattaaaggtcagtctgcagtggatcgccactggcatctagttacttctaattcttatgcattgttaaaatggaaggacccactgactagcgaatagaagggtccagatccagttctaatttgaggtaggggctaggtttatgttttttcatgagatgaagatggagcgcggtggctgccagagagatcaattcgtcagataaacacagattctgactcttctcgtaagtatcattataaagactaaaattcctcttgtgcttagaattcagctgggaacgaaagctcccagaaaagctgttttcctgctactatctgggcctgctacccaacaggaggctagagattaacctcagctttactatttacatttaaataaagtacctggacttcccccccaaaatatctgctttcctactttctcacggtcgagattttgtttttcaagcaggttaatcaacattctccagctagatcagcgatgtgcatccctgcccccctagagcacacaggtggcagctgttatcttcagtcccaggacattccagcacgtggctttcagactgagttaaaaattaggtttaccaagagggctagaaaagtagatatttctaatattaatagagattggtttttattctgatagatgggtttagtcccttagctggcctatggcttttcacccttgctgttactgcaaggtgtccttagttcctcaggctgtgggaagtacagggatgaggaggaacgactttcagctcctattttag

SEQ ID NO: 24457 - DNA, 2142 bp, Mus musculus
tcaggaccccagaggcagcttgacttccaggagctatgacaaacccaggatcacagaatcacaggatcagagacagctggactctgaggagttttgacacaacccggatcgctggagggataggcttcagtaagagatagcaagggcatgtagcacaagagataaccagatggctagaggttcaagaacataagcaacagaaaccaagtctatatggcatcaccagaacccagttctcccaccatagcaagtcctggatgccctaccacacaggaaaagcaagattcagatttaaaatcacatctcatgatgatgatagaggtctttaagatggacataaatagctcccttaaatatagggaacaagccagtaagtggcactcttgttccttcaggctcctgctctctttaagtttgggccctcactgcttttgataatgatctgtgacatggaagtgtaaatgaaataaactcattcctcctaagttgcagcaataccaaccctaatgaaaacaaattagtaccaggattgtgagatattgtggtgatagatttcaccatgttttggggaggagtatagaagaactttggacagttgtatgaagaacctatggtgtctggttagctggagctgaggaatcaggtatggtcagtaggaaaccagaaccactaaagtgaaagcgttgctttgctggaacaattgatgctgagtagctggagctgcaaatttagctgtgattgaagtgtaagaggtcaacatcaagggggtaaacacttctaggaagtattttctcaacatcagtacatgcaatttgtattcagaggtagccaaggttgtatctcaagctgccagccaaacatggtactgtaagagtcacccatgtggttttgaagacataaaaggattgtgcagagcatctaaggctgagcactgagaagccagcagaggccattggtgaaagtgcatcaagagtaccaatggattgaaggggtcctggagaaaatgtgagagtttgccacatgaaaagagcctatgagaggatactggtgtgagcacaaaccagttgcagtagaagaccccaaaattttggagatgtaccatagaatgactaccaagtacagcagtagctgtagagtggagccccccaaattgtaagagacaagctttgtgtgctgtagaaggcagaacaggataagtgacccaagccacttggaggaaacaaaaaaatccctgtggacctgggtaaaatcttgtgaaacttccagggagtaaagcctgcctagcagaaataggccccttggagtgttcctttaagaagcataataattcaaaccagtattttcactcaaatatacttttacaccttatcttcaataatggactcagttgatggcttcgcatagacctccaatatcggtactttggatttgtcaggaacagtagaatcaaacagccttggtgaagaccctagatgaaaacaatgttgaaaggtgggaagaacatcttcagagaaaaataaagtagcatgtaggggtggaaggaccacactgaataagagcagatagagtaagaactcttctgatgttccattttttgtatgaaatactctcaggatcttccccatttagcattatgttggctattggtttgtcatatatagtttatattgttctgagatatgttctttctataactcattacttaagtgattttattatgatcatgttgaactttgtcaaatgccttttacatctattaaatgatcatataatttctgtccttgagtttgcttactgaatattatatttttaaattgcatgtattcagctatccttagaagaaaaccaacctggttgtaataattgtaagggttcaggaattcagtttatagagggtccttttagtttttaatacatgtgtttattaggtatgtaaaaggccaaaagtaaaagaacaaattgcaagttactggcagattcagttccagtacaagggccattttctgatctgattcgaacatggtactttatgttcttatatatggagaaggaaaggcattgtgctctgaaacttcttctatgcagtttcttactacattcatgaaggttttgccctattaacagttatttcctaagttctac

SEQ ID NO: 24458 - DNA, 1150 bp, Mus musculus
aagggatgaacttaaggagctgcaggggataggaactataaaggaagaacaatagtatcaaataacctggtcccctcagcgcttctagaaactaagccaccacccaaagtgcatgcatgagctgtcccatggccccttctacatatgtagcagaggactgcagtgtctagtctcagtgggagagaatacatttcatcctgtaaagacttgatgccccagggaaggtggacgctggcaggcggtgggagattggggggattgccctttcagaagcaaaggggagggggctggtgaggaactcatggagggaggaccaggaaggggtgcaacatttggaatgtgtataaaatatatttataaaatgttttttattgtgttaatatgaaaggctatgtggacttttgaggttccactgaatgcattattcatttgacttgcatataggcctatgtgtctcagggtgttgaatgtaatagtttaaaggataaagacctctatgtgcaaatatttgagtatttggtccccagtaagaggaactatttaaggattaggaacagtgtgttttaaattttcagccagatgcccgccaccatgcatcccactcataaactaagccttgaagctataagcaagcccctgatttagtgtttctttttgtatgagaggttttattcatggtgtctcttcatagcaacaaaatagttgcttttaataagtagcctttgttgacttcagttctgaaaacctccctcctattctgcctaccaagtgctgaattttatattgaaccaatccacacctagcttctaaaatattttgtttgttcattttgttttttagttgtttgtatgcatttattcagggtaactcaattttgtttgtccagcacacataaaatttaagttccttccactctaaaaggaacgtactctgcatttgtattatggaaataaatcgtctttgtatgtgtcccttattaactgagagtggatttgtaagacaacgggcagcaagcagcaatggctgtctgtgtaagttactctcattctagaatcttgctcattgacaatcaaaactgaaagataactcttacagctgtaggagcaattctcaatatatgggggtcaagcagtgctttcacagagaccat

SEQ ID NO: 24459 - DNA, 1172 bp, Mus musculus
ctcaaagtatagtgcccctgagcatgtgaatattcaagagaagtctaataaatggaaggaatgtggcaaaatgattcatgaatcctccaaaagtacaccttatcaaaccaacaacagagatgcctccattgaatcatcaaacagacacaaaactgagaatgccagggaaccatgcaagtataaggactgtgtgaatggcttaaatttgtatcccatcacttgtcacaatcaaacagtgtacctagaaataaaagaacataccaaaacactgtatgatgaagcttttctctctaaatataaactcatgctaaaaggaaacaatagtggaatgaaatcacacaagtgcaggaagtctggaaaattcttcacgatgacctcaagcctgagtgggcatccgagagatcatgctagagagaagccctatcaatgtacaaagtgtagtaaatcctttctgcatttgtcacacctccaactgcattacaaaatccattttggaggatatccctacaaatgtacagaatgcggtaagtgcttttatcatgcatcaggctttgaaagacattgcagaatccatgctacaaagaatacttacaaatgtagtttttgtagcaaatcctttatctgctgctcaggtcttagaaaacatcagaaaattcatgaagaaaacaggctttttgaatgtaaccaagatactagatcattctgtacattttcctaccgtgaatgccattaccgtgctgatataagaaagaaatgttacagatgtaaagaatgtggcaaatccctttctacatcctcaggacttaaaatacatcagagaattcatactggagagagaccttacaaatgtggtgactgtgacaaatcttttacccagaagagcaatcttagaatgcatcagaaaattcatacaggagagaatacttacaaatgcagtgaatgtgacaaatgctttacccagagatgccttcttagaactcatcagagaattcattcaggagaaaaaccttacaaatgtagtgaatgtggcaaggcctttgctggtggctcatatcttagaagtcatcagagaattcattcagaaaagaagccttacaaatgcagtgactgtgacaaatccttccaccggaaagaccaccttagaattcatcagagaattcatacaggagaga

SEQ ID NO: 24460 - DNA, 1174 bp, Mus musculus
ttgcctctaagtcatttctccaggctgtagttttacattccaatgcacatttgtcacagaggtactatataactttgtgtggtctagtttttgaaaagcaaaggaagaattatagttaatatttatctatgtaactgacaattatgttagacaaatgagctcaaatactgaaggaaagaaaataaagttgaattggaagtgtcttagtcagggtttctattcctgcacaaacatcatgaccaagaagcagttggagaggaaagggtttattcggcttacacttccatactgctgttcgtcaccaaaggaagtcaggactggaactcaagcagatcaggaagcaggagctgatgcagaggccatggagggatgttccttactggtttgcgtcctctgccttgctcagcctgctctcttatagaaccaagactaccagcccagggatggtcccacccacaaggggacctccccccttgatcactaattgagaaaatgccttacagttggatctcatggaggcatttcctcaactgaagctcctttctctgtgataactccagctgtgtcaagttgacacaaaaccagccagtacaggaagattcaaatttcaattcagtcaatctcatgagcaaaaaaaaaatgtattaaaaattcatacaagattctcagtttaaaacttaatttgatcaaaaatagcttatctacatctattgtcacatataccatttatttacagataatagctaataattctgtagtgaaagatcatggaacttatgaaattgttaatatctgtattttttatgtcatcgtttagaaaaatgtgaatgatttcactgttgtctagtgctgatttttctatttatgttgtagttgtgatatattcccagaaaataaattcgtaaagtagttgactgaatgtgttgtttggaatattggatatgtatcctgatgttacattctctactgcttaaaaagaaaactctgacttaattcaccaaacattctgcattccatattcagtctttttttgttcttgaaaggttgtagcattgtgcctaggcctcaagatgtcaacagagcattttagaatagagtcaggtgagatccagctgcaaacagtattgttctagtgtccatatttgaccaaaattgacactggtagaatttggaa

SEQ ID NO: 24461 - DNA, 1215 bp, Mus musculus
tacaactcccagcattttaggaagttatttggttcttgggtaggtagtgcttacatgttaattttgggcttcacagtatgagagaacagaggtatctggaagggtccaaacttaacctggccgtgacttggggggttgaaagggggagttagggaataggaggctcccaagagaggaaacaggtgccaaggaaacagttatccaaagatgtccactatgatatattaataggcacctcagttagccatttttcctaagctcctttgatatctaacaaggccagaccagcatgcatgctgtggaagggcaatgtcaagccaccttattgttatagatagaaaactcactctaaattaaataaaattagaaagccctttttgaataattatgattgctcacttacatcagaaacgtgtctccttagttcaagaaaagcacatgtggccaaactgttcattatttcatggtctgttgatattgaattctgtgactatggacttcttacctagaccctgcagtcagggctttttttcagagacctccttttggaaaagtgcatcagtttggattctgtgagtcacagtagttttcttggagtcttccttggggttcctgggaaaaggactcttcggcatatgtgtgaactgtgtgtgaatgagtctcacacctcatagaacagagtaaaatcctcagagaaaagagacattttttcatgttattttctctttccttcatgtttatcctcttgggaggtgtcagcatctttcatttttgtggcatgaaaagttccaggtgctttctgaagactctcttctccacatgcaggtccccactgctcagccagatctgctcaccagtgaatcaactaagaaccctggatggtgaagagagaggagactatagtaaagaatccaggtatgttagaggaactgaacaaggggtgaggtgggccttaagtgacaataaaaagagaatgtgacattggtttttccagattctatttcattaagcattcaggaaattttcattgagaataatattagatgttttaaaatggatttttccttataggttgtacagtgaacagtttttttcagtatttaattagctatggatctctgaattaactgttgcccattaacaagtttctctgacatagactgaaagcagcaccaagctatctatgtgaccaagctatttgaacatgtagcaaat

SEQ ID NO: 24462 - DNA, 1132 bp, Mus musculus
taattaaaaaatgttaaatctttattaaaagatacaaaaagatgttttatttagctgggtggtggtggcacatgccatttatcccaagacttgggaggtaaaagcaaatggatctttgagttcaaggccagccttatctatagagagttttctaggacagccagggttccacagagaggaaccctgtctggaaaagaaaatgttttatttagacaggatctcaagtatctgtagttggcctcgctgtggagttaaagatgaccttgaacgactggtcatcctgcctctgtcccacaaatgcaagaattacaggtgtgcgctaccacgcctggctgaatggttacttcccaagtagagaccagaaagacagactgctacccctagtttgtctgtgctgacaaccgtcactcagacagcaatggaatccctttctgaggctgagggggcgctctcctgtaaaatgggcttccctcccggggctgcttgcaaagacttgttaaatccacggaaacttagcatactgacactcttgcacaatgggtcttgttggctgtgacttaagctccttgggctgtgttcttggtgtatttgaatgtatagtgacaggcagggacagattacatgaaagacccccgaggggggaccctcactcaagtctcgggatagatgcggacccccaagaacacacaagagaccaagcttgatgcaaatcacacgagactttatttggggaaagccagagctctggggacgactcgtatcctatgcaggggtagaggagtcgacccagaagtgaaatggggccctccttttataggccctcaagggggaaaaagggagggggaaggtaggggattccaaatcacatgtctttaagcaaacaactcaatctaatgtgatttcacaagaaatagatatgagaggggtacaaggctggagtcatgtgcaggtgcaggggtgatgtaagtctattgctattggctgatatgtgggggaactcaggattggtcctacctgcagttgctggggaaattttcctattttagcccaacaaccaagtcacttggcagagggctacagcggttagcaaatacacgagttcaaagaatcagtcagaacactggcaaacatt

SEQ ID NO: 24463 - DNA, 1457 bp, Mus musculus
gtaaggcaaaagaaccaagtttaggatggagagatggctcagtggttaagggtactggctgctcttccagaggttcagagttcaattcccggcaaccacttggtggctcacaaccatctgtaatgggatccaatgccctctttaatgtgtctgaagacagagctacagtctcatatacataaactaaatacatccttaaaaaaaaaagaacaagatagcaaagcactctgaagagaggttaagtaggctccccaaggtgggggagaggcctaacggaagactgactaccccaaggtgtgtgggtgggtgggtggggggaggcctaacggaccgcttccaatgaggggttttatgaatatgaggtaggtggaatatttattgggcaatgcgcccttattttcatctcaaactatggtggaccagatctttcattgttaggtccacaaaagggaaggaatgaaaaagcattaggaacttttgtgacatatatgatatttcaatattatatatatatcaaaatataatattgaaatatgtattcagcatatattgaatggtcaatattatatatattgaaggtatgtaggctgaatgtccttgtggtttagtttcttgtattgtggagacaatgtaactgcagcttcaaggaagcacaggtgccaggggtactctgacaaccaggggacagccaccaagatgcagctgtcctcacctctctagttccttggctactggatggtctctgctggaacctcaaggatttctgagaagccattttacccaccactgagtctgttacggagttaggagagtgtgcgaaaggtgtgtgagtccctcagccctcatcggttcggatcagagccttagactgagaccatagttactggcttttctgtagagctgcatgcttctgagtccgtcagcttttctgtttcatatccaattacaaactctattatttttcgccttcagtgttttgttgaagaccaggatggtctcatacagagataatctggcctctgcctctggagtgctgggattaaaggtctgtgccaccacaatgggatctaaagtgttctttatcttcacaacttcatcaaattaattcactttaactcacacatttgctttttaccataatgtgggggaggggtggggagctgggaactaagcctgactcaggaagagaacgaaacgggattggagtggctggagaagtgctctctagacttgcagaggattctgttttgtttcccagcatcggaatggccataactccagtcccaggggatctgatgcccttttctgacctctgtaggtgtgtggtacatttgcaagcgaaacactcatgtacataaagagtcaatcgttttaaaagggtggtcagagaaagcctttatttcttgtgagcgtgatggatctggggcagctggaataagatgtcagtcactgtgcac

SEQ ID NO: 24464 - DNA, 1145 bp, Mus musculus
ctacaaagtttcctgagaggtgggattgctgggggtgggggtggggtaccccaggcaagccataaaatggtcatcatatatatggttatttgatatatagagtccccctgcatatatcttatgggacgggaagatgcagccccttgcccagccactcactgggtcagacagggacattagggaggggaaaagatcccttaccatgtcacatctccatcccttatactttctacccttgcaggcccatggttttggcgcctccaaccctcaggacagctggtatcaccccgccctgctgggttgcaccgcttttgggaggggctgccaacccatgtgaaagtcatccaggctgcctatgcccgacccctagatggccgaatcatcctcttcagcggtgggtaagggtcatgggtactggatagggcaggtctagggagctctccctgcccccttaccaacatgccttcttccaggcccgcagttctgggtgttccaggaacgacagcttgagggtgcagcgcggccactggtagagtttgggctgcccccaggagaagacgtggatgctgtgttctcatggcctcacaatggcaagacatacctgatccgaggtcaaaagtactggcggtatgacgaggtggccgcccgcccagaccctggctacccacgtgccttgagtctctgggatggggcgccctttgccccagacgatgtcaccatcagcaacacaggtgtggagagtcatttgcaaattgtgatccctgggagagaaaagatggagacgaggggagggcagatggggtggggtggggtgggcatcctgggagttggaatgaaaaaaggaacattggctttggggcaagtctagaccaagactctgaggcgtctcctcccctacaggtgacacttactttttcaagggcacccatttctggcgctttgcggagggcagtgtcaaagctgagtcagattccccccagcccattgggcccaagtggctggactgccctgcccccaactctgaccctcgagtcaccagtcccccgaaaacgacatccaaaacccgaagctgtgattgtcactgcgagctcaatcaagcctcagagcagctgtcgcccctcctgctgcctctcctacccctagtg

SEQ ID NO: 24465 - DNA, 1181 bp, Mus musculus
ttcctcttagcactggaccctggtcatagcacataggtctaccccacctcctctgttgctgggtctctgatgcaccgttgtgcagtggacatgcatgtgtccagttagttatcattgcacgcagaggtctaaggctgacatggattcccctacgttgtgaaatcaggacagcattctttgattgccccatcccctgcccccacatcctgcttctgggcaacacctcccttccaggtgcgctctaaggaagatgggcgactctatgctgttaagcgctacatgtcgccattccgcggccccaaagaccgaactcgtaaactggctgaggtaggtggccatgagaaagtggggcagcatccacactgcgtgagactggagcgggcctgggaggagggtggcatcctatacctgcagacagaactctgcgggcccagcctgcagcaacactgtgaagcctggggggccagcctgccagaggcccaggtctggggctacttgcgggacattcttctggctctggaccatctacatagtcaaggcctagttcaccttgatgtcaagcctgccaacatcttcttgggcccccggggccgctgcaagctgggcgactttggactactggtggagctgggttcagccggtgctggcgaggcccaggagggagatcctcgctacatggccccagaactgctgcagggctcttatgggacagcagcagatgtgttcaggtgaggcctgggtgaggactgtaagagccctttgttggtggctgatcagcagacagaaagggactgcctgatagaggagctccttcctggcacagggtaggagggcaatccagcctgggaggtgctgtcactccctgctagctgaaaggtttccagagtaagcagcaagcctgccagaggccctttatactgtaggctagccgtctccttgcagcttcatggctgtgctccaggacagggagagtaatgaggtggagggacttgttaagtccacagttaacatctgggactacagccagacccagggttttgagaccatactggctactactaccctgcctcagtgtattctgttcatctctacagaatgatgatgccaaccctagtaaccatggaaccatttgcatgtcagtgtggttctgatgggctagctgcttgagtgtggagtccata

SEQ ID NO: 24466 - DNA, 1207 bp, Mus musculus
aatcagagccagttaatgacgaagatgaaaagtggggagttgcctgcccaggaggtgcccagcgtctcaagaggcaaacctggcctttgcttgggataccactttcatctgtggctctcacttggggtaccgcttccatttgtggctcacttggggcactgcttccatttgtggctcactataactcattctcatgagctcagaagaactcaagctgagaggtagtacatggcccactcttcaagccttccccagggctggggatagctcctcagcaggtcccctccaagtcttgatctaggccaagcaaacaccattgcccatgagttaccaaccaaatccacaatgtccccagcacttggcaggcggtatgtggtttgtggcagcgcagactattactgacacacagcagctctgtaccatgagactacacagggtttattgagggaatcagatgagcagaagacagcggcaggcaccaggccattactatcccacaggggtggctgttccacggcttgtttgctaagggagaggagcatgcagctctatgacatgatgaggacagctctggccagggtgcagcacgcaggaaattctgccgttcctggggacattagagtgccactgctggcatggctcctgagtcctgctaaactcttctacaggaggtggctttgatgccatctaactgacctggtgcatcatgcgacaccaggtgagcaaccctcagtggtgccgctgccactagagcatgcctacatggtgtcacctcctcctgacatctgggctggctcccaagaactgtggacacaggtttaagttgggaaagaacgcagggtgccaagtctgccagggaggtagagcgaagcctttagcctgttccgctctgccacagtcagagctgggtgagccttagcaagcagcaagagactaaagagcaggcaggcctcacacctgcccctaaaagatgccacaaagcaaaacaaaccctgctgtgacttgcactgtcttcagagggtggcaagaagttcctgcacatatcctggcttggggtgactgcattttgctgaacttcatggagcgcacacgggatcacgcccactggaaagctctgagcaaggcagtgtgctctgaaagcagatggtgctgaggcctggagagcagagcagggcagaggtatatcatccagacacagttctccaca

SEQ ID NO: 24467 - DNA, 1158 bp, Mus musculus
tgtggccaaacagtaaagggatagtgtgaagagatttgagagaacccagattcttgttttcttagagaatggaaatataagtaaaaagaagaatggcttagaatttgaaagtacattgtgaggacttgtaagtagatgctgagtgaaaaggatgaagtgtggggaggatgaaaggagggatttgtttgtagactagtggaatgaggaaacattttgttaatggagattcagtgtgagactaagtgttgtactaagggctaagtaagagagccagggatgtgggagatgtggtaagtagttagattggagccaggagcctgactggtatctacccgcgccccctcaggagcggtggtgccccctgggcacagggccatgtacaacgggatcgggctgccgacgccccggggcagcggcaccaacggctacgttcagcgaaacctgtccctggtgcggggccgccgtggtgagcggcctgactacaagggagaggaggaactgcggcacctggaggctgccctggtgaagcgacctaatcctgacatcctggaccacgagcgcaagcggcgcgtggagctgcgatgcctcgagctggaggaaatgatggaagagcaggggtgagggaatgggtggggagattccaagcactgagtgcttagtttgggtgttaggtgggatgtgtggaaagaaactagagctggtggaaagagtcttagagaagttgtaagggaggaagaaaatgagcttgaagaattgagaagaggcatgggtcagtgcatagtgggatgtcaaggaaactttctggagaattaatagcagtgtaagggggtttgaattacttagctgaatttatgaaggggaaggggaacatgaatgaacaaaagcatgctgtgtgggaaaggagcataaggtagaagagccaggtaacctgataggtgttgttattggtaggaggagaaaggtaggtggattgaaggattgtggctgtggaagtggcaaaggcagaagatcggattgaaagagaatttgaatagaggatatcatgagttgtcagagaagtgatattttggaaaaggagcacattcaggcagaaaactgtttagagcagtggttttcaaactttgagcagtggtatccttttatacattttgtcttcct

SEQ ID NO: 24468 - DNA, 1170 bp, Mus musculus
gaatggagggagagggaatgatgggttaatcaatttaatatttattgagcgcccacggtgtgctaggcgctgcacagaccattccgaagacacggtccctgccctctaggagctgacaggctaaagcaacaggatggacagacatatacatttccccttgtctttttttattttattttatttttattttttgtttgttacgatgtatatggactgccagaatagggcgggggtggtttgctggtttggtggtgtctgagggagaaaggagtccttaccctggcttccttaatcggggaaggcttcctgaaggaggtgggctcagaggtgagttgtgaatgaagtgggtagggaagggcctgggtggaaggtttgggtatattggagggtggtgaataatggggtagagggacttttattatttgggattatattgggaagagagagaacaacaaaaaaggacttgtattttcatttttgaaaatgaattgagtcatgtgactaagaacgtttgtttattgttttgttggtttttttttttttggtttggttctttttttttggaaaaaaaaggttgtacatacaggaaagtggattgctaactgggggtggagggggttttctattcttctttgagctgattttcctggtctcccctgccctccattaactcacaggtctcgaagtgctgctgctaaaattcatacaacagccttgactgggcaaagtcctccccttgcttcagggcatcaaggggagggagatgcaccttctgttgaaccaggtgccaccaacatacaacaacctagtagcccagctccctctacaaagcaatctagcagtccttatgaagacaaagataagaaagaggtatgttctgagttggtagtgttcattgggttgcagggatttatttactcagggatgtgccttaaatgggcaagtgtggtacataatgtagtttattagacaaaaatcttgtcctttagattatggtcaggttcagagatcaaggttgacaagcagctatagaaagcagttacatgtgtgggggtgtatgtgagtggattgggtggtagtttcagagaaaccaatagtgtaagcaaatatgaagatttttagacagtattcaaagaagatacagaatgagagaaagagttctcttcagtt

SEQ ID NO: 24469 - DNA, 1286 bp, Mus musculus
gaactaatggaagtagaaaagtctgagcaacctttaagccaagttctacccagtttatctccagaacataaagaaatgcctggaagtaacattgagtcatctcctgaagtagaagaaaggcctgctgtattgtctgctcttgaccaaagccagtcacagccttcaaaagcagcagaaacccctgcagtggcttcatgttggagtgggccacaagtttctccagagcataaagaactatctcattctcccccaagggagaatagctttgagtcatctttagagtttaaaaactcaggccctgtttcagaagtaaatactggcttttctcctgaggttaaagaagaattgaatggatcattccttaatcaaacagaggcagatccatctgtggacatgaaagaacagtcaaggtcttccaggcgaagcagttctgagttatccccagaagtagtggaaaaggtaggattattttcaagtcagaaagtatcttcgcctgtacttgagactgtacaacaaagaacaccttcaagagaaagaagtagttctgcatctcctgaactgaaagatggtttgcctagaacgccatctaggagaagccggtctgggtcttctccaggacttagagatgggtctgggactccttctaggcatagcctatctgggtcctctcctgggatgaaagatacacctcaaaccccctccaggggacgaagtgaatgtgactcttctccagaaccaaaagcattgcctcagactcctagagcccgaagtcattctccatcatccccagagcgcaacaacaagagtgtcacccctcagagagaaagaagtgggtcagaatcatcagtagaacagaaaaatctggctaggacctctccgggacaaagaagtcgatctgggtcttcccaagagcttgatggaaagcccagcgcgtccccacaggaaagaagtgagtcagactcttctccagattccaaacccaagactcggactcctctcagacagaggagtcactctggatcatctccagaggttgacagcaaatctcgacactcacccaggctcagtaggtctggctcatctccggaaatgaaagataagccaagagtgctacagagggctcagagtggtactgattcttctcctgaacacaagatacctgctcctcgggccctgcccaggcatagtagatcaggttcatcaagcaaagagagaggtccttcccctgaaggaagcagtagttctgagtcttctccagaacacgcccccaaatccagaactgctcg

SEQ ID NO: 24470 - DNA, 2537 bp, Mus musculus
gagccaactgaaaagtcaaggtcttcacggaggaggcgctcagtttcttctccccgtaccaagacaacttcgaggagaggacggtctccttcacccaaacctcgtggactccaaagatcccgatcccgctcacggagagagaaaaccagaacaacccgacgcagagatagatctggatcatctcagtcaacatctcgaagaagacagaggagccggtctagatcacgagttactcggagacggaggggtggctctggttaccattcaagatcacctaccagacaggagagttctcgaacctcctctagacgcagaagaggccgctcccggacacccttgaccagtcggaagcgatctcgatcaagaacatcaccagctccttggaagcgctctagatctcgagcctcaccagctactcatcggcggtccaggtccagaacaccactgataagccgacgtaggtccagatctcggacctcacctgtgagtaggagacggtcaaggtcagtgaataggcgtagatctcgatcaagagcatccccagtgagtcgaaggcgatccaggtccagaacaccaccagtaactcgtcgtcgttcaagatccagaacaccaactcgccgtcgttctcgttctaggactcctccagtgactcgcagaaggtccagatccaggactccaccagtaaccaggaggcgatctagaagcagaacttcacctgttactagaagaagatcaagatccaggacatccccagtcacccggagaagatcgagatctcgaacatctccagtcacccggaggcggtcccgttcccgaacctctccagtgacaagacgacgctccaggtctcgaactccgccagcaattcgaagacgatctaggtctcggacaccactgttgccacgcaagcgctctcgaagccgctcaccacttgctatccgccgccgttctaggtctcgtactcctagggcagctcgaggcaagcggtccttaacaagatctcctccagccattcgtaggcggtctgcatctggaagtagttctgatcgttcacgttctgccactcctccagcaacaaggaatcattctggatctcggacacctcctgtagcactcagtagctctagaatgagttgctttagccgtcctagcatgtcaccaactcctcttgaccgatgtagatcacctggaatgcttgaaccccttggaagcgctagaacgcccatgtctgtgctacagcaaacaggtggctccatgatggatggtccaggtcctcggattcctgatcacccaagatcatctgttccagaaaaccatgctcagtctagaattgcacttgccttgacagccatcagtcttggtactgcccggccacctccatccatgtctgctgctggccttgctgcaagaatgtcccaggttccagcacctgtacctctcatgagccttagaacagccccagctgctaaccttgccagcaggattccagcagcatctgcagcagctatgaaccttgctagtgccaggacatctgctattccggcatctgtgaaccttgctgactcaagaacaccagctgctgctgcagctatgaacttagccagccctagaacagcagtggctccttcagctgtgaaccttgcagatcctcgaacccctgcagcttcagctgtgaacctagcaggagctagaacaccagctgcattagcagctttgagtctcacaggctctgggacacctccaactgctgcaaattacccctccagttccagaacaccccaggctccaacccccgcaaacctggtggtgggtcctcgatctgcgcatggcacagctcctgtgaatattgctggctctagaacccctgcaggcttggctcccacaaatctctccagttccaggatggctccagcattgtctggtgcaaacctcaccagtcccagggtgcccctttctgcttatgatcgtgttagtggcagaacctcacctttaatgcttgatcgagccaggtccagaacaccaccatctgccccaagccagtctagaatgacctctgagcgtgagcgggctccttcccctgcttcaagaatggttcaggcttcttcgcaatctcttctccctcctgcacaggatcggcctcggtcccctgtgccatctgctttttcagaccaatctcgttcagttgtccagaccactcctgtagcagggtctcagtccctttcatccgggacagtagcgaagtccacatcctctgctagtgaccacaatggcatgctttctggccctgcccctgggatatcccatgctgaaggtggggagccacctgcctctactggggcccagcagccttctacattggctgctctgcaaccagctaaggaacgtcggagctcttcctcctcttcatcatcatctagctcctcctcctcttcatcatcttcatcgtcatcctcctcttcctctggctccagttctagtgattcagagggttccagccttccagctcaacctgaggtggcactgaaaaggtgaggcaa

SEQ ID NO: 24471 - DNA, 2975 bp, Mus musculus
gaggtttggtcagctctgtgccactgctccagagaagtactactcactggcctgccttcgtgttttcccagggcttttctcaggcacccctcccccactgccgttcctccaggccaaggaaggtagggttggggttggggcatcttgtctccttgtgacacctttcttctctcacagggttcccagccccaccccagtcccaaaggaggctattagagagggacgtcctcaggaaccaaccccggccaaaaggaagaggcgctctagcagctccagttccagctcctcctcctcctcctcttcctcttcttcctcttcctcctcctcctcatcttcctcctcctcttcttcctcttcttcctcctcttcttcctcctcttcctcctccccctcccctgctaagcctggccctcaggcattacccaaacctgcaagccccaagaagccaccccctggcgagaggaggtgagtgctttcttgcctgttgtggaaggggggttggggtgagttctccagaaaggggaccctgggtgaggttcctgctggggtgcctcgtgtggacgtctgtgactggttgtacgggagaaggagtgccggactcctcccatcctcccacagtgttgtattctggtcaagggctgcactatctaactgaggtgtcccaggccatatctgggaagtcataggattcttcctccctctcccctcccctgacaagcagcctggtctcagagatctagctctaagtctccccattgctgctgcagggctctggtctggccaccgtcatcttctcccgactctgtccacagcctcctccctgtctccctgcctccacgccattctcttccacacgtagccagagggatctttctaaaacgcacatctggttacttcccttcactccacaaatccttccggaacgccctgtggcctgcaggataaagtgccacctctgcgggaatggcgtgtgaggctcttcaccagctgcccttgcccgccctgtgctcctcctgcccgcccccacacatgccccgtgctccggccatacccagcgccttgcagtctaaggagagccccatgcctttggacatgctgttccttctgcctgggatttccttgtctgcctggtgaactcgttctgcaagactgcattcaaacagcacctccgagaagactgccctgccatttccctgtcctgcccaggtccccatcctttctctggatccccaggcccatgcatatccatcctgctgggctgtttcctatgtagggggcgtgtgtgccttcattgttaacctttactaccaaacaaaattcttccaagggcagggactcttttatctttgcatcccccgctgcaccctgtgccctgtccactggggtactcggtggatggtgtgcgggcggatgggtgagtgcggacaaaggtgggtctgaggctggccctgtgtggtgtgaggtttggtggtcaggacctgggtgggtggtcctgaatgcttggctggtgggtttgggaggatgtggagctatagaggcctactctgcttcctaggtctcgaagtcctcggaagccaatagactcccttcgggattcccgatccctcagttactcacccgttgagcgtcgacagccctcgccccaaccttcaccaagggatctacagaggtagggcctatagcaggtgctagcaacctgactcaactagctaccattaatttgtaagcaaaatttaaaagtttttggtattgttctgtgacctaatttctcctcttgtagcagtgagcgagtttcctggagaggccagcgaggggacagtcactctcctggtcacaagaggaaggagacacctagtccccgttctaatcgtcaccgctcctccaggtgtgtctccttggaagtctggcccttctgagagctagtagttagggatagggatatgtgtggtgacccagaatgaccagtcttctctattccaggtctccataatctggattccactacacctcatactctggagacatgagtattcctcatttttcccagaagaatcatggaaggagtctttgtatgccttcccttgaaccttggcagcatcttgaggggagagcgtcctctcccacccaccctttttttttttttttttttttttggttcctgtgaaatgttgatctctgtgagtttttcctggttcttgtgttttgggggttggagtgggagggagggagtctagggagggaggggcacagctcaggacatctaggcctcagattgtgatgatccagggagttagctccctaaattcttgggtgactgatggtttaacttggtaagttgtaatctttcctgaaagaggaaggagctgaagttggttggccctgctgcacccccttacaaggttgtgaggccctctcccccccaactttgtttaaggcattttggttttttaaaatctgtacagtaaaagcaactttttctgtcaaataaaaatgagaaatgcagtaattggtctgtagtctttacttggggttaagagttctgtgaacaagagggaacagaaaagtcaatcaggtagacagccaaattttttttattggggaaatgggtctctagggggtaggcctaggccctcactgcacagcttgttcattggcactgcctccagaatcctgtggcttcatcacatctggaagctctggagggctggaaaagggctcgatgcggagagcttcgaaggtgtcatctggggaaggggtatagaagattctcagcgtttccattcattgacttgtatcaaccatcaaggccataaccctccccaccttggttgcctgacttggcaatggtatgatgacttctgtcctcagaggcctaactttgcctctgaccccattacatgtcattgataaagacccccaacccccagctttgtgcttgtctggcaagtatcaacctcagaattctttaatcctgg

SEQ ID NO: 24472 - DNA, 1791 bp, Mus musculus
tggtctcactattctttctgagtgctacgtgggactgaggcaggatgctgctaaccagcccgtgcattcctgaagatgatttgaaggacagggtccttggtgctacacacagtctgcaacaagcagcctggaccttgccaggagggaggggcagccgccgcaactcctgtccagtgcactgtggctttgggggtgggtgcctgctcatcactgactgagcaccaggcgcacatccttgagtcagggaggctgctctgcctccaggcatgattggttgatttctctcgacctcagctgaggctcctgacaaaggtggcctccacgttatcactacttctgggcaccacccctggacattactccttcagagccaggctcttgttctggcctgtcagcttggcccaggatcatcaaggcttcttaatttgtattttccaggcaagaggactttgtatcccttttttaaagtgtggatagaccacccggtgtttatactctttagaaatgcctaaaagtgttgctacattttggattgatctgttaaatcatttatgctcccataaatagaggttttgcctcatatgtctcgcctgtgggctcatgggggagctggcgcctaccagtgcctttgttgtgcctgggatagaggctggggtgggaggcctgtccacctggcttctggaactgacactccaggtcatgttaagcattcaggatgtttacagtgcaaacatgtctccttctcactggctctcatttccttgtataactatgcagttcttctctcgtatttctggagtgtttgggactttgcacaatttgcatgggctctgttcatctgatacgacattggagctgctaaggttcctgcagaggctgcgcctgctggcttgaaacagaccttctcagctggttaggggattgtagcaggccacaaacttggctcaagcaagcaagctctgtgcttcttgaccttcccaagggagctgtgcaaactgaccactatggctgcccatgtgcaggccagggcctctgacactgcttgtttcaaatgcttccggaaacttcttgcctagaccctcttccttctcctctgccagtaactgattagtcaagttctccagcatctaggaccgacctcctcctttcctaaggtctgttgtatgttgttaaggtgtggcttaatcactctggggcagtagctctgctgttggccatggggatgctctggggagtggctggacactcagcattgcttcatttatgactttgacaatagataggcttctgggggtttttgtttctgtttttttaatttaatgatattaaaacttaattcactaaaatcctaaggggatatttatacttttatacttttttaggtatccatattttatcagcttaccgtttaatgcctaagtttcccctggaaatagtaaataaaattgtgtatttatgactgtgttcagcaactgtgaatatcttgaagtgtgtggagaagtgttgtcaatccggaagtgtgtcctggtagaccaggatggtgtgctcctgcttctagagcaaagcctcttccaggttcccaacagggatgtctctgctgtgcagcccctgacccttgtatatcctgtgtcctgttgtgcagtcaacccagccagattgctggcccaaggctgtcctgatgcccaagctgagataagcatggggctcctgtacagtgctcagttatctgggccgtgaggtaccctgtgaatgcctgagaacaagtagggttaagggtctggatcccgctct

SEQ ID NO: 24473 - DNA, 1182 bp, Mus musculus
taatgctaaaaatgtcattactgcagattcctttgtgacagattttttttccaaaagccagtcttttcatttgcattgcaagaatctgctcctgcatgttacttcttttccatctttgctctaaggcttccaagtgcttggtgatgttttcagaatcttgtactttgtgtccacgatggtactgaatctgcttctacacagtcagcagagataaagtgttgaactgaccttgctacatgcctaatggataattcataattaagtttatagactcagaaatgcatttgggccatttgggaatcagtagcaaagcagaatagcaaagctcttcttggaaaagaaaccacacagatgattgagttttactaaaagtacagctgtgagtgttcttgctccacacctcaggtcttggttcaggacagcacagtggctaggctttgtcattgccaaggatgggtatccccactgatgcttatgtaaaccttcttgtgcgctgcagtgctgcacggaactgtagtgcccacccaaatcagatagtagctttatctgtgttgggtggggcctgctggttcaatttggaaacatgcagcagagattttctgtgttacttgactgtcagagcttagggctggagatgtgtagaaatcagtttcctgccctcctctgcctcaaggcttctccccattgttctatagacctggggtgttcatctgagacttgggaggccacagcaactctgaatatggtgaagatactcctatacacgtttctatttgttttaatgcaaaacccaacataaactggtgctgatgccagtgggtgtagcacctcgtgggtagaaggtaagacaagggccctgacattgaacagggctggaaccactctcagaacctctgaagatacctagcttctggcctaacacttcagggttataagtcagaatgtggaaaaatggcctgcaatgtgagggaagctgtttctgtcaaaagcacttttgcagcagtaagcaaatgaattaaccaatatgaatacctgaaaattccctgtaactcatttcttccatatgaagaatccaaactgaacaaaagtttttacaaatagcaaaattttccctccccatgtagtccaccctagtttaatcatctgggttaatgactacaagtaggtcattgtgcaggttaa

SEQ ID NO: 24474 - DNA, 1044 bp, Mus musculus
cacaaagctggctgtatatgggagagtcctttgttgcttccttccctggagagcaacactacctcctgggctttaccaagcaccaccctaacctctaaaatcagagttcagctgagctattagtagtgggtggtcaccatgactgcccaagctacaacagctgatctcttcccaggtcacctttgtccttactgcccccttttccttgatttttttttcctttaatgaaccatgtacattcatttcttaacctggcttaaatcaccttcatttttccagtcatccttagagccgtcaccctgtgtgaaggtgccttactttgtaggacaggatgtggatgtcagtttgtacaactcgtgtgtgtgtgtgtgtgtgtgtgtgtgtgtgtgtgtgtgtgtgtgtgtgtgtgtgtgaaacagtaaatttgggatgtatgtaaggagagagagaaataccctgttagtacctctagaaatcatgtgtcctaggaatggcaaggatggaaagaaagttgaagactgttctctggcttctcctacctaggtacagcagactgtagtacctcacagcccacttgagccctggcttctctcagcatcacagatgaaacttagcttgaatgggtcaattccacctgtttttctgtgctccagctgggcagtgggctccccatgtagagctgagcctctccacttcagggtgtggcatcatggctcagatgtcattttgagctaaaacccagttagatgcagtaaaaaaccactttgagagatggcttgtgttaggctgaaactgatagaaacgttaactgctgcagctctctttgggccaccctagtgtttgtgattcatgcttgaagtaaccttgccgacagttgtgtggcacagactcccagtaccagcaagggggccgtaggtaattgtgtgctttcttaaagaagtgtatgttttctgaaagcaaaagaataaaggaaggcccgtcattcagagaccactgtgaacatttggatgtagatgctgttctccctaactctttgttccagtg

SEQ ID NO: 24475 - DNA, 1184 bp, Mus musculus
ggggcagtgccttggtctgaggcaagagtcctagttaatcttgacttttttctgccatggcatgaacaggcctggggatggaccacagtgtcccaagcctttccagtaggtttcagggcttgaaaacacttccacaaaataaacaaacaagtaattacatttcaacccttgccttgacatgtcttggctatcatttaaggttttagatgccacaaagcgtttaggctgtgaagagatggaagggtacgggcctctcaaagctcatccattctttgagaccatcacttgggagaatttgcaccagcagacacctccgaagctcacagcttacctaccagccatgtcagaggatgatgaagactgctatggcaacgtaagctggcagacatggggtgtagcccaggcaaaagaaattctgcttgccatgctatgtgaatatgactccttgggaccctaatttgtgttattactggttgaaatgtgtgagtgattgttgtggacctggtgatggttgactgctttgctgtaataagtaaatgcccagcataccttgtgtaggctgattcctgttcttattcctcagcggatgagcttttacctgtttgggggatagatgggaggcaggatgtggtctggacctgtagatgagaaagtagtgccctgctataaccctcactgcctgacactgggtcttctggaaagctcagcgttgctagtttgtggctcggagattttctgattattttttaaaaatgctctggaatgctttttcattttaccaagagatcccagaatgctattgatttagtttccaggaatgtgatgtgggaagatccctgtagcttgatgcttagcagtaggtgcctactctgtttccaggggtaccacctgggtttgtgggcagttgctgtcactggcttcaaagcagcttgtcttgaaaacagacacaagatcttaaatatactttgtttttaaaacttcctctcttgataactgggaaataccagcaaaaaaaaacagataaaagaaaccacagcgtgcttccatggtttcagttttacttgcccagactcttctttcattatgacctttatatatttttttaatagtttattgattcaaatcagttttcctcatttgatttctgttttcttggcttgttttaaccagttgccatgcataga

SEQ ID NO: 24476 - DNA, 1174 bp, Mus musculus
gtagagggttgtctgtcagtggtgacctcccctgcctggacctgtcaggtgctgctgagagagccctgctgtacccacagcattagagtaagtggtcatttgtggtgggagatgtggcctggacttctccttccctcctctcccaccacgactcttctccccacacttcaggtctccttagagaaagctgccaagcatgtttttctgctctttgcacccagaataatgtgtccataggttcccctgttttagccacctatgattaatttttgtcactcattcataaattaatccagcaaatctttcttgagtccatactgtttcccagatagtggaggagtctcagggaacacagcaatatatccctgaccatgtgggtgtcatgctctggttgtcacgatggctcctgcaactccaaatttctccacagttctttttctgcacccagcttctaggatctcttgtatgaagaccttgcatgtgctaaagctggccaacaggtgtgtctgcactattgcaagctgacctcggctttccttgtctgatccttcacaccagcgtctcacagtcctgtgggggttagcctcttacttgtccagctgaatcaccttctgacttcttttttttccttttaggcatgctattctgtacaatgtcttgtcctcccattacgtaaagaaatccttccagcctctgatgttgctgctgggagaattccaagcttcgtctcagtgactgacccttggtctcccttggacttaactaaccaagttttcagaccattgttctttaacgcatccttgaggcctccgtttcatgctaacaatctaacttccctttttttcccttatgacaaatatcctgttctttcctcatcatgttctccatgaaactgccagttacttcttttctgtattttctgtgacttcctccctgtatttgttgatttcctggaagtgcctccagaccatgctgtattaaattagcattctcagcaggtctcccttctgcagcctatcatgcttgctcttctgggtagctgctactgtctgggcctgggctaaatttttttcctccttttgccctgatctccgacagtgtccctgttttccatcctctatcttcttgtcacccatcctcagctccatgatctatactttggggaaggacctga

SEQ ID NO: 24477 - DNA, 1174 bp, Mus musculus; identical to SEQ ID NO: 24476

SEQ ID NO: 24478 - DNA, 1852 bp, Mus musculus
gagatgctgaggattgaacctaagaccttatacattctaggcaagttctctaccactgagccatgccctcagccctacatttatatattgaactgattttcagtttacatcagaattgctgagatggaatttatagactctcatccacttgtctactataaacatcaaaaaacaattggcctagtggcagactcttaatcccattattcagaaggtagaggtagggggatctcagagagtttgaggccatcctgttctatgtaacaggttccagaccagccagggctacataataagaccttgtcttaaaaatatatatgtatatgtgtatatacacatacatacatacatacatacatacatacatacatacatacatacatacatgggctggggataaagagaaggctcagtaattagagcactgggccttccagggtacccaagttcagttttcagtatctatatgatggcttacaactatctataactcagttcctagggatctaagccctttcttggcttctgtaggcactgtgccaatgtagaacacagacacagtcaaaacactcataaacataaaataaaaatgaagggaaagataaaacagacattattgtggtgcagtgcccctgactgtacaggaatacatgcagttttacagagacctgctctctcatatcttcactaaatctagaaagttacagattgtactagttgttttgtttttaagtcactattgaggttgaagttctgtagcaactacctcagagagggctagctcctccatagctctattcaggtctgtgtgacaaagttgttatgtcaagcatgagtgccaaacaggctttacacttctttccccacagtatttccatcaggctggaaagcatatgaagtgtaaaggataattttggtattaagattcgtatctgggcctggtgtgtgtctataatcccagcacatggacggtagaggcagaaatgtcaaatcatctttagcaacagaacaagttcaagctagctatggctacaagagacctgtctcaataaacaaacaaacagacaaataaatggagtcttttatgacttcccttgttacatcaatctttgattgtgctgtaggtgttagatgcagtgtctcatggctacgttgttacagacaaatgatacttgtttgaaggcttggtcatttattgatctgcatggaaattgtgaatactgtatgtaggactaaggaagcagccagtggacacatggataggctaatctgtgacatgtcaggaaccaaccacaacaaaaggaaggcatccattggtgtgctgcttgtctgctctgcagttgctgcctagcctattttcctatgtgaagagaccagagcacctctgctgtgcattataccaccacattggagatgcgctcaggagcttatatgctgaactcgatggctcataagagcactggctgagtggtgccttagttccagtactcaagagccaaaggctggtgggtctctgagttcaaggtcagcctggtctacagagtgagttccaggatagctagggctaaacagagaaaccttgtctctgggagtagggtgggggagcattgtctgcttgtctggataatcccggtttgatttccaacacctaaattgtggttcacaaccatctgttactccagttccaggggatctgacaccctgttctgggctatttgaacactgcatgcaagtggtgtacagacgtacatgcaggcaaaacacaataaacataaaattgaaatataggtttaagccgggcatggtggcacacgcctttagtcccagcactcgggaggcagaggcggcaggc

SEQ ID NO: 24479 - DNA, 1166 bp, Mus musculus
ctgtctggcgtgcttgagagtcagcatgtgtcaggccagtgcttgtctccacgctgagattcactttcgctggggaaggtccatccttccctgttccaccaattcacaccagctctctgcacggccacagtggcagaagaggcagggcagaaaggagcctcatgcatctagaactctggattctgcacagtggacaagttcccccaccatgctggcttccaggatgggttcgcgtgactctatagagtgaagaggaaccactgttgctcacctctacagaaggttataagcctcaatgcccacttcccctgagcccactgccgaggcctagacctccaactctggtgttcatttaacaccatcttgatttttgtttctggcaagatcttactagttaacctaactggcctggaactccctatgtagcccaggctagcctggaaattgctatgtagcctaggttagactcaaaaatcatgatctccctcagcctcctcattgctgggcttctaggtgttaggcccagctgagcgctttgagtttgactgcctccgttctgagtcgggctcctgccagaaggcccccaggacgttcccaggctgagctcttgccgctcacccatgcattaccactgagactcagaagccttcagaagcaatgacgttaattgggagtatgtgcggggctctgcagggttccagactggtggtggaccttgtgttctgtgtggcccccactggcagtcccaggggtctagcccaaggagactgatggatgctgagtcatgatcacatcacaagcaaagttcttagcttttctcccacaacatacccagctctttaaatttaatgtcctttttttttctgacttttctaccaaaaggtgtgtattgttttctttatatttttattcttatcactgttcttatctgatactactaagtgttctcacttagtatttattttattaatgttttctattatttattagcttttgatgttaaaaaaaaaccaagccaaaatgtgatggcattgtataagaagttatattttagcagcattcaaacatttgtttttaaaacaaatacttaatccaatttaagcccattcgttaaactaaccaagtttgttaatatatagcatatgccgtcggagcctcagaagctc

SEQ ID NO: 24480 - DNA, 1229 bp, Mus musculus
agggtcccaagttctaatacttaagctataaacaccccacattttctcagtcacagctcccagcagactccttgatgtcactgtggtctacctgaacccagaagaacattgctgccaggagtccagtgatgaggaggcctggccagaggacaagatccacccagcaccaggcacccaggcacctccagcctcagctcccaggccccttctctgcaatcggggagatcgggccaaggacattacgacctcaggatactcctctgttagcagctcgagtcccataagctccctggatggtggcatggggggctctccgcaatctacctcagtgctctctgtgggcagccactcaagcacaaagccttgccaccatcaggccaagaagtcatgtttacagtgtcgtcccccaaactccccagagagcggtgttcaccagcagcctgtaaagcgccaaaacctgtctgtacacagtgacaaggacatgcacctggcttcctgaagctcggagtgtgttagccttcactatggtgaatgtttactgagggagggctgctgtttctctaggacactgcctatgggtactgtgtagatccttaggggagttcagtgcaagctgtcaggacactgagctcagtgaccagctcagcctctacgtgttggacagcagccacccagctgtcatgcgcacctgtgaaacccatccctgtctacccttctgtgtcctgttgtctccgggagcatgagcctctgtgttggcattcactttctgaggccaggagctgacagcctccttggaatactagcggcccaggtggcctaacacagttcaaacccttgctggcaagtcttgttttagaccagtggggagctctcaagtgaagacagcactctcctcccacaccccttcagcctagggagcctgtgtccctgcatatcagtgttgactgtagcctaatggtgtgtgaggcccttaaagctggagttgcaggcatccctgtccctcccaaagtggtttgtctgtgtcccattgtatccatgtgaccgtatctctgcactgaatttcaaggccattctttgcctgtctttatttctacatttcttctaatggggaacaaaaggaagcatttgaaatagagggtattgaataaaaagataacagatccccaatattactgtgcttcaactgaaaaaagaaaaaatctagtcctgcacagtgcctctcccgactg

SEQ ID NO: 24481 - DNA, 1135 bp, Mus musculus
tgccatgagagaagaaggaaaaggagacgcagagaggaagaggggagctggacggaggggtgccgggccaagagaacagataccaacatggctgggttatgtaggggtcagagctgctggaagggaaggccagcccctggactgtaaaaggttcagggtagggttggggcaggagtgctgggaggagctataggtattcagtgagacttgtcccaggcttcttcgggacccgacacttgtacattcttgtctgtgctctgtagccatgcctctcctgctgggtctgaggatcctgttctgaccccctctttgtagcccctggatgctctttgatagtcagaagcaagtggattcgctccatagcttccttttgccacctgagtctggagccatcccatcatgcttttgccttgaggctttctgagctatggcccctcagctcaggcctgagagcccatctctacgttccaggttcatcagcaaagagattctgacgattagagaggctgtgtggctcacagacaacacgtataaatacgaggacttggtgcgcgtgatgggggagatcatttccgccctggaagggaagattcgggtaagtagggcttgactttctcctttgagcaaaagtttcttctgtttgaggtcacgggggggggggggggggcgggcggggggcggggtggctgttgcgggaagctgaggccattgagcgctactgctgtggagaaagcaccaggaagccatggctgcggtgtgtcattagctgccctgaaaccctgagcttggttgggccccagcatgagcacctaggccaaaaccctgctgggctgtgcctcagtgtaacactgatggatgagacgtggcattttcctccctcttgtctagatccctaccgtggttgactataaagaggtcctgctgacactggtccccgtcgcacccagaacccagcacctgtgcagcttcctctgtgagctcaccctgctgcacaccagcctgtccatctatgccccagcccgcctggcctctgcggcccttctcctggccagactcatgcatgggcagagtaaggagaggccttcttgggggctgtggagggtgacctggtatcttggggaagtcttggatgaga

SEQ ID NO: 24482 - DNA, 1128 bp, Mus musculus
gcgtctcctaagtgttggcacatctcagtccaccctcatctgactccaaggccatcgatgcgccatttcataacagagaaaacttgggactggagagataccctgtggttaagagctccgcctgctctccaagaggaccttcgggcatttcccgtcagtcacatggctacttacaatcacctgtagctccagttttagggacctgacactttattctgctctccttgtcaccagacacacccatggtgcagacatacacataggcaaaacactcatatatataaagatttgtaattatttgttttgtttagtttagtttgaaaagtaagtcctagagctcttagccatgctgctaaggaagcccaggctggccgtgtgtactgtgtggctgcctgctgagcccctctgagcagacaggccaggacttacactatgccttatctctccccgtagctggctttggccaaagcctgtgcaggtggaagccaacttggactggaagggaaggcctgcagtgagtcggtctgccagctcttccaggcctcccaggctgtcaacaagcagcagatattctctgtgcagaaggggctcagcgacaccatgaggtgagaccttcaagagctgtgtttgacctggtggcgagcaaaacttgtattacctgtccctgggcaacaggccattgctttaccaactgattacaatctgtgagcgggtgagctgtttagtaatttgatgaagaaagtatttccgctccacattgattgatattttttttttacttttccccccatttctatgtgttcatgtatgtagggtgcacacatgtgtacatgcacataagacccaaacttgatgtcacgaatcttccattgtttcttctactgcattcaataaggcagggtctctctggcaaaccagagctagcctaacagtgaactcactgtattgctctggggctcccaacccagcctcacacaacagctggagttaacagttggtcaccacacacagcagctggaattcacagttggtcaccacacacagctggcactttcatgggttctggatccaaatgccagtgcttgtacttgttcagcaaatacttaaccatcttcccagtcctgttgt

SEQ ID NO: 24483 - DNA, 1182 bp, Mus musculus
ggagccgggtaggcgataggtcatacggaacggaggccggaggagcatggactcgggcccctgtgacccgggagtgcgcgtcgcatcccccaaagcacggggtaggcacgtatccccgactgcgagcccgcccgcgcggtttaaatgcccgcccggcgcctatgcctctcctgttaccccagggctatttaggttctctacttagcaaactacgattttacttatctgtgaagtcgtgggcaatccacacgatatagagcgatctcaggccctgtccggactcttgtgggcggcttgatcacctgagggttggctgaggccacaggatctgccccgtgaaaacgtctcacgacctgggggtgcgatttcacttgttagagtggttaaacacttccagacatgctctagagcacacgagtcaagaaactgttatgataatattcttagaatgtttgggaattatagctctctgggtatacatttggcctttgctgtaaatttggtttccaataagactcaggtgaagagtttgggagtggacagtctcttagagacctcctgatggaaagcccgaggtcagccacttttgcctcagtgtgaggaggaaaaataggtagaaagataggcgcatttataagtaggaaggcaggaccttggggggggggggtaatgtgggggccctttgtgaaatagggaaaaaagccataggcgttgaatgaagaatgaattgctgaagtaaatattggaacaacccactgtggaggagaagagctcatctgaagagcatgtctgggtccagttgctgtgtgcctgagttctcaacatgtgggcgcgactccattgggggggtcacacgaccttttcacaggagttgcagatcagacatcctgcatatcagatatttacattaagattcataaccgtagcaaaattacagttatgaagtagcaatgaaggtattttatggttgggggtcactgcagcatgaggaactgagtgtattaaagggtccacggtgctaggaaggggtgattttgcactgtaagctgagtgtggaagacccctctgtttggggactggggagctctcaccatctgccaagctgagagctgctctgggatggatctggcctccatgttctacagaacggcctgctaatttgagttcccagtctatgctatg

SEQ ID NO: 24484 - DNA, 1189 bp, Mus musculus
acatttcaaagataaaaagcagagacactgagctgctaacctgatggagaagtgggtggtctgaataaactcaggtaaagccggcaacacccaatcaggagggtaccatgcgtcaaagaatggaagtcaggtgtgacaactggatgagacagaaggtgaaggaagccccagggggttcctgagagcagcaagtggagaaagcacttcccagatcagcctctccacatgggaacaagcctggtgactcacgtggacagtttacgtccagtttacgtccagttcagcggctctatgttcatggctaatactaaccaaacagcagctctcagtcagatcattcatgagtcactcattaatgtgcaaacgctaacctgctgctaacttagcagctggagactgcagagcacatggggggaagagctaagccctagccaggcagtggctgtgcacatctctatgcctagcgctctggaggcagaggcaggcggatctgtatctgtttgaaccctgtctcaaaaccaccaaaaaagtgctcgcttcggcagcacatatactaaaattggaacgatacagagaaggttagcatggcccctgcgcaaggatgacacgaaaattcatgaagcgttccatatttttagggcccccaatggaggagctagagaaagtatccaaggagctaaagagatctgcaaccctgtaggtgcaacaacattatgaactaaccagtaccccggagctcttgactctagctgcatatgtatcaaaagatggcctagtgggccatcactggaaagagagccccattggacacgtaaacgttatatgccccagtacaagggaacgccagggccaaaaagtgggagtgggtggctaggggagtggggggaagggtaggggggacttttgggatagcattggaaatgtaattgaggaaaatacgtaataaaaaatatttaaaaaaaaaaaaacaccaaaaaacaaaaacaaaaactccacctggccaggagcagtggggtgtgcctttaatttcagcacttgagaggtggagacagaggcaggtagatcaccatgaattttgggccagtcagggccacatagtgagatcttgtctggaaaaaaaacaacaacaaaaacaacaaagacaataaagacccacaaccaccaaaacccacagcacaccaataaacct

SEQ ID NO: 24485 - DNA, 1163 bp, Mus musculus
ttccttaaccccacctgatgagaataaagacgaaactgtcccttgcaaccagtatgatagtcagtccctactgagggagcgtggcagtgttaacctaccagtccagagaagctttaaaaacatctacccacccttggacaatcactcaaggtccctttcacttgggggttttacagaaggtctctgggtctctttagataaaaccaactaggacagggaagaaaatagcagctgtttgggacttcactatgtctttaaaaaataaacacagaaagctctttactttctggatggtaaaactgagcaactgtctcacctgtggtggtagccttccattgatcctgcatatttggcattgagaatatgatactgctaggcatggtagtgcagccctttaatcccatcccttgagagacagaggcagatggatctatgtgagttcagaacgattggttgtcaattctgtttctacaggtgaaataccacctgcgcttcagttacacacgaagaaattacatgtggacccaaacaggaaatattttcctaaaagagactgaaggctggcataccacttcactttttccactttttccaagccccggaccgcgggaaccttcatcacctgatggcggtgaacctggtgagaaacataaggctgatactttaggatgggctttcacatctggaaaattaactaagccgtgcaggaggggtctgagctgagcaaggaaggccttacacttgtcagtagacctgtgtcaggagaagctgcggctgtcacaacagttgccgtgtcaaccagctggttctggctgaccacactgggatgtagttccccaccctgtcctgtttcttgaaagcagaaaagaatctcctaagccaggcacagtggcacacgccttaagtctcagtacatgggaggcagaggcaggcagatgtctgtgctgtagagatcagcctgtcttgtatagtaaattccaggacagctaagagatcctatctcaaaaaagaagatctggaactggagagactgctccgaggtgagagcactggctcctcctccagaggactggggtgaattcccagcatgcatgtggtgtctgaaactgtccatagctccagtccaggggatcagtgtcctctggtctctgcagacaccaagc

SEQ ID NO: 24486 - DNA, 1356 bp, Mus musculus
tgagccagatctccctggagcaggtctttctgagctttgcccacctacaaccccccaccactgaggatggccggtgaggagctctgctgcctccagagcaccaggcgtggaaggggcaaatcgtgcttagccgtgcgtcctctccctcccagtttctcctttctttcatttttaatcactcttttctatgatggacatgaaaaacaatcaaggtgatatgcacaaagtggaccatgtgtgtctgtcagtgcctgcaggcaggagtcagcatgcaggtttccactcctgaagtcaggtctctggaaccacagtcccagaccccatcctgctgtgcacacagacaggccttggtcccagctggtactgcagctagcctgggggattgagcttctttccagtgcttatccagagagaccccagggacctgtctatgtttacatatgacactaagctcccctagggggggaaagaaagccaacagggttgagcagcaacaaggacttccaggctgccaggaatgagcagcaaagttgcaaataccttcatgaagggaagatactggctatgactaggtgctgagaccattggctcccaatgcaactgcacaggcatccttggatgtcaatgttccttccagtatggacagtggaccgggctgatctgatcctgagccagatgtcatcccacagagcatcggcagcacaagagagagctgtggccagacttgaagcacatcctctgttcctagctctgtgccttcaagaagtcactggccacaggattgtcagggaccactacagggctgagtagtgtcatctcttgaggatacacttaaacatattgtgattctataaaaaataaaggataaggggacatgaccagtctttgagtcatacatatgatatgaggaggggtcatgggactagatcattaccttccagttccacatccaatatggctttcataccaagtttcaaacaaaagcaggagttggctttcctagcagagaggaagcttacaggattcactgctgtgaagtgaaggattaggcatgaattactttccttgtgataaaatacttgatcgaagtaactcaaggaaagctgtgttttggctcctgattcaagggcacaaagggacaaagctgtggccctggcagctaggagggattggccatgccgcatctgcaggtaaggatgctggccctcacccttgactcccttcttttcagtccaggaccttagactgtggaatgttgtcacccacatttctcatagctcagtctgccaaggcagacactggcactagaagggaaagggaaattgcaggtcagacctctcacctcagtacaaccta

SEQ ID NO: 24487 - DNA, 1204 bp, Mus musculus
cagggtggcatacgcatttaactctagcacctgggaggcagaggcaggcagatctctgggagttcgaggccagcctggtctgtggatctagttccagaatagcctgctatatacagagaaaccctgtctcgaaaaaccagaagggggcggggggggggctttcgggtgagacatagcagaagccaccgtttggggttgtgaacagaaaaagaattgtcttagaaaggccagtctgtcccatagctgtgctgtttgaatattgcactcttggctgaccaggcttctcttcccacaggtctcgatccccaagacgcaggtcccctgtgcgtaggaggtctcgctctcctggccgccgccgccacaggagccgatccagctccaactcctcccgataagcagggacattgattcgtacctctgtaacttatgttccccagactctgttttgtccttttctctagccaagtgagggtctgtagagaaggatcccttactgggtacagcagttgagatatctcctctacagaagggttctggcttgtagagctactgttggttcacggctgctcccatagaggtgccctgtagttttctggctagaaagttcatcccttcagttcttgataggctggtagcagagccagctggaacctatggcagcacacggatttccacagatgacccagaaccagacagcctggtctagcccccgctgtgccacacctgtgcaaaggaccacactgctcttctgttcggccgaccatgccctgctgagtacgcttcaacttagagggctaaaacctttgaaggattcctccacaaatggttacctttctgtccccgtgtctctgttactttctagaatttgtgagccagttctacagggtcctcatgaaacctaccccaccccgttgtcacctgccattcatggtgatgttgcaggttaaccttggcagtgtgtacattgcccctttttgcttttattgtacagtcagtactataaaatttgttttgagttttataactttgtagcattttagataaggttgtgtttgtacttgtgtagagtgaaaggactgttgaataaaacctaggattagaatgcaaattgagtgctggttttactgtctgtcttagtccagaagagtcataatttgtatgactcaactaagaactcactttgagtttaatccccaaagtggca

SEQ ID NO: 24488 - DNA, 1150 bp, Mus musculus
cagttttttgttgttcctgttgttattactccatgtggccattgtcctgtcagccctgtctcttctgccatcctttacccacagtagagatgacccacaagcccactgtacccagtctcattcgaagcatctgaatcagtcatgcatagtagtgcacctttaaccccagcacttgggaggcagaggcaggcagtctctgagttcgaggccagcctggtctacataatgaattccaggacagccgggtctattatacagagagacgggatgttggtggtggggctggggcttgtgattagcacaatttgagtcttttaccttacagaaaagggatgcatttcataaaagcactgagatcagcccacaagtattgtgggtcagctcatacccaggaaaaatggactcagctgcactgtggactccagagtcacagatgttgtctgtctgtctgtccactccctcacctgacaaaaggtgcaaattatctagttgctgctccagcactgcccttgaacaaatctccgagccgagcctcaagccctggctgagagcccttgtagagggagctccccagttgggattctcctgagccatttcccaggatttggtcctgaccccaacacatggctctgtccttgccacttccctgtagccactggcgcttcctccagctgtgttctccccatacctactttggtagctatcagatctgaaacatgcaactgagggtctacgtgtgttgctatgttgttctagatctttcttctgccctggcactttgtttctgcccttgctcaaccttgggagttagatcagagcctgcgcccctaaacccagggatgacagaactgagcacgagtgtgctctggtgtcaaacagcttggtacctgtgtgtctctgagcagtacccaatgttacctgttccagtttgaagttaggaaaggacagacatcccagaaagcagtcagtccaggctgtgtccttgacccctcagttctggactccatggaagcaccctcttaccagccaaacacggccccaccctgccttctccccgcaggaatgcccgggtatcttctcagctggcctggacttgctggagatgtatggccggaacccagcccactatgctgagtactggaagaacgtg

SEQ ID NO: 24489 - DNA, 1200 bp, Mus musculus
cctttgttttttatttcagggtccttccccaccccctattcccagttgcttcttttgtgagattggggcttcttatgtaacccagcctggtaaactcactattttgtagcttcaaattcatggtgatcctttggcctcagcctccccaatgctagaattctaggtgggcccctcatgcccaactcatcctctctcttgacatttcgtcactcctgcattctctggatgctggcttttcaactcctcctcagtatatcttttgagagaagtagtccaggattcttggcttatctcttccctgaaagctctcaagttcaagccttgggctaaacacacacacacacacacacacaccacacaaacctttaatcctagcatttgggagggagaggcatatctggtctacagagtgaattccaggacagccaggaccacagagagaaagcctgtctccagaaaatgggggtgggggctagggagggagggagggagagaaaaaagcaagcaagcaagcaagcaagcaagaaattaattgagcatgtccatgtatgtgacagagacagagacaggaggatcactagggttagctgccggcctagccaaaaactggtaagctctagatataagggtgtagaagaggatatgtgccagcatcctctctggcttctaccttattcacatgtatacatgagtacccccctcattcacatgtatacatgagtaccccacctcattcacatgtgtacatgagtacccccctcattcacatgtatacatgagtaccccacctcattcacatgtgtacatgagtacccccctcattcacatgtatacatgagtaccccacctcattcacatgtgtacataagagtacccccctcattcacatgtatacataagtacccccctcattcacatgtatacatgagtaccccacctcattcacatgtgtacataagagtacccccctcattcacatgtatacataagtacccccctcattcacatgtatacataagtacccccctcattcacatgtgtacataagagtacccccctcattcacatgtatacatgagtaccccacctcattcacatgtgtacatgagtacccccctcattcacatgtgtacataagtacccgcctcattcacatgtgtacataagtaccccccattcacatgtgtacataagtacccc

SEQ ID NO: 24490 - DNA, 2065 bp, Mus musculus
atgttgacagcattgccgacctcttgcctgcccttcaaggttaaagatctagtgtctttaatctctggaataaaaaaaagaaaaagaaaatcagctacctaaattaatagtggggcttagaaattgctctgttaggtggctgcaggttaactgaagttaataagcaaaggcagtagttaatcttgtaagtaaacgttggggggggttgtttacagagaattatattttaagatgcacttttaagcttggaaggcattatggggtgggcatagcatgtgcccaacattcaggtaacctcaggccctgttgctgagactgaaatgggtcaagggttgtgtgtcatgctttttactgaaatgtaatcagggatcaggccctaaggtgggcagagttaaaaagggctcttaatgacacagagaccaaaaactggggtttcccctaatgatcctgcggcagaggcgcctgctactgcgtcccagttcctcacctgtggggtgggagcgctctatagctggggtttggatgccaaccccgacagcctccgctactctgcctctttgacatcacaattgtctgttctgtttcagatgctcagtactgcagaccctcatgcacagtaacagcccaactaaacttgtcttttgtgaacttggcctaggtgtcttaagtgtggcctgctgagcagctcccaacaccatgctgctttcccgggagctcagaacagttgggttgtttggggttttgtttttttcaaactagtgaacaacactgtcaagtgtgaaattggatcttacgcgtgtggattaatagttgtgctgtcgcaacggtaaaccccactaaagaaatctcctgtcccagtcagcagcatagccagtgtgctagccgaggattgtcttgtttcccagagtcctctgggtaggcaggagtcagtcctgaggatagttaagtctctaagaaagcagccaacccccccccttgtccaggtcagttttgttgtagacaggtggacttccttgttggtggccagccataagacctactagccagttggcttctcagcatctctggccttttcccctgctcttccagtccctgacctttcagtgttctgagcagactgggaagttccttttggctgactcctttctggcaccatgccctgtaccaagtggctatgctcatggccacaggacttcgcctgctcaccaagttctcagagcaataaaaggtattcatccatgccggaagctgctcccaggtcaggggtgggagtggaatggtgccatggatcaacaggacctactcaccaagttctcagagcaataaaagatatctatccatgcctgaagctgttcccgggccaggggcgggagtggaaggtgccatagatcaacacgactgtggtagtgcctatgacattggtggtgctgatccttggagtctggataatgaccaggcttggcaggtgcgtagccagagagaccctcctctggacaaacctggagaacctgtgtgtgtgtgacatttctagcttgtcttgctgtgtgatctcaaatgcacattaaactctcaaacccatgatgattaggtctgccttcctctaatttctttgagaagcagttgtctagctatgagtgggagcaaggcaggagcactgaaggcaggctgggattccaactctaaaatcattcccagtgggcatgcccacctgcagccccaccctgtctataaggaacaggtgctaaagaaactggaaatacaaggtgtaaagtactgggatgtgtgtacagctaggccaccaagtcacagagataagtgaccaagacaatagagctagagtaggaaaaaacatgctagggaacagaggctggcttaactaatgtggagcaaggtacttgttcttggtccagcctgaagcacacgatcgtgcacatagaaatatcaacagccccatctgatgctaatgggggtcttgaaagaagcttgggagtttgtgagggaaggtaagaaagcaatcggcctcacactgatggttcatacacatttattgatagttccggtgtct

SEQ ID NO: 24491 - DNA, 1226 bp, Mus musculus
gctcactcactaagccagactggactgggagtctttgctcctttagagagactagacctagaggacttgggactgttgaggaggtcagaggttaatgcctgtattccaggtatgttaccccgacttgcttcagaaattaccattatggccaggcaatctgggtttattaatccctactgtcagctgccttccataggtactggtgacctggccagcttactgacctgtggggacaggactggcctatggaaccaaaggccaggagggcttgggtagggggtcttagtctgggaggtaataaaagcagacagacacacagatgttgctcgggaagcagatgtcaatgcagaggtagatcagccgctgtctctggggccctggggagaagggaacttcgtgaatcccaagggccccctacccagtactgtcctacaggagccatagtcctcttcacccaacctatcccaatttaccttctgcccattgggtccagtagatgggagtgtctgcacaaaggtgttgcactgaaactcccacttgggtagggtccacagtatggccccccaaaactgccagcagctcctgggcatagtgggtatcccggccaggtacatgtgactcttgggcctgcagaaagactctggtggaccaccgtatagtacttccttgctcctggctgggaagggtattggtgcccaccccaggctgatggcccctccacctgcccttgtcaacagccttagtcaggggaaaatagagctttctgttcccctgaaaccagagccttggctggcccagctggactgcacagaggaccttttgtttatcccctggccttgggggtttgtgggtggcaagccaagtagtactgctcaccctggaagtgttcagcagcagctgcagggtctcccaatcttgggcttccatcagacggaggaagcaggcttggtgctctgcagggcggtaacagatgtagccctgggggtggcggggcagataggtaagtcgaggccacccctgacacctccactctctctctctcccaagcccactcacgttctgcccgtcaaacagcacagcccagctgtggttgctctgaaacggagtcaccacgatggttgccatgttctgggccacatccactagagtagtttggttgggccagggtaccctggagctcgggaaggtctttcggagcatctgcagcaacggctaagggatatttg

SEQ ID NO: 24492 - DNA, 1265 bp, Mus musculus
agggcaggctctcatatcccatgccccttcctcccctaggtctggagtatggacaacatgatctgcacacagactctgctgcgccatcagggcagtgtaactgcactggctgtttcccggggccggctcttctcaggggctgtggatagcaccgtgaaggtaagtgtctgtggcttgggctgatgacggctacataggatggagcttggagagtgggtgaggggcaagagaagaggcccaggcaggttaacaggagagggctgggagacagactggctagaagggactcctggggccatgcgggatctgaaatagaacccttttttttacaggtctggacatgctaacagaatccaggccaggcttggctccctctgggtctgtaagtcaggctggacctccattggaatgtctgcctgtctgtggagacaggtagacaggctcagctaggcagtgtcctctctgcctatacttggcgagggatctttccaaaggccccgctgttacttgtaccagagaaacacccaggccctcctctgggcaccaggtctgatgcttgcccagccccaccgttcatatcactccatagactcttgttctgagacagggtctcactatgtagctctggctggcctggaactcgctatgtcaaccaggctgacctccaactcacagatctgcctgcctccacctcccaagtgctgggagtaaaggcccgcaccgccgctcctggcaggacccagatgacccaggggtcctttttactcaccttttctactggttttagactgtatatagattttattactttcctgttgaaataaaagctgcacagactgtggttgtggagacagcttcttgggaccatcattggccccaaggacgttggtatgctcaggcacaagatgggaggggaagaaggttgggtggatctccttccctgccggactcccagcttccaggctgagctccattacccccctcccccccacacccccaaagagtgtgagccaagcagctctgttttctgctgtttattgacagctgacagcagctccctgtccagaccccctccccacttcctagagccctagcctgggcggcccacacagaggaggctgatgagcggtcagcatgttcagatgaggaagcgccaggagtgacagctgcaagggccccgtggccacactcttagctgccctccaccacaattacggttttgtttggggtttgtttctttttgagggggggaggtaaagaaatgc

SEQ ID NO: 24493 - DNA, 1102 bp, Mus musculus
tgctgctctcccctacgacctcatcaaaggttgctccctttaggtctctggtagaacattcctgtcattaccgtgaacccccctggctaggactagaaagcagctcagccttgcgcacctctccttgcccaggcttctacactactctgttcagtgatctgggctcttagctgccccatgattggctgctggatgcagcctctctgcagcccacattccctcacgggaagcaggaagaagcctgagcatgtcctgtaaaattgaatagcaggaaatctctccatttacacaaagaaagttggcaggcaagaacgggcagcccagcaccaaaggccaaggctggccaccacaggcagcgggattgaggccataccagcctcccgcacacaatccacagccttgtgagcttgctgaaattggggtggcttaggggcacccctgcctccacagggctcaagcccctgaaaggctgcctccatctgtgcagccccccatcaacactcctcgccgctctgactcagccatctctgtccgttccctacactccgagtccagcatgtccctgcgctccacgttctcgctgcctgaggaggaggaggagccggtaggtgtggtaggcttggcaggaatcatcttccagagttgtcactgctgcggtggcacggggcactttccccttagactgcacctccatagctcacattgagggtaggtcagacctgattagggcctctagttaatgttgaaatccccgcctcctgtggaggccgcctggggatgaggtgtgggcaggtggctcagatagggcgctttgctagtctgtaagccaggaagagaggccagtaaggctgtctgactgttgcagatgctgtgtgtgcggtttcttgctgcttacagcctgcccctgaaccacaccccttgcttcagctccttggtcctctcgtggctctctctagtcaacggtgccttctaggatagtcccagtgctggtgaacagccctggatggggcggacatgcaggcggcctgggcagttaatgtgacagggttgctcctgaagcgcccacccgtgtcctgaccgtgtcccccactctgtctaggag

SEQ ID NO: 24494 - DNA, 1099 bp, Mus musculus
gagagatagctcagtggttaaaagcactggcttttattctaggggacccagattcaattcccagcaaccacatggtgtttcacagcaatctttaactccagttccagaagatccaaagccattttctggcttccatggtaccaggcacataagtggtacacagacatacatgcaggcaaaacactcatacatataaagtttttaaaaagcaaaggctggggatctcctgctggtgattggcatgagccaagtcctgggttctctacaccaaaggaaagaaatacacttaagtctcctgttggtaagcagggtggggcagctagcagtccattctcagttgtctgcagatccagtctgatgagccagggccatactgctggtacttggaagacaatcctggataaccatattccagtctagtccagggagactgagagctagagataatctgaagggctccatagacaagggctcttccagctgtctctgtcactttagcctcttcctccactgacagccatgtcttttcagcagctgatgggactggcacatacaaacagcatcgcaggacaccttcctcctctagcacccttgcctattcgccacgggatgaggaggacggcatggtaggtgtccacgatgtgggagcctggtgtagtttcccacctcctaccctcttccctgaggtcctaagagaagcctgcaggggagcagagctgggatagagaggcaccttgctggcagagctcttgttgcattcctgaacctaagaggaggctcctgtagctgagtggtagcaggaagcagccagtttgtgggactgcgctttagggtgtggcccctgaaggccagtgtcaggcagtttgggctccatcttaaatgaggtgggtgccacaaaaggtgctctcaggtgagttggccagtggaacagaggatgactggcaggaccaaagtccttgctcaagaggcagaggaaccagacttcttttccccctttctttttgcttttgtgtgtgtgtgtgtgtgtgtgtgtgtatgtgtgtgtgtgggttttgttgtttttatttgtttgagacagcgtctttatgtagtcctcatt

SEQ ID NO: 24495 - DNA, 1159 bp, Mus musculus
tatgaccacatctgtgagacaggatcaagtgattgcctgttggttctttgtggtcctgatagcatctgctatggcagagaacacatttgtgtgctctggtgggtcctcatatgactaagtcctggtgtgtgtgccacaccttagacccagtctaatagatgggtagaaagcaagaccccagccttagccatagggacatttaacctgcaaagaagtaggccttgaagtgatcggctatgatcaggaccagaggattagccagcacaggggggattttttactttggggctagagctagttggcttcctcaaaaggtccaggcctgaagggatggcaccactaaagatcgactgtacccggagcctttgccacttgagttgggtaggcaggaaggcccttgccactctgggtctgcagtatggcattagaggcagggagaagttaagacctatcctgagatggactggccagaagtctaccaggtgaagacgctttcaggaacccagaatgctacctctaaagccccccatctgtgttcttcccataggggacactgcccaaggaacctggattcctctctagagcatgagctcagccaagagtgcccgctacgaccgcttctccgggggacctgccaacctcccctcctcagacagcagtggggtaagaggagcctgtaggtgagggcctgccctctgcatgccacaccccatacccccagcatgacgtatgtatatgtatttgtatatgggtatgtatatgtacttgtatatgggtatgtatatgtatttgtatatgggtatgtatatgtatataacttgccactgaggacagagctacagccgtcctcttcctccttggagagtccctcaggatagcctgtgcctgttgatggtgtgtccctgcgtatgcactcagatgggccaccagcgggtcagcatgtcagtatgtgtgaccctgtggatattgcattaagccttttccattgtcttagaccaggatggaaacaacctttgggcctaccttttcgaccgtcactaccatcaccaaaggtgagcctgactgggaagaatctgtattctactgggatccaggagcacttcctggaagggtggtctcctggcttctttctgtttcttcccatgtctcagcctccagc

SEQ ID NO: 24496 - DNA, 1247 bp, Mus musculus
tcacggacttcaggaactctaggtgctgcttcacgctttgagcttcctaaactacgacttccggcgacctctgtactgaaggaccggattggtagcttcagaatcactctatgttgcacattggaatttgattggctaactgaactcgtcactcatggactcaatggctctacaaccgggaggatattcgagctactcaaaataccgcctccaaaacaaaagtcgctgtacgattggtggaaattgcaggacagctcgaggagcatatcagcagtggaggaaggtgggcacttcctcagaggtggcccaatcacataaggggcagttctataaactcttgagcctcgcgagcagtcgctctttttgggagtgagtgtgttcgtggtccctttcatctaggttttgtaaggaacgttttgggagtagtgctcgccgaatggaactcaaaggacctctgctacagatctgccttcctcccgagctgaagtgctttagtcctaagggtttaacccttccccatttttcttctgactccatttttgcaggtatgaactggtcgggcctggcttcccttttcagccccaagcccgtgatgaattaatttctgacacctcgtatgaaaactgcatgcgtagtctgattacattataagactgaggcttgggcgcgacgtcactaattggatgggttttgagtgaaaagttaaccaaagtaaagatttatgtttgattttttttttttcagggcatgttgagtcggctgcatctagagatccaacgagtaggagtgttggctggtaagctgggcatccgtgtatctgagtttcttagcaataaagtgaaatgcaatcttactgtggtttcagacgttgtgatttcatgtgctgatagcacagtgccgtagaggccctggtttggcgtcacacagtccgcaaaggggttgactaagatattctgtttgaatcattctaatctagggtgaccttataagccagcactacttaaggaataggctgtggggcaccctaatcttgatagtaaactattcctgtgggaattttggtgacggtatcagcgcatgtgtaaattaagtgtttccccaggtgaagtacctttacccccccactaagccatttttgccccaggaggtggttttccacagatgacacaaactccagaaacacctttattaatagggacttagaggacaggttttcactcaacatttgtggcttggtgactttagta

SEQ ID NO: 24497 - DNA, 1150 bp, Mus musculus
cctctctgtctcagtagtccttctagtctttattatggggatgtgatacaacactgcctccctcttctataggtcaccctccacagccaggatgttcctatgctccctggtgacctcattggcttacagcatgatgctggcccaggtactctcctacagtgtcccctggcttccagctgtcctggccaagccctgtacctttcaaccaatgcctcagattggatgaccaacctgcctgtccatctggaagaagcttgggctggccctgtctgctccctacagctgcttttggtcacagagcggcttacaccactgctgggccttgggcctaaccctggactacagcatcctgggcactatgaggtccgggctacagtgggcaacagcgtatccaggcaaaacctgtcctgcagcttcagtgtggtctctccaatagctgggctgagagtcattcaccccatcccccttgatggccacatctatgtgccaaccaacggctcagtcttggtgcttcaggtagattctggtgctaatgccactgccacagctcagtggtttgggggcaatattagtgctcccttcgaggatgcctgccctcctgaggtggattttctcaagcaagattgcacagaagaggccaatggcaccctgttctcagtgttgatgttgcccaggctcaaggagggggatcacacagtggagattgtggcgcaaaatggagccagccaggccaacctcagcctgagagtgacagctgaggagcccatctgtggcctccgtgctgtgccaagccctgaggcccgagtgctacagggcatcctggtggtaagtgtcctacaacccagccctctaaatggtaaaaacaggaagcctcctccccattgaggagggatgaccttcaggtgttttctagggctgatagcacctattacaggatttccagtgggacctgttggggagcccttgtcttcttagtgattatatctctccttagtggtgctgggtatggaacctagggactcgtgcaagatagacaggttcttttgttgtgagtacacctgagccccatttaacaatttgtaagttactgaaggtcacagttagaacatctgttctaaagactcagatgtttctactcttcagattttag

SEQ ID NO: 24498 - DNA, 1076 bp, Mus musculus
gccctgtgcctgcctcaggacgctgaggccctggctgcactgaaaccagtgtgatactgtgcctgcgttgcttggcctctctgtagagggaagttcataggatccttagggacccagcatcctttagagaagtgacagaggcatgggatatttgagaaacaagaggtgacaagcacgtacgtatacctcaaggacttggtctggggagatattttggtttgtattttcaggcaaggtcttactgcatagccataaaggaactttgattttggagtcaaaattgagaaatcatggaaatattcttaaatacctcattttcattttgaaacttaactatttgaatgcttacaaattaacagatttcttggttttcttgattcagtgacaagagtttgcatagaattatatattctttttctcatctgtatctatgtcaatatctatatttttgcttaaattttttgtttgtttttgtttttcaaaacagtttctttgtgtagtcctgactgttctgaaattcactctgtagaccaggctggccttgaactcacagatctaccaccctctgtctcctgagtgcagggattaaaggcatgtaccaccaccaccaccaccaccaccaccaccaccaccaccaccaccaccaccacctagctcattctaaatttcaaacaccagaaattagtgatgtgtgaactatactggaatgtagaaagggagatgtctctgaattactgaccatggtatgggatttcctgtgatctaagagtcactaccagctccccaccagaagctcttctacagcccagggccgagtcccccagagagattctgtccctactaggtaactgagacaggagtctgtactgtgtgactctttgccatcattcattaatagattctctaagcttctttccagattcggggactcgtgtgttcccagctgtaccttccatctcatgcccttttcctttttttttgttttgtttttgcttttgtttgttttgagacagggtttctttttttttcttttttcttttttcttttttctttttctttttctttttttttttttt

SEQ ID NO: 24499 - DNA, 1160 bp, Mus musculus
aaaaggctgtgtggccagccaggacccagggtcccctccccacaggaggacacagcagtattggaccaagtgagtacccagcctccaagatgctaatttattcgccccccctccccccaagtcctcaggttcagcgggctgcgcccagctctacccctaggtggccatctcctcttgctaaaaatctaagctggagggagggctaagctacacttctcctttatccgtcccctaagttattacctctcttgtttctgcagcatacttgccctctagctaccatctgctttctatgtccaccatcaataatttatatggggttaaaatgtatatatttttgtatgtcagtattttctacttgggctgaaaatgggtccattgttacccagggcaggggtacaggggaagctgcagctattactggatccgagtctggcctcgggcaggtgctggacagcaattggggccaccgtggccttgttttcctcccttgtctggggccaggcagcacgcagatctgctggtttcagatctgagcaagggcaggactactgtgggatgaaagatgccaagaagttactggacaagcccaccaatggggcttgcccccatggcgggtgggggaaagagaatgtatgtgatggcacctgcctgcttctgtgggctcatctgcagctctagcctggattctgccccaaccccaaacagacaagacaaagtcaaataaagaagctgtctgactgctgtctgtgctgctctctgaactccacgggccagatgtgcgtgtgcagtttatttcatgtaggagtacagtcaggatagctacatggctggccacaggactctagtcatggatctgctggcctcacacaaactctgtgaagtcatccacggaggaaatgaggcgcttccgctggcctgtttcataggtgggtgtagcctcaggggcttgagctggggctttggtgtgggctggagggtgcatcagaggcaagcttgggttggaatagtgcacctcttcacggatctagagagagagaaagctctggcagtgagtccggaagttctgttcaaccagactcagacatcgcatctctgaagcctgtcctccctaccctctggcggagacgcttaatgtggcggagtcttgcgatccactt

SEQ ID NO: 24500 - DNA, 1150 bp, Mus musculus
tcaggtgccagtggagccccccgaattggaggatttcgaggcggcgttaggtacagacaggcactgccagcggcctgacacctacagccgggtgagcatcatgggagccatagggaaagctggggcaggcagcagcgtctaactcagacctcctggctctgtactgacttgctgtgtgagctggataggccttccccccatgtcgcttctgctcccaccctctgggtctctcaccctctatctgggtggcatttattgtggtctttttcagtttgtcagaatcgggatggcaggtgctgccagaggcctgaaggggaagccagaggccctaatgtttcagtgcctcctaacagtgtttcttccaaattgtctttgcagtcatcctcagcatctagccaggaagaaaagtcccatttggaggagcttgctgcagggggtatccccattgagcgggccatctcctctgagggggctcggcctgccgtggacctctccttccaaccctcacagcctttgagcaagtctagctcttctccggagttgcagaccttacaggacatccttggagacctaggggacaagattgatattggacggctgagtcctgaggctaaggtccggtcccagtcagggatcctggatggggaagcagctacctggtcagctacgggtgaagagagccgtatcacagtcccacctgaaggtcctctgccttccagttctccccgctcccccagtggcctccggccccgaggctataccatctctgattccgctccatcacgaaggggaaagagggtagaaagggataacttcaagagcagagctgcggcctccagtgctgagaaggtgccaggcatcaaccctaggtgggcacaaatcccaggttgctaccaactccaggggatacactttcttcttggctggagctcccatacactgcacgggagaacaggcagtcatgaattgtgtcttcctgtagctggtgggagccataaggagggtgggtccttggccgtagagtttaggtcctgccatcggccccgccctgaccaatgctttctctgtagctttgtgttcctacagctctaccattcgcccttttttggtgatgagtccaataagcccatcctattgcccaatgaggtag

SEQ ID NO: 24501 - DNA, 1070 bp, Mus musculus
ccttggctgtcttagaatttgctctgtagaccaggctggccttgaactcacaaagatccacctgcctttgcctccccagtgctgggattaaagacatgcaccaatactgcctggttttttgttttgttttgttttgttttgttttttaactttttagtgacttatttatttttattttatgtgcattggtgttctccctgcatgtgggtctgtgtgagggtgtcaggtctcctggaactggaattaaatataattgtaaattgccatgtgggtgctgggaattgaacctgggtcctctcaaagaacatccaatgttcttaaccactgagccatctctctgaggctaccactcttgaagggccaaacccagggcctggggctgtcctgtttcagctttccttgggcatgggccaggtgcttccagactggctggactttgtgtctgctctgtgctggagactttactgggcaagtggtcaccaattctaaactcccttgtttttagggggccatggccttcgagttggtgtcctggatacttcagctccctattccccaggtggctctgcttctctgggaccacagacggcggtggcagcgaagcccgagaagccccctgcaggagcccagcttccaacagcagagaagacgaatctggcagcctatgtgcctttgttaacccagggctgggcagaaatcttagtccgcagacccacaggtactgagagagcaggcagcctggagagtgcccagtggtcttcagagcataggggcattgagacattcgctctgaggctgctcttcagaggggtggtggctgaggcacttgcaaaagtgccaaacagggcagctcacacttcagacatttagtctccgggtgtagaagaccagaagatgagactgaatgtgggcagggcagattccttctgagtcctgagcctgcaggtggctcgcgtctctctgcccttgtgcttgagcccataccctttattatgtgcacacaggctttagacagggccaactttcataccctttattatgtgcacacaggcattgacagggccaacttt

SEQ ID NO: 24502 - DNA, 1746 bp, Mus musculus
gtagctagcatctttctgtgaattgtgtctgtctagtgatagggcatctttccctcaccttccagcccttcctgggtgtggcttcagtcaccctgagatctagccccgtgtgagtgcctgccttgggtttctacctctgtatggcttctgagagctggggacagtgagtgcccagtagaaccccaatcacctctttctttctggtagactccttataaccaaaacgtggctaaagagctcagaatcaaacctagaaaaggccttcctctggttcctgggcatgagtggaacttgaccagttactccagttcactcagcctgtccttgctaggaggtggccctgtgggcagaatgcaatcttgctctgtcctcctgtggtctctgaagtctgcatgactaagctgtgggctgcagccatggctgactcctgtgtgctttggggagaggatgttctgtcttcccattctctcagctatgctccagacagcgggctctgctgtgaggctcctgcctcccttcctctctgggatgacgtggtccacagggcttgtgaggttgtagctccattagccactgtgacctgggcctggtgggctttctgagcaaggccatcttggccatgcatgcattgagctttggctcctggtggtaggtgactcggcatggtccttcccttagtcctgacctcaaacctaggcatggtttctccctctagcagaatacagacatcccttacgagcgccagcctggggtctgcggatgagaactctatggcccaggctgatgacaacttgaagaatctccacttggagctcacagaaacatgtctggacatgatggcccgatatgtgttctccaatttcactgcagtccccaagaggtgtgagggcctccaggactggggtgggtggggcagctgtctacttgttctctgtggctgaactggatgcccagggtggcagctgctctgggttcctgaggtcctgctggccttcaggagctgagagcctgcacatacaagcaggagatagacactcttactcttttaggtcccctgtgggagagttcctcctggcagggggtaggaccaaaacctggctggttggaaacaagcttgtcactgtgacaacaagtgtgggaactggtacacggtcgctgctgggcctggactctggggacctgcagggtggctcggattcaaggtgactgtccctcccttctgggtatactgtgctcctagaaaccctgggggaccatggttgactctgtatggtcacttctgtccttagctctgatcctagcacacatgtgaggcagacaaaggaagcaccggccaaactggagtcccaggctgggcagcaggtgtcccgtggggcccgggaccgggtccgctccatgtcaggtaagactatacccaagccatctcctgacacgtgcccattatccctcacctacctctcagtttgccccagtgtgcagaagagctgaaagactgttggctagctttgtgactggccacttcctgatgactcttggatgtggtctttgtggcataccagtctgtgtatagaggcatggtaactctgctcatcggggagcgaggctcctgcagttcaagagcctggaagtcagctcacccagggcactctctgttgtgattgaggagttgtgggtcagtgggtgagcatcggggctctttgctgcttggttcacaggaggcccccactcctcctcctcctcctctcc

SEQ ID NO: 24503 - DNA, 1180 bp, Mus musculus
gaagggtcctgtgcaaggcacatggctccttcccatctgctgtgtctgccctgccaaggacctctgcctttccttggcttacactccttgtacctgtgtggcgtgttactctgaagtcacacagtcgtccaaggtcggggcaccttggcctccaggcttggcaacggtcccagtgcttctggtgctgaagagacccccaagaacctgaaagaggggctcctttggatgtagctagtggggagaggggaggacagggatggacagctgctgacagctggtcaccctgatacctctgctgagtagaagtcactaagaaggaagccctgaggtctccaggctcagtggataacctgttctttaaggatcccagcctagtcagtcactgtggggaagccgtggggctgtgagaatattttgctgttagatgtcagcgactgtctatagctcctggggagaagtttccttctgtgcaggacaccagctcagaggctcaggccttgttgtatataaagtgctaagtgactaggatctcccctcctgccctggagtcaggctcgtggcctgactgaatggccactgttctccctgctaggcctttgacttcctgctgctactgcgggctgactcgctgcatcgactgggcctgcccaacaaggatggggtcgtgagattcagcccttactgcctctgtgactgcatgtatgtgtggcaggccctccctcgggctccagggtgggctggtcacgagatgaagctgggtgttgtctgcctactcagggttatttcataggagggactgtacagaagggatgtcagcggaagctggggccaggaggggccgtgtcagtttaacttgtccagtgtccatctgcctccacagggaactggatagagcctcagagaagaaagccagtgggcccctttcacctccaactgggccccctagccctgtgcctatgggccctgctgtgcggctcggctacctaccctactccctgctcttccgtgtcctgttgcagtgtttgaagcaggtgagaagtatatcagattcttgaagcaaacccagtttctcacccttgtatgagtgaagttttacaacaggacttaaatatgtatccagataacagtagccctagaccagcatgcacctcatagggagggcacaggtggacggacactc

SEQ ID NO: 24504 - DNA, 2085 bp, Mus musculus
ccaggctgtgtgccaagaacacacccagctagaagtcttctctcccagctggacggtggttctgaaagaaaacaggcccagagagaaaacaggaaagggcatggcactcattgtgtttgtcctgtagccattaagggcctactatgtgccaactagtggtactcagggagtaattatcagcccgtccccgcctgggacttagacataagtggctagagcaggagtgtgcgtaggcagcaatggtctcccagaatcggttcagtagtagagatccgctgggatccaggctgaggcttggcaagggccaagggccacagaaagtgttgatactgttaaggcagcaaatgttttatagtagtagagtttggagctcatcctaaatgcaacgatttctgaaaggggagttgcactgtccagtttgggtgtgaagagagaggttctcttgaatgtaactcaaaggacttgggacaaaggagagaggttatattatcctagaggctgttactagtgtcggtgtgctaacaggcactttgtcagactgtcatgtactgttgtgacaagggcagagcacagcacttctgtacacatcgtggtagataatggacagttagttgcacaaacaagtgtggggatgtggattggcaggtaagcagcacccttcccccaccctcatataaaacccactccaaagactgaatggcacttttttgcagaaggaagaaaaagccacaggcccgtgagacatccacggagaacacagaaaacgcatgtggcctatgaagcggctaatggtgaggaaggcgaagatgctgagcccctcaaagtgcccgtttgggagccccagaactggcagcagcaactggccaacatccgcatcatgagaagcaagaaggatgcacctgtggaccagctaggcgccgagcactgctatgatgcaagtgcctccccgaaggtatgcaacacctccgcctatccagcaaggtgcttacttccttttaggtctctaccagaaaaagagcaagacctgccagctctccctgctgccatacaggaggatacatacatacatacatacatacatacatacccaggaagatgcgctcctcccataaccttagaacatgtacaacgtacatcacctgtcaatcattgtggccaccgtgcatggcagagtgtctgagacttgaagcctcatgcacagtggtggtgcatttgggaacatccaataatgcaggagaagcagactcccttacattgtgttggttccttagactaaccatagggctaactaccttcggatcctggtatcctgagtatctctaactctggcccttcttgtctataaaatgagtagtgttacactgtaacagtagcagctagctatggtctaatatccatcccatacaaggtatgattccaagcaattcatccaagcttcggctactctatagaagtatgtgacaagacagatgggtaagggacttgactgggacccgtccttgcacaagcaggtgaggaggtaccaggtactcctgtcgctgatgctctccagccagaccaaagaccaggtcacagcaggtgctatgcaacggctccgggcccggggcttgactgtggagagcatcctgcagaccgatgatgacacgctaggcagactcatctaccctgtgggcttctggagggtaagcattacctttggcaacagagccaagagggggcactgttctgaggatgtgaggcgggcatctctgacgacagagactcttcatgcttctgacttgccacaggtctatcccatggggctagtaccctgcccctgaagttcctgggatgcacctctacacatcccttcatttctctaccctcctacccagctgcctccacttcctttccttcccttcccctcctaggctccccagactgtgtcactccacagaaccctgggaggtgggtggaactgtggggagggcgcttccccttggcactgcgtgggccaccgtctatcagattggttttaaatagccctctccactcaggcacaggatgggaaccacccagctgttctgtcggttgcctgggggagtc

SEQ ID NO: 24505 - DNA, 1545 bp, Mus musculus
cccaaaccctgaggtggcccctggcttaaggtccttggaaaggtggctaccaccagtatggctcactgtttgtaccttgcctgcccccaggatggcagtacctggaagcgagaccccttccaggaaagtggcctccacctgagtcccacagcagctgaggccaaggagaaggctcgagctactcgggtcaacaagcgggcaccacagatggactggaaccggaagcgagagatcttcagcaacttctgagtccctctttgcctgtccaggggttccagggtctcttcctgctcggaccttgggcctctccagagctccccaagcctcagcagactggagggtggtcacacaccacccagaaaccaacccatgaccccatgaacccttgtcttgtccactgggtgctgcggtggtcatagcaagatcagagaggagagaaacccagagaagagagagacagagatagacagccagccaagacagacacggagacagaaacagtgagagagggaggagctgtgcgtggtggtctgccaagggcctctgccatcctgcctcgggcctgctgactgaaaggaattcatgttttcgctttttttcctaaccggtctccagctccacatgtttctagttaatagtggagccccctcccccaaccccttgggactcactctaaataattgcaataaaacacaacctttctctgcaaaccctttcttacccaccctgtcagcagcgcctttctgagcagagaccagggaacaggcagtcagggacctcagggccagctgtgcctggaggagctgtccctctgccccatccctcacatgggatggtccctaggccaggcctctcttctctgcctagctacccctgtgctacctcccacatgctgggttctggaatgcagagcctaggctctctgaggggccagaggatgggtgttccatgactcaagagggcagcctccggacaagccccttatcctgttctgcagctccagggcctggaatcgtgggtctgtgtgagccattctcaggtatgatcctgggctcctgggcctgtcccctgccttatgcctacctggctcctaccctccacccttgactccccaaactcactcactggcactgcagtctgcctcataagccatagcgcacgcgcgccctcaaattaaacaggccttgccttgaactctggcgcctgtgtgttttctgaatcttcagttgaggggtagtggggaggagtaaggcccattccagacgacctttaggtgagtgaggaacaacgtcatcctctcctcccactgtgtcaagtcctgagtctagagttcctctgttaacatggggtgggttccaggcacaggccaagtgtgagtttggaagctaggtccagaggagtgctgggccgcaggacagtgtgtgagagttcacagggatgcttcccccataggcttcccagcagctggctgcagctggctctgtttcctccctcctcggtttatgctcccctcccatccctccctccctcactgtccccacgcag

SEQ ID NO: 24506 - DNA, 1148 bp, Mus musculus
gtgggactcaggtggaggccactttcctggaaggggtctcgcttccaggtactgccatcctgggggcaggcaaggtacaaacagtgagccatactggtggtagccacctttccaaggaccttaagccaggggccacctcagggtttggggaactagccccaaaggcttcttggaggtggtagccctaccatcctggtaggtgtctccacagagatccactccaaaggcctctgaagccccatgtgtgagcatcacggcagttacctcattgtccttctctgagcctggcaggtcacttcgggatgagcacacagagccaccattgagctaggaaaccaaggataggttgtgctttcagcatccccatcctggtgcacccagatctacacacacacacgcacacgcacacgcacgcacgcacgcacgcacgcacacacactgctgcagctagttcttattcaacagtgagcacacttcggtcactgtctgggccagggcatagctggcacctaacagcagacgggcaagtccaacctgagaagtcacgatacggggagcagctgtggagatgggaatcagctacgtgaattcacctgttgtcaaagcaggatggtgtcccaagaaggtaaagactactcagtagtcatgtagggacaaggcacggaaagatggcccaggaccccagtatctgcccacactgtgcatctgagctggtgctaaccccatacaagatccacagtggctatttgttttgttttgaaacagagtttctctgtgcagctctggctgcattagaactcactctgtagaccaacctggccttgaattcagagctctgtctgtttttggttcccaagtgctgggagcactgcctgctagcacagagggtatttttgagggaaccaggccagttggtttcacaactgtacatcttcaagggcagaggtctccagaagcagcttctatcatgtctggggacagaagtagaggtatagccagtcgtggtggcacatgcctttaatcccagcactcaggaggcagaggcattcggatttctgagttcgaggccagcctggtctacaaagtgagttccaggacagccagggctacacagagaaaccctgtctcaaaaaaccaaaagaagaaga

SEQ ID NO: 24507 - DNA, 2179 bp, Mus musculus
gtgcatacagttgttgtattcctgagttggggcctggcatgtggctctgctctggacaacacgtagagccaaccatgtgggtggctgtggtttctccccaggcagctgctgcagcatgagtgcccacggtgccctcacctgccacccttcagcctcttcggggacttggagcagcacatgcgcaagcagcatgagctcttctgctgcaagttgtgcctcaagcacctcaaggtatcctgcactggggaacccagagactgccaggccccacagagccttaggttgctttaaatgggcatgggggacctccaagtagcaatatggctcctccagccttcagtgggctctagggcagagctggtattatcagggtccactcattgcccctaatgttccactgcgaagtcaggaggttgggagccccaactctgtgtccagccctgtgttctctgcagatcttcacctatgaacgcaagtggtactcacgcaaggacctggctcgacaccgtatgcagggtgaccctgatgatacatcccatcggggacatccactctgtaagttctgtgacgagcgctacctggacaatgacgagctgctcaagcacctgcgccgagaccactacttctgccacttctgtgactctgatggggcccaggactactataggtgggcggggctgggctgctgcagggagtgggacctggaggtactataggtgggcggggctgggctgctgcagggagtgggacctggaggtactataggtgggcggggctgggctgctgcagggagtgcctcggtgattctctcctaggacttttctgggagttgtctggttgtacagtagatgatctggcttctgctgactctgtctgccagtgactatgcctacctgcgtgagcacttccgggagaagcacttcctgtgtgaggagggccgctgcagcactgagcagttcacccatgccttccgcaccgagatcgacctcaaggctcataaaacagcttgccacagccgcagccgggccgaggcacgccagaaccggcagattgaccttcagtttagctttgcaccacggcactcacgccggagtgagggtgagctaggtggccgtaggctcagccaggcttaggtactggggccttccttctgtgagtatctgcttcccagacttcagacctaggtcccagttagattccttctacccagctgagacacaggaggcacccacctggctatctcctcaccattccttgctccaagcacctgagccgagtgatagctgtgagctccttgccctccctctctcaccctctccggtgctttgcatttgggctctggagtccttggggtgcttctgtgcctcaggagactacagactatcactgaagcccatatatcccatccccaaaggtggggcttaggcccctgtccttgtaccaattgggaactgatttttagaggttacggctggtttggattctgcggcgtctgggcctacccttgtggatcgtaagctgttgggggtggagaagcctctgccctccagacaggagcgctggcctcagtgtggtctggacagcagttcttttgtcctattggttgacccgggaaagtgacaggctatgtactgaccacaggagtcgtcagtggtgaggactacgaggaggtggacaggtacaatcgccagggccgagctggccgggccagcgggcgtggagcccagcagaaccgccggggaagctggaggtacaagaggtgggaggatttgcataccactgacattctcctgccgccacctctccatggtggcagccgccagcagtcaagctgggtcagtgggctccagccagagctcctgggctcctgagggtggcaacagtgtttgcccagcaagtagaattttctttcttctttaccacttgctagggagaaacaacagaatctggggggaggaatggccccgagagcagagcacagttttgccaggaagtacctgcaaagcatgcatgtgcccaggctgcaggctgagctcagacactgcccatctgaggtctttcctcacctctactccatcccagggaagaagaagaccgagaagtggcagctgctatccgggcctctgtggctgctcaacagcaagaggagactcagagggttgaggaccgggaggagggt

SEQ ID NO: 24508 - DNA, 1173 bp, Mus musculus
gaacctacccaccccggggtcccaggctgtggttggtggcagccagcctccccggaaggcaggaaaggggagcaggggtggcagaaagggtggcccagccccagtggatgaggaggatagcggtggcctcactgtgcaggggctgcggagtgtgcccaccacggtagctgtgtcttctttgctggcaccagccaccaaccagagttcagccaaggttggcaagaagaagaaggtgggctctgagaagcctggggccacatcatccccactgttgccccctgatcataccccaaagccctctggggctgagcaggtcctggaagcccctttgagcaaagctgaagtgccagtaaccatcgttgtcaatggacattccgaagggtcagccctggtacggagtgccccaaaggaacctccagggcttccaaggcccctcggtcccctcccctgccccataccacaggaggactttccagctctcggaggcccttgtccacccaggatgcctcctcccccaggtatgtgtgcctaatgctgtgggttccttagaagtttcggagaagtgctggagccgtagtgtcaggctggaagcctgcacatggtgggcacaagatgcccacttctattagagatgtctatgctgctgagtacagtctggatgcaagtgccaccttgagcttccacagttagctactttatggtactttgtactgcttaaggctccccaaagtgggcccacgacatagagctctggccctgagcctgctgaggctggatgtgaatgggccccagcgcttactggggctggacatgcagaataacagggctagttgggatcacactgaagctcttatgtcaccctgcaggcttcagcaccgtggtactcttgaagggcacaccacctccacccccacccccacccggcctggtgcctcccatcagcaagccaccccctggcttctctagtcttctgcccagctcccactcagcctgtgctcctagtcccaccaccacaaccaccaccaccaccaccacgaaaacgtaagtggggtgagccactgggagccggtgggagggtgcagcctaagccaccctaaaggctcaagcctccatctgacctcagacccgggctagcacccacaccacaagcctacttagttcctgagaatttcc

SEQ ID NO: 24509 - DNA, 1180 bp, Mus musculus
aacgccccgccagagatttacctctggtcttctgaggttgagggctcgttctctcttcctgaatgtaaaggtcaagatgctgggcctcagtttcctcttacatactcaccaaaaggctctcctgatcagagaagcaggatgctgcacttgtcctcctgtcgatgctcttggctatgacaaaatctgagcttaccttctcttgcccacctctaaaccccataagggcttcgttctgtgtctcttgagaatgtccctatctccaactctgtcatacgggggagagcgagtgggaaggatccagggcagggctcagaccccggcgcatggacctagtcgggggcgctggctcagccccgccccgcgcgcccccgtcgcagccgacgcgcgctcccgggaggcggcggcagaggcagcatccacagcatcagcagcctcagcttcatccccgggcggtctccggcggggaaggccggtgggacaaacggacagaaggcaaagtgcccgcaatggagggagcatcctttggcgcgggccgtgcgggagctgcctttgatcccgtgagctttgcgcggcggccccagaccctgttgcgggtcgtgtcctgggtgagtggtccctaagctggccccttccctgtcccccgcctctcttagcatcccttatcctccaccctcacccaccccctgcccatcgcccctcaccctcctctccgccggtccctccccccaccccccgcccgcaggttggggtgacgtcacatggctaggcgcgcccacctgcgggcgggggaagggacggcggctgttaccaatagaccttgagaggtcaccactggtctccccctgccctcaattcctcttaaggtctaatacagtccccttcctaggtcttttcatttttccggttcccacgacctggaagtaggcacagagttgcggatgtaattctcccagtatatcagggacttaattccacatggaagagggggtataggagccaaggagaatgcgcagtttcttccctttgcctgataacatccgccaggctcatttggagggagcggttcttcctagatccctcaggtctagctgtgagttaaaggagcataaggaggctccctgctgctgtagctagaaggggctcatctgggagggcttcctggaaatggcatggaagctag

SEQ ID NO: 24510 - DNA, 1161 bp, Mus musculus
cccattcagtgcggtccagctgcacctgcatctcatcaacccagttcaagagatcttgaacaaatttcatattgacttcctcttctgtcaagttctgatccagcaaagacgacttgagaaggggctttcggatctgcattagcttcagagtctgtaatgaatttggctctacccctaaactgaagtttggagctacaactgaagggaacccaggtgcatacaccggagtaactgatggcgtcaggcgggaagtcatcccggacgacaagccagaagtcacgctagaagacgtcaaggaaggggttaaactctgggttagccctgagttcaggctggggtgtaaggtttgtgcaaatcctgagtttaagctttgaacactgcctctgggaaccctgccacaggattaagaaatggaggtgcctactacagacacttgggtggcctcctcagcgaaagccccatgagactgaaggtgagaggcaggagtggtccaggtgcctcgtacccttcatttgggacatagttgccccaaaggaagatgggctagatgattgccttactactacacagccctggctgcctacaagaactgtgatcctggcaactctgccatttcagaattgaagcagggttccccagctccagcagggtttttctcttagggtgtaccaaccatggtgcccactgtcagcctggcacatggtcttctgcagctatgacaagcatgtcagcagagggtcctgggaacagcttccttagcgtttgaggccaaaataaactgaagtgacttaggggctggtttctgtgtgctttgtgtttgggcttacagtggtggactggctcggtttggcctgtctgtgattagttgggccctcttgtctggagttggcagaagtcaccatggtgcagctgagacacacatttcagggagtgtcagaatttccagggtgatgaagaagctgaagaagactaggggtctgtgggggtacaaatggggagtggtcagagtgtcgccagctgggattgtgtctcggtgaagttgagaactgctgagtataaactctgcagctgttgagcatctctggatctgctcggctggatcgatccttgaggccagactcccaaccacagcatcccagcagcatgtgtgccccagtccta

SEQ ID NO: 24511 - DNA, 1165 bp, Mus musculus
ggaagccgccgcggccacctaatcctgggcccccgggtcctccgggccctcccgctgcaccggcgtcatccgccatttgctagtgacaaaaagaagaggaaaaaaaggaaatcagcagaacgctaggctgtgcggtcctgccaaaactgtgtctgtccggatgtccacggattcccacggcccaggccgcaaagccaggtcccagcaacatagactcacgtgttctcccgaagaagaagaagagggaggcgccgcggaagggacaatttatagtgctccaagaagcgcgagatctcgactgcctacgcacagcacccgcaggctgtggttggctgcgtcttgtcccgcccccgccgtgatctgtctgcgcctgcggactttccctcgccgaagccgcgccctacaccagccggaaggacgtataaatactcgcgcccgcgctgggccgtcccgcttgtgtccaggaacccgtggcgacgttggcgtgttcgggtaagtcgctcctcacgggcttctccaggcttacgcagttgatccagtaaatgggcgttcgttgaaaatcaccctcggctttggcttgtagccgggggtgagattcggcgcccagagccacagaggcctcagctcaccgcccgctgccccggtgtgggagggtgaaacccaggcccctacattccagagcgactctgctgccccgcggtccgccctgtggccacagtcttaaccgcctcatttatttcgcaggttcccctggatatggacgttgccgccgcctcccgcaagaattgtcctcttttctcaaataaagtgatttaacctaacttatcgtatgttggtgttttttggttttggtttttcgagatagggtttctctgtatagccctggctgtcctggaactcactctgtagaccaggctggcctcgaactcaaaaatccgcctgccgctgcctcccaagtgctgggattaaaggcgtccgccaccacgcccgacgagacatttttttaaaagatttatgtatgtgagtacacactgtagttgtacagatggttgtgagccttcatgtggttgttgggaattgaatttaggacctctgcttgctctggcccaaagatttatttattattttaagttcactgtagctgtcttcaaacacaccagaagag

SEQ ID NO: 24512 - DNA, 1165 bp, Mus musculus; identical to SEQ ID NO: 24511

SEQ ID NO: 24513 - DNA, 1137 bp, Mus musculus
tctgtaggagacttggttcaggtcatctctaaatgaccctcaaactgccaccaatctccttggctgtccacactgacccctgtggcgctctgaggatgtgccttggccctcactaaagcttgtgcctgtctgttctgggctctgcaggacatggactgcgaatggcctgccccctgccccctgccccctgtcccctgccaaccgctccagcctcagtcaccgaatgatctgctctggtcaaatccttctatgccagccagggtggtgatgacccgtgacctttgaggaggggagtaggctgataccgggaactcttggatccttgccttctggcagagaaaacaaaactccgtttcataatctgcaaactcatcttgcctcactctagcttggggaagtgacagttgttgccccattagctggccagcgtggcagggaccctcttctcaccactttgtccagcgtgtacctcccaagagaaagccactgtaccttattggtgtgtttggaagctcttgacacctgggagagtggctgaagctgagacccactcccccccttgattgctctctgggatgatcaagtagaagtcaataaacatgcagcctgagccgtttccgtgtttgttgtctcatgctaggattgaactaggattacaagcgccactgtactggatttgattttaacagtgttcaaacagtgcccagcgtctgctagagccctagggagatgttagtctcccctcatctgtctcagagccaggaggattcctcagtctctgggaagagggtgcatgtcaggtttgacggtcttgaagcttggaagagccaggcagaggccagggctgcaggagtttgaaacagttacctggagatgctctgggctcaaggccttcttgtgaataagactggctgttcctttgtctggcccactgttgagatgtccctcaggaatgaagggaggtggggcctgctctggtgatactgcctgctgaccagccggggcttggtgtggtaataaattaatattaattgggggttactaccctagctttgatcattcagttcccagataaaagacacaaatctttacaggtataataagccttaatagcactaaagctggatggatatcaac

SEQ ID NO: 24514 - DNA, 1128 bp, Mus musculus
tgctagacatgtcaaaaaagatgaatccttaaaaaataacgtgatctaaaagacctgggactgaaatagaaacaggaacaacgaagctaaaggatatagaatgcttcccaagagggcaatgttaaactaaactttgagaagttgtagttttcttttctaaaactgaactgaatagacttttcaataaatcattctgaagtctatacctccagacttaaaagtgcaaaggaagtaactcattaatgctgttggcctttaggaaagctgtttgtacagagcactccagttgatttttacttgggaaagtcctccacctcaaagccagataagaattttgttaagtgagctcttgctgcagccctgccttgtttactttgggtgtggcttctgagtttggaagataattttgaaattgttttccaaataaagaccatttctgtgtgactgaaaagagcactttcttttcccagggtggggagcacttcttcctctgggacttaggaccttggcctttggtttcctgagcactgtgcctctttaacttattaaccacataaaccaatacttccacctcaaagacacaggccctagggaactgacaagcctggagatgctgtgtgtgttcatgcttgcacccctccctgataaaatgcctgtcaggatgcacagcacagttgtcagggcctagtggagtcttgtagaattagatagtggcttttgctgagagggtacataggagcctgctggtccctttaagaaggcatgttacatcttgttagtagtttatcattactgtaaggcaatatgccaaccatagttcattccatatttctgtgtattctgggtttcttgtttgttttttttgtttgttttgcaaagctataccactggcattattattatttctgatgacaatgcagacttagaagatagaactgaagtagagccaagttgtaatgaaattgtcacaaactcagaacctgaagttttaactacagcataggtagtgtcatataagtagatatataagaaaatttaagcatttaggtattctgtgagccccatgcttaattatttattatgaggtcccatagtgctatttgataaatatgaaatatgatttttaag

SEQ ID NO: 24515 - DNA, 1137 bp, Mus musculus
ttttttagttttcgcttgtgttttgacccagggtccctgactggcctagaacttgccttggatcttttgaggtcttcagaggtagaagaggtgtttgcttgcctcttgttttcttttctaaacgatgccatgaagaaagccagagcctctctctttgaccctgtcctgggaactcccagtgatttcagtgatgtaaggctaacctgtgcctccctgtcactctgtctttgtggctgacttatcagggtctcatggccaggcctctgaggcccgaggctccttggggacggggagtttagccttagtctcgacctgtgcctcgcagcatggctgctgtttttcaggctccttccccggggctccctgtggctgtcacttacccctttggggatcttgtgggagctgcctcacagccaccaagcccttcccacactttgccttttctcttccacctcagtaactattatttccgatgcctctttcctgataacgtggagggttctggatttttctatcaccttctctcagtgccaccattaggtctatggctgggcctcaggtttggcctgtggcccgcaggactatcaaattgtgttcttacttcttggtggtgacaaggtgatgaggccatggttcaccctggcctgtgtgaccactgtcctggaggcagtggagcagagggctgagtcacatgtcccttcctgttaaggagagagaagcctgctgcttcgtgagttgttttggagtaaagtagccaaggggctgacgggacataggtttttccattcctcatcttggagctgagggtgactcacagtgtgactcacagtgtggggatattcctagctgtacctgaaatcatggccctgctctctgctgctgtcttaaaggtgaaagggctccctagggaaccatgggactccctggtgtctgtctgggaggtgcctccaccctggctggcctgtactctgcatgcaaatctcccccaggtgggcagggctgtacttctacaagttcccagcatagcctttgccaagcgctggcccaggctgggctttgcattaggattgcctgggggaacttcccaacccacatcccctccctgtgcttctgtgcacctgggagctctccaggtga

SEQ ID NO: 24516 - DNA, 1213 bp, Mus musculus
gttcacctacaaccccttcatgagagtgaagtaagatggtagtggggctctctcttgactgcacccctcctgtggtgtagctcatgccttatgacacgagatgaaccagggctgagcccatcctgaagtgtgcgggcctgaccctcacaccccagctttattaagagtacccaagaggcaggctttgtcccataaatatgatatgcttttcttagcatcttgcaaggatgtgagggacccaggacccattcggggagtggctttggagggcttctttaaggatcggtgaagctctgggtctctgggctaggtaggcagtgtagagctggcggcttccatctgtattttgctgggagcgcctgctaggcttgcttaatcccagcggttttcttcctgcggacccaggctctgggaacgggctgtttgtgtgttgcctgcagcctgttctcttgtctcgccgccccagggagaagactgtgcaacagcatgctggcgagacagaccctgtgaccaccatgagggccatccgcagggagaaggaccagttcaaggtgcctcgggactgaggcacacccacgctgggacagggacttctaaccgactggcctgctgctaatgcaggacagtctacttttcagttaattcagagcccttagcttgtgttatcaaatgttctaatgcatatttataagagaaaaaaggtttaaagtatttattcccataacctctgcttatggactctttattacctctggctctcccggtctataacctcagggtcctgtggtcacatgacatccagtttgccccagtttgttagaggtgcttgctctgggagggactgagcctgggtaggcctcttgacatcctggctctttgggaaggagatgcctggcacctctctgagcttttcctccctttttgactagcctcaagggtagcaactacttccaggaattagtacctgtgtgtgtctgtgttgacattttcatgagatgcttctgtgtcagtgtgagtggacttaagtctttgagagcaagttggggcacagcctggatctcaggttgccctgttagaggcctcaagtctggcctcagcgaggcaggcttctgatgtgtgtgaagctagccatttgccaaggcccttctttaggtcagactgcttctgggttggccaccatggaggctgtgctcagcgttgtgaattctcagca

SEQ ID NO: 24517 - DNA, 1258 bp, Mus musculus
ctggatatgaaacctggcttatcacacttggccgaagcacctttacccagtgagccattttgtcagccttttcctggcctttgtcattgcaggctctgtccccctggattcccaacttaccaggagcttggaggaagggcgtgacttcatccaggaatttcccaaaagcactgcatattccgcactcacgtccatagcccagagagttgtgcacaggatgtctgccctgtgctcctgaccgcctggcagccttctggtgctgcatgcctgtaggacctttgggagcagaggccctcaggactgttttgggacctgtagttgttggcctgggcaatggctggactatgcgattacatccatgcagagatctgcaggcccccatgtccttggctgacactagcttcaccaaactagtctatagctgaggggatagcctgcgtcctgattccttgagataatagcagccttaacctttagcctataggctttcgtccagccctagtcacttctgccccaggtcaacaggctgctctcatagccacaccacacaggagctggccagtgctttctcatcgagactgacccacacatgctgtgttgtgtgccttttgtgacactgtggtttaccggcacatctggtaactttacagaactctgctattaaacataccgccccgtcttaggaaggacccagcatccaagccctttgtcctcagcgaggtgactcttgattcccctacatttcatgtctggaacaagcagtattagtaaagattataaagggcctgaagatgtggtcaaggtgtctgtcttgtttgggggaatggggttggcacattgtgtttttggaaacctgtggatctgctagcaaatggctgagaccgttggaagcagaaggctgagtgttcaagtgtgagctgaggcacagaggccctacttccctccttcctagagaggtcaagggggagagatgattcctgggcaaagctgaagtcttcaagggatatggggtccaggggaatgtgcaagggggtgattcctgtagtcagatggcagtcttcaactcccagctgcccccatccccaatgaagtagtgagcaggtggtgacctcacacctgggtgctgatgacttgggccctggacacctgcaggaacccaacctggccccagtgtagtgccctgagcagggatgcagggcctggagggagcgggggagagggtcctaagaagcccaagaggaaatgggccagatccggt

SEQ ID NO: 24518 - DNA, 1206 bp, Mus musculus
gtggatccgggaagggaatcgggacggtctagggttggggccctggtataggtcgctactcctccccgtaggcctccgaagagctactgcgggagcattatgtcgagctgcgcgagaaacccttctacagccgactggttaaatacatgagttctggccccgtggtggccatggtaagtttccgatgacctgcaaggggagagcaaggccttgggagctctcatcttgctgacagtagcccctacaggtgtggcaagggctggatgtcgtgcatgcttcgcgagccctcataggggccactgacccaggggacgccatgcccggtacgatccgtggggatttctgcatggaggttggcaagtaagtcttaccatcttccctggccacccctcatccttctccctccccctgctcacttgccattcccgcacaggaatgtaattcatggcagcgactcggtggaaagtgctcacagagaaatcgctctttggttccgtgaggccgagcttctgtgctgggaggacagcgccggacattggctatatgagtagatgttattgcagtcagcattaccaatctggaggttgttggtcttctgtgatcttcacagagctcagcatcagtaacagtgctgtgtgagtgcaggtcaacccaacctagtcggtccagggacaaccactcccaccccttgttgcctttcataataaaactgcagaaaacccttgtgcgctggtgaagtttcaagacaaaagtagtgttaagacatttattacatacagagcagatatgtgagttcacttgcaaggccaaagcctgaggaaagttgcactggccccttccctccagttgcaccctcccaactaaccctggtcacgtcacactcatgtgggaacagacaagggacatacatcacagtggagaggtggcagggtggtggggagaagcctgcagctgcacactgctgcagcttgttgtggccagacaggctcaggggcagtgcccctggatctgtgcttctctggtaggaagcgtgcagtagaggccaactgactcagtgcccctgacgagcaaggccagagccagggcagcacctgctcccacacacttgcttagaactgtgcccatcctggctggtcctcagctcttctggcctctgcctggaagcctcttgtcagctgctctccaagggagcaggccacagccggc

SEQ ID NO: 24519 - DNA, 1191 bp, Mus musculus
attgggacaggctgtgtgtcattaaggtgaaacctgcatcaaatcacagcaagcacatgtcccttactttttcattacccatccgttgactggctgcccttacctcacagaaatcatttgatgcccacccaaggcgggaaagccaggtacgtcagctggcctggatcggtgatggagtgtgggtctctattcgcttggattctacccttcggctctaccatgctcacacccaccagcacctgcaggatgtggacattgagccctatgttagcaagatgctaggtgagttgggcatggagccacatgcctgtgctctcagcacttgggaggtggaagcaggaggctcatctttagctccataaagggtttgagtcaatccttggctatatgagagcttatctcaatataaattaaataaagatgtaatgttaggggatgtgccaagcaaaagcacccattactgactgcactgaccctcttcctgtcccactcaggaaccggcaagctgggcttctccttcgtgcgcatcacagccttactcattgcaggcaaccgtctgtgggtgggcactggcaatggggttgtcatctccatccccttgactgagagtaagtttccaaccctagatggcacctctcaagaaagcagcagctgtgctagactccccgagtaagtgtactggggagccgcctgtctgggcaagctcacccttcctttttttcttattcagctgtggtcctgcatcgaggccagctcctagggctccgaggtaagtgctgggtacttgcccactggtgcccccagtaatcaccatctccagctgcctgctgaaaataacgtggcccaatcttcctgtctgttttcccagccaacaagacatccccaacatctggggaggggacccgcccagggggcatcatccatgtgtatggggacgacagcagtgacaaggccgccagtagtttcatcccctactgctccatggcacaggctcagctttgcttccatgggcaccgtgatgctgtcaaattctttgtctctgtgccaggtacacagctgatcttaacccactttgcccactgtgctactgtggcatagctatgaccttttcaggatgccacagtcctgagattcctctgcccataacaggaaatgtgctggccactctcaatggcagtgtgctagacagcc

SEQ ID NO: 24520 - DNA, 1180 bp, Mus musculus
ccccaagtgtcctgagtctatccactctatgcttgaagttggagagcagacttttaatattctgtactgtgggacagaagttatcaagagcaggaaagatgacaccttctctctatgtccactacccccagcaaaaactagtcctcaggttctgtctgaatgacttttagcagggactgcagttccaagaaaccattctcttagactttgaagactgtgctgggtcccatcatactcttccctcctgtgtctgaccttaacgtctgagcactgccccaaacacttagttaagcttcttggggccacttttgtgagaaactactggtaaactcacctaggttacacagttgctgaccagcaacagagcaggccccagaacagctggaaatgacctcttaagcacaggatcacaccccagacataattgggaaaagccaccttctgtcaaatactacccctgtcccagaaaaggcaagggtagaatcaggcaggctctgaggaagaccagtgagagtctgggtgctccagcctcaccccgacagctcaccttgaacagatgtaacctgtcattttttcacccagtgactgcacctcttctgcccggcgggagcagaagcgggagcagtaccgccaggttcgtgaacacgtgcgcaatgatgacgggaggctgcaggcctgtgggtggagcctgcctgccaagtacaagcaggtacttgagacagggggtggtttctgggtatggagaggatgtgagaaggacacagtggtagtgcagagccaggaggcacccatttcctagctggtgttggtggatctgtgactctgagggttttctagtttgctttctgttgctctgataaaaccctgagcagaccagcctgggtgaagaatgggattatttgacttaacttccaccatcaagggaaactgaagcagaaatcactgaggaatagtatttactggcttgtttttcattgcatatgcaacttgctttcttacacatcccaagatcacctcccacacacatgcctatggaccagtctgatggaggcagttcctcagttgacattccctcttcccagggggttctagcttatgtcaggttggcaaaaactaaccagcacagagggccagcagagccagacccagtgcactgtgtaccagaagcccgcaggcaact

SEQ ID NO: 24521 - DNA, 1135 bp, Mus musculus
aagtcctgtggcacagcacactttacttcataaatgtgtctatagcaaacactcaaaccctcagtcctgctgtacttctaaggaaaaagtactgtggccttgagtcctgactgatctttgtgaagctcactgttttagtgatagtttctaggagatctttaggttttcttcttgtttgcaaatactagccatttgtctactactcacctcaaacattgatcctcagcataagagtccctaagtttcagccttagagtaagtcaggaccaacttattaagccagttttctcctttccagaatcctggccagctatatctgtagggaaaggtaaaaaggtgcttttgaaaattaagaaatagggactggagagatggctcagtgattaagaacactggctgctcttcaagaggaacaaggttcaattcccagcaaccacttggtggctcacaaccacctataatgggatctgatgccctcttctgtcatacatgtgtacatacagatagagtagttatatacataaatctttttaaaaatctgtgcaaaaatttaaaaaaaaaatgccagttgtggtagttcacaccttttatttcagcactgtggagacagaaataggtaggtctctgtgagttcaaggccagcctagactacagagtgtattctaggacagtcagggctacacagagtaaccctatcctggaaaactagatgataataataataataatagtaataataataataacagtaacaactatagaaacatagcttgtaaggctgtgcctaaggggctggagattagctaagatcatgtactgctccttcagaggactgagtggttcccagcccctctatcaggcagctcataactgcctgtaactcaagctgtaactcaagctgcagcaggctctgctgtccagcttcctcaggcccctgcactagtgtacacagcccacccaccccaccccaccccacatactcataatttaaaataatacaaataaatctttaaactgtacttaaactatagtgttgctgttacagctatcattcaatttttttgtttttatgctttagtatttcagtaactaaaacacatttgtcactttatgtggttacctcgagaaatagcta

SEQ ID NO: 24522 - DNA, 2996 bp, Mus musculus
ctactccaacagtgccacaccttctaatagtgtcatccctaggctgagcatacacaccatcacaagggttttgacacaggttgagaaccaccatccaaagtgcttcctgactgattggaccagttggcttcagaactttctggctatgccgcggcactgactttcagttagtgcagcttgctgcacagtgtagtggactatgcacttgcctttcatggacttttgttgatttttatcctacagctgcaacagactccacacccagaggagagcagagtgacaaaggaagctcaaaagaagtagagcatgcaaagataccggagcccacacctacagttgacagtcatgaacccagactggggccacgacctcgctcccacaacaaagtcctgaacccaccaggaggcaaatccagcctctccttctattgagaagctcctgctctgcctgtaactagaccagacagagatagagtattgaatgttagtgtttcctttaactcaaatgagctggggtgggagagggtttgtcatgcgtgtggggttgactgctcataagccttgttgtcatgggcagagctgcacagaggactgccaagacatacattgtggggtaaactgggatgctctggtccctcctctctaactgctctctatgaaacacatctgtaaagttctggggaaggcagaagagctgggccattaacagaagggttccagggtctttcttgtccttgtgttagcaggctgctggctgttgggcatctaagtatggtttggttgaaaaaaaccccacactactctcactgtgggctggaggagacacacacaaacagaaactcttaaagacaaagtggagtctgcactaactaagcctttcaggaaatgcctatcactaaatgcttccccctctgagatacctcagaaccctaatgtctcctctccttctcccattatgtcactctgtagtattgaaacatgactgctctttttggtagcagtcaacagaaagtcaggccgttattctcagtcctgtcctgggtggaagggttttttatacaccaatcttctgagttgtcccatactgcacctaaaatcatggccaggtctgtggtagcagcctgtcttcctctacagctggcttagttcctgatgtgccagatttgcatgtgggttgttccttttgtttgtctcatcagccttaagcataggccttagttctgcacctgtgaggggttctccctgttcatggttcttcctgtacagaaggtctctggcctctgcagggccatatatgtccaggtattgggtggattcctgttctcctgtcttgctttgctcctataattgggaggaaagcctgctgaaggatgttgggttcgttggctgctttaccaatgtatggaaaggtgtttttagtgtcagcttcttataaatacctgtgcattgcttcaacgcttagaaaagtgctactctctacaccaaagcacaagagctgcctttagaaagctttagacttcttgaccctgctcataaacagtgctccttgagccaggatactaagtgttttggcaggaaggtcagaacagtcatttgacagcagaggtagagtcacgtcacttcctgccaggcagatgtccctgttcagcccttgcggggttccttctttcccctctggggtgcatctgtggaaagggattctgagtgctgctgcttctgcttctcccgcccacagagcgcttcacagtaggtgccaaaaatgtcctcagtaaatcttggaaaagtggcaatcctgcattcacacaccgacacactgacctacaagtgcctgcaggagccacctgccgggctctgcatcctacccggtctgttgagggctctgaccatggctttatcaaccaaagagttttcctcttcagatgccctgtatcctgaagccaagtaacaggtcttacatgtatgtaattctctaacaactcaaatggtttgtggttcagtcatcatgagctctattttggaatttagagcatttttttccatttaagaaaatgtcataaatgatgttgactttatttagcccagacactaacttttttagcttataaggaaataatacaatgatagagataaaccttttataactgctctcttaagtagaaaatgatttgtgagttccaaattggattgtctcgaggaatctaacatcactatgctgattctgctcttagccctgtgagagaaaagcttcaagcgccacctgctggcctggatggctgggaggatatggggacctgcaacagtggtccacagcagtggctgccttattcatctcccatccttctatcttctgctacagctggactcagagtgtgaatctgtaaattagtgcccagctaaatccagtaatatacaattgtcacctacattaagcattaaaactttttttaagtgtatctggtgccaatatttttctatcactgtgtcagagcaagaaacctgcccttacattataatactttttttttgttttgttttgttttgttttttttgagacagggtttctctgtgtcgcccgggctgtcctggaattcactctgtagtccaggctggcctcgaactcagaaatccgcctgcctctgcctcccaagtgctaggattaaaggcatgtgcaaccaccacccagcgataatacaattttgataggaacattttgttaattttttatgaggcagaactgggtataatggttgaattaaacttactaaccacatacagcctgtgtgtattttgtgtttgtgcttctccatagtccaattgaggggttgggaaacaatgctgaactttgacccttttttatagcttctctttagtaaagttcacttctcccttccttgatctagaaatgcccaggatttaatatttgaacagaattaattgggaatatgctgtaatctatttagtgttctgtagtcggagtttattctttaggacaagtac

SEQ ID NO: 24523 - DNA, 1076 bp, Mus musculus
tacaaagtgagttccaggacagccaggcgatacagagaaacccagtctcaaaacaccagagagagagagagcgagagagagcgggaaagaaagaaagaaagaaagaaagaaagaaagaaagaaagaaagaaagaaagaaagaaagaaagaaagaaagaaagagaaaagaggagactagacccaaggctgttagacctgaccgcccagaagaagatggtcagaataagatctaaagatgggcgtggaagtcaggtagtcttaacttacccatcaactgctttgtatggtctacaatcttgttaagttctttgtagtgggccaagctcccccatccccacctcctccccccttttcaaaggaacttctatccctttctaagacccttcaagaaatagtaacggttggtggggtaggtttgatacatcctctttccccttcctcctaagaagacagtgacctggcatctgtgactggcacactttacacttccctccctgccttaggctgactgagaacttcacacccattacattgcaatgatagacagccttttagctctttgaatgaaacaaacacattttaggtacttttgtttttaatgaagtctttgagtggtcactgttttacgtagctgttcagtcagtcctaacctccagtcttgcttttatgtggtagtctttgattttaaatatttttctaaatatttgaggtcatgcagtctcagtggttaggcctactgtgagaaggtgaaactaggtgcagtacacacacctttaattcttgtagtgggaggcagagcagagctttctgtgagttggaggctagtcaggtatacatagagttctaggacagccacagcttcttcagctgcgtaggtaaccatagatcagagcagggagggaggcaggatgaatataggccattcaccgatttaaaattcactttcaagtggcctctcttcaaaattcatgtcttattttttagatggtctctggtagcctttactgactttgaattcactctatagtggaggatcagttttggttttagttttgaggcagtctctttacgtaggt

SEQ ID NO: 24524 - DNA, 4149 bp, Mus musculus
ggattccaaaattcctcatagagcagttggctccttccactgacattctgctctgggggtcaagagcctctctctggatggtaagccgtcctcagactaatgtctccttgtcccttctgtcctacaggtggtggattcccagttggtgtgcatgatgaacgagaacagcattgactacatatctcggtttaatgacctggcccaagaattgtccatcactgagcctggccgccgggaggttctttttgatggtggaggaggtggtaatcctgttggtgacctctctcagtgactatgctttgtgacacgggcatcgtggaatccacaaaggaggtctacggagctggtcccatgaatctgtctgcacagtagagaaagtcaagcccagaatcctgagaagacagtgaacaggagcacctctaacagcataacaatatccacatgcaaaggacagcctgtgcaacaagtaggggttgtaccatccacagaagccaggacagctgacccgagaagggtagacctcagaaatccttttggtatcagagcccttgaagtcctgtagcctgtgtggcgtcctgactgtatgtctgtctgtgtgttgagccttccagggggtctcctccttgcaagaggagttcatttgcctggtgttcattttgtctttggagctgttatccatgcgaagggaggccatagccactgctgctttctttctgatatcttttttccacttggctgttctgtctgcagtgatgttgcaagggactgtgagtatagtccagtctattgcctggtggtatcttcaacctaagatacttcctggttgccttgaccatgaagcagagaagggtcccagagccatgtagataatggtatcttcccaagactacttagccctcaactagtgcttcctacccaaaccatccagaggtgtggttctgcctggcatgaggaagggggaagaaattttgtttcttggagcttgtatggatgttttgtatggtctttcaaagctggttgggaatggctttcttgcggtttaagaattgagagatatggacaaggaatagtaagagtcctttatttaggtggctctgctttctacctatgcttaatgcctagttccttctctctctctctctctctctctctctctttctttctttctttcttttttttttttggttttttgaggcagggtttctctgtgtagtcctggctgtcctggaactcactttgtagaccaggctggccttgaactcagaaacccgcctgcctgtgcctcccaagtgctgggattaatgttgtgcgccaccactgcccagcctagttccttctaagtgatctgagataccatttctctctaatggcctgaccctaccccaacccccaaatgcactgcaatgtctacagattttatccacacttaaaatttcatgtgttattgctggtatctgaggggtgtctttgccccaggctatctctcttcctattctgggacccaagccaggtttagatgtcagggtgtaggaagagctcacagcttgatgatgttttagcagccctcttcaggagcccagaggtggtcagtcagttgtcatgctcaggccatcggactcagagtggtgccaaaaatacttccattccccttctttgccctttagtagattcttgtaacatggtcactcttgctggacctagcatatcaggtagccatggctatttcttgttgaacaggtgacccctgtgctagccacgtcactgctcactctccacatgctagccagggctgacacccctcccaccccaccccaccccactccaccccctttcctttttcttctgagacagggtttctctgtataaccctgctatcctataacttgatttatagactgagttggctggagatctacctgcctctacctcctgagtgctgggctgaaagtaatgtgctaccacaccaagcttggcaggtccttgtaactcctaaagctgccacctctgttttccagctgttctagcctccttccttgcacagtagtacttaagatcatcctaggcccttacgtctctctgtctgcaatgaagaaagggatgggaatgtccttttgggacacttgatccagttgcctctctggctactacaaaccctagagtgcaggctctgctccaaagaccgtatagggctctggtactggtgaaggatctgtcccagatgctgacatgcagaccccacatctggtaagagtcagactgttagatgagaagcgcaagcatatggtgccgtcaagagactgtggtaaggtagccaatgtgtctctacccagttgtgtgctttcagcaatgccttacttagctgaaggcatttagatcttgggactgtagcctgtaccaggctaggctcaggccactgctagctgctcttcctgtgtttcaggtagactctcccacaacattaataagcatgggtgcttgtagaatcctggtaactgcgcatgtagaactaggtagttgggctcttaagctggtttccatgaggcagtgaatgctgtaggcacatgttagtctgtgccggctaaaaggagttgagacgtcttgaggagcagagactacagcccttgtctcccagtagcaagcggcatcagatggactggtgcgttactgtaaggaagctgacaagattccagaaggttcttcaccagccatactggtttgctcatcatcgccacattaaaggacaaatggtggcatttgtagcagagaatcagtggatacaacgtctcccagcgtaagcaaatatccatgcataaaacctgaaaactgctaaaggttagagttttttaaaaaacaaaacaaaaacagcaaggcaggctcctgggttctacatcttccttctcttccttccatcagtttggatggttggcgttcactcgggcttcctctcctcattggaacttagtgtgacttacatgcggtcattctttgagaaaatcttttgttaatattaatgtttcttagacatgttgattcatctttttaaaagatggggaacctgtatctttggtgcttggcatggattgtgtcctagagaagatgctcaggcgagctgaagtccatagatcctgtcgggcatagtacttgctcagggagtgggactttgggacatttcatctgttggtcaaccttttttcctaccctcctcttctttttcattccttgtgatagcctctgctaggggaggtgtcattcagttcaatagcatttttaaccaaaccatattattagaaatggtcaaaataagtttagaaggaaattgttttatgtactttaaaaacaaatctcccagatgcattcatgaggaaataccgtactttgtcttaatttaaaaaaaaaaaaaaaacactttaaaaaaggaaagaaacccacagtatacctttcccagaggctagcctggtgtggtcagtccagttttggaagcactgccccagccagacccttattctttcgtaagatcactggctggaggggtgcccccagcaggcagagctcagtgctgtttgctttgataatcgttaagccatatcatctgaggtttccggcttgagatgtgaatttgttttatagactataaatatacagtgtatgtataaagcagaatgcctgtccttctgattattttttgtaccatattgtaaattacattatttattctttaccaattttttgggaataaaaggtgttttggttatttaataaacaagaactgttaaaacttcggctaaaatttccagttcggcttgtaaatgtttttattgtgcataaatacatactaatacttcatctaatgtctgtcttttgtgcctgctttcaaagccagtatgcttagggtattccaacaggcacagtgtaatgagatgagctctaaggcctggaggtgccctggaggtgagggtgagcaaacaggtaggcatcagagattcagcgattgagtgaccgctgaatgcggaattcattacagaattcgctgcttctgttatgggtatgttgtgcgcttccatgaacctttcctcccgaaggtgctgtaaccccaaagaagccttccgctaccaccggccagaaacttcctagtgccatccagcccgggat

SEQ ID NO: 24525 - DNA, 1186 bp, Mus musculus
aagttagcaagtgtctgcagtgttgagtggcttgctatgaccctagctatgtctgtgaaggaaaccttccatagctcattgtgcatggtagagtgtggaaaaaccaggtgatatgcctacgtttgccttcctctcacagggagaggctggttccggcccatccagtcttctttgaccaaagcagctctgtctcgaccgatagtgcccaaggtcctcccatctcaggccaccagtcacctgcccagtaagtgatgcacagtgacagccactatgtgaggttccttagttgcttttttggacatacatctttgtaatattctcttcttctccaaggcataatgtcttactgctttgctaagagtatatcaaattgcttggctcttcactgaagagaggtgtgagggagaacctgtcctaagctctctgggcatacatcatggagtggagtattatggaacagaggtttgatatatcactcctgttgctaggtgccatcgacttagcagctcaaagtgctggcatcatccctggaagtcccttgccaattttagatactgatggctcatctggcatctctccactgtcttcagaacaagcaaccactgccatctcggggcagggtgacactggaccacaccagaacagagaccctgttactgctgtaagggtgagaacatttacaagggctgtttgttgttcccagtagcttctggagtgaggtcatacgtctgggtcacactgaaccctgttgcacctttggaagcctaatggttagagaaaacactgaaccagagataccaaggtttgaacacctaccatggagcacagagtgggaggcagtgaagagacatgtttgctgtgtggttctaaagaagccattgctaaaccatgcatgggggtatagctttgaatttcatcctagtaggctgacatcagcccatgggtccccacttaggaagtactgagtgcttggtatctctgtggaaaacagttcgtatggccttgaccactctttttcatgtatctccaaatgctctgattcctttgcttgttggagtagaggctgggttttgtagaccccatggagctcggagattatgtggtcaggctgttactgaactgtgtagtttcctcttaaaaatcaataaatggttgtaagtgcagagccgacaatctgagagttgtt

SEQ ID NO: 24526 - DNA, 1198 bp, Mus musculus
gtttattattttggtattaggaaaacacgagtttacaaacttgattgttttgtaaagtcccttttcactagaggatacaggtgtgctggagcttctggggtctgtgctaagttccgacgtctacagtgactttggtggtggtgtctcaggaaggcctgcatgtgcactcccaccggtacctcacctgccatgccttgaccactcagttctctctgttcattcagatctgcttttctgtccaagatgcacccacttgagaaaagaggaacaactgcagttgttgatgcctcttaagtttggctgctggggttcctgtaagcacgccagctaactcataagtaactgtacatagtaagggtgctgaagctagagttgagtgggttgggagctgggaaatgatgagagcggttcgtttttgtttgcacaagaagaagaggttccccgttaacctctcccatagatcactggtgcttctggttctgattgctgtccactatgtggctgtagtaaagtaagctatcctagtgcttctaggagggagtgagaatctgtttcctctggcagcttctttggcagtgcctgccttcctgctaagttctctcggtagctgccatccactcgtgtgctgcacaggccattcagatacacctcaccgtgccctggacatccccgggctggccttgcagaaacttgtgctcagtcatcagtcacctctgtccacgaccaggagagatcaggtgtggccacatgcctaagcgcactgtgtcacaaccctcagaaatggctctctggaggagcgcttcttccgcacactggaaatgtccactttggctggccagcataggtcagtaagaagtgaggagtgcctgagtgtgcagctctgacttggaaaaaaccctggtttgcatatgtgaagggagctgacagctgaagcagtggcagtttctctgctggttccatcttctaagtctcattgtgatgggagtttgggaagagtgacttatggagaagagggaggccctccttgtttggttgtctctgcatagctgtgcttttttcctctgaggacagaagagtagatactttgacttgaataaaaatttttctagtatagttctacaatttttttttgtgataaagagagagacggcaggcatttttcatttctataactttgctcttgaatggctgtagaggc

SEQ ID NO: 24527 - DNA, 1205 bp, Mus musculus
tgccaccatgcccagcttgtcagcttctttttattttgtgcctgtgagcagcacatgtctcaggggtggggggtggaggtgttatgtagttcacctgaataagaaactttaagatattatttttattctatttatgtgtttgcctgcatgtatgtatgtaccacatgcatgactggtacctgcaaattccaagagatctccttggagttggcattatagatggtgagtgctatcattgtaggtgcttggaatcaagcctgggtcttctgcgagagcatcaagtgctcttaaccaaccactcatcacttctccagctcttgaacaggaaatcttgtattccttgtagataataaagtcctctcttaggtggactgtcccctgcagactacaggccttctgtggttctaactggactttttttttttttaatggttttagagctttattgtagaaaggcaggaagaaagagagaagatagaaagagggagagaggctgaccatggccatgtgaagagagggaggaagggagggagagaaggagagctagagatgagagtaagaaaggtgagagcgggctggagagatggctcagtggttaagagcaccaactgctcttccgaaggccctgagttcaaatcccattaaccatatggtggctcacaaccatctgtaatgagatctgatgtcctcttctgtggatctgaagacagctacagtgtacttagatataataataaataaatctaaaaaagaaagaaagaaagaaagaaagagagagagagagagagagagagagagagagagagagagaaagaaagaaagaaagaaagaaagaaaggaaggaagaaaggaagaaaggaagaaaggtgagagcttaaaaaacctaactggacttcttagtcatggtgttggtgactatgaatctgccagaaggtgctggtgaggggtgaggccagctaatgttgacgcccttggcccaggtcttagcctgctaggatgtattggacattggcattgatggcctgaaagaatataaggaacacacttgggctatatcttgctactcgttgatttctttctcagcatgacttccatgctctgttggaaggcttagccctgtgtcagatacttgagggattagcaggattgtgtgagagatgctcacttcaatgcctgtacttagaggtgaccgtggaatagcagcc

SEQ ID NO: 24528 - DNA, 1180 bp, Mus musculus
ggactactatgggctgggccattacctaacaatcactaattagggaaattgcttgcaggcggcatgatcctatgaaggcattttcttaattgaggctcccgccccttccgatgattttagcttatgtcaagctgacataaaactatatagtataaccttacatcaaccaagatccactgggacttggccagctaaaagatgtagccactgttgttcccaacaacgatggtttggagcttactggttgccctcgccttcccggaccatccagccacagaccacagaggaagcccaaggacacctgggcagttcagccgacagtgcccaatgacatctggatacgctacatctttttgacgttgctggggcccagtactgacttggactaatttgaaccagttccagcagggaggagtcaagaaatgttaggtttgagcaacttgtcccaccagaccctgacactgagttgtggatgggggcatgcagtagtagttcctgagagtgttaagaggcctccagatactgccagtgacattgaggagtcattgggcctggctcagcctaaaggccatacctgaactcttggaggagaaagggggcaaatgacagagagatgtaggagaatctgtctgggtttgtccatctaggcctctccctgcccaggccagatcatctgggtcctcatcccaggacaccctctaaggaatcctgtctctggaagggactggtcccagagctgagatgggggaggagggtgcctccaaacccaggtcctgcagagggtgatgagcatgtatgaaccccattgcacagtgtgtgtcctttgtctccacttggcctttgaccatagcaatgaccattaaggaaaacaggccctgccacactacccctcactggacagatgtcaagagcttgtgttccccagcagaccctccgaagtctcccagatggactcagaccaaccgcatagtatgccttgtgttgctcttggccacgccctgtccagggcctgctgcttctgccgcccctccagcttggtcctacaaaaatgagcatgtgagacagcggctcttaccccttggtgggagaatgcttacctagcatgcacaaggccccggattcagtctccacacctgcttaaaaccaggaatggtggcacttgcctgtaattccagcattt

SEQ ID NO: 24529 - DNA, 1335 bp, Mus musculus
tgcccaggccccatgcagctccatcttcatctggttctttgtaaataggactgtgtacagggatgtgttctgttctccccacctggatctttgggccttaaggtaccaggcagcgttgagagcctcatgaagttggaatccgcatccagccttcgtaaacccagaaaggtgaaagactggctgatccagaccaaggctgaggccaggtgagagccaaggacaaactggcctgcattgatctccctgcctgttagctgtacagtgggccctgctgtggcctgaatgctagcttcaggccttttggtgccctgcccttgtacctggaagaggcagctctgccaccggcccgggcaaactcgggtcctctagagcacctgagcacacagctcctacacctcctgacctgcattcaactctgccctacggcccaggagaccagcctgctgtggcctcggcacaggatgacctcaggtactactgtccacatactccgcttgctggagctgggctgggtgaagctgctcttggcagtggcccacctgggctgggctgggtctgtgatcttagggcttacagaacacagggaggtgcagtggacataggcgcagtgatcagtctccatcagacttgttcctgaggcccctggaagacccctgacatgggaaccaggcaccagtggctcaagttcagggaccaatcaaggggtggccaggtctgcagccaggagtcttcactctggaattggaggggcttgtgctcacacagctggtggcacctggatgggctgggttgccagtgccttgtgggcacgtttagccgccagtacagtcgggagccgagcttggatgaacagtttgcagcacaaggcctcacctggggagcttaggctggtgtgtgtgtgtagcctgctctcagaatgtcttattttgtaacaactgactacatttagtaataggtacacatgtatatggttaatatatggaaattcaatatattttatagttaaagtattctaaagtaactgatgtttctagcaaactgtagtgaccccagctatgaagtgttccttttgtaccacagtccttggattaccagagatgtgaatcttgtaacataagaatgtggtctgtgaccatcctgtgttaagagggtggggtggagggtatcccagcatgaagcctcattggtaaggaattgtgggcaacagattaaccactgtatctacaaatgctctaattaaaacatttccacaaactgcagccctcgggttgtgtcctctgcttcctcctccctgcctcctagtttctcagtcctagtaggggttctccggtaccc

SEQ ID NO: 24530 - DNA, 1189 bp, Mus musculus
tccctccccagagcagcagtagttgtaagtctccatacgagccccgatcctctggaagaacagttagtgttcctaacctctaagccctttatccaaccccacctcacccctgttttgttgtttgttaaacaagatatcactaagatgcctaggctggccttccattcataatcttcttgcttagcctacagagtagttggtataggtgtgtagttgatgctgctgctcagctcatttgtttgtagtactgggaactcagccaaaacctgatgtataccagggaagtgtgctgccgcagagctgccccccgcccccccagaccccttcatttactaaaaaacaagctgcctttagacttgtacttttgggggtgtacaggtttgaaaataaagcgaaagaaggttgcctagatcaaagtgaggcaccttctcaagtatcagctatagaatagtacctgagtttggagtagatttttctactattgtagagaaatgtggtgtacttgaagcctgtgtacactgaaaaggtctttggggcatgcattctagcctctttcctcttcctatgaacatgagaagagcataggcttagtccctctggctcctgaccatggtgtcttctggctgctttgtctaggctcagctcctcaggaaggaaaggcgtactctcctctttctggaccctctgctattgagtttctgagtttgtatcttttaaaagagctctagtgtcaggaagaccggtcagggccagcacaggatggggacagcatctgcctccaaaagtattccttcccctccctgtcctccaggtaaatttgagcccccactgtttcatccaaacgtgtatccttctggcacagtgtgcctgtccatcctggaggaagacaaggactggaggccagctatcaccatcaaacaggtatggagtagcacctgactgccctcttaggggtttgtcctggtcacagtagccaacagtgtttttcacaagccctctcaatgtaagctgattggtttgctttggtttttggagacagggtttctctgtgtagccctggctgtcctggaactcactctgtagatcaggctggcctcgaactcagaaatccgcccgcctctgcctcccaagtgctgggattaaaggcgtgcaccaccatgcccggcgagctgattgtttttgtttctct

SEQ ID NO: 24531 - DNA, 2314 bp, Mus musculus
tgcccttgtccagcacatgtaagagggatggtctcctataacttcaggcattcaccaaacccagacctctaggtcagcttagtgtctgagcaaaaacatagtttgggttcatctatacaaggctcagttgcagagtatgcagtaatggtggtgtagggcagttagagaagaagcccaaaggacccaggtttcaggaaacttctcctgggcttaccttggcaagtgagccactggtctaaccttggttccctccccacagactccatgggaaggaggcttgttcaagctacggatgcttttcaaagatgactatccgtcctcaccaccaaaatgtaagttgtgcaaagagcctgcagtccacttcccagcactaccaccaccctttgggagccatgtctgtgagtgcttggcctagtaggcaggtgccagtgctgggatagtcggtcctggtgagttgtcttggatgacaagtcccagggtagatgcgcatgtaattagtgtggtctctaatcccagcctattaggatgtaccacacatggcagagggagagttgtgtcaggctgaagcttctgggtgcttttgtgcccacaggagaactcgagtctgtaagttcccatagattacgtgagtggttagcatatatcagctgagttccattcagagcactaaaggagagaggagactcttactcatccccatctgctgtgttctgtgggatgctcatggccttcagaccatggggtcagaagagaaggctggactgatctctgttcagctcagcagaacttgcttgggggtacagtgcccaccaccaccattctgcccaggataagtaaggccaggtctgagctggtttataaatagatgttacctgatgcagagttccccaggagtactaaaacatagtttattgggaaccactagatggagtcttgcctgttctgtttgggatttccttgtctgcctgagttcttttgttagttttttcttttaaggggtatgtagctaggattgaggtagacagagttgttggtctctttcctttcgtgtggtgctggaatcctgagcaaatacaatgagacaagtctctcaaaactggctaggaaaaccaagaagcatgcttaggaggaaaaaggtgaacgtgaagaaatggagcatagcctgcagacgtttggaactgagctgttgtagtggtaccaaatgccatgggagagaggtcttgtactcggtgttggccttggggattggctataattgtgaccctggagttaagtcagtcttagaagacaccagctagggatgcaacggagcagagtacacgtttgtcaggctcttctgggttatcgagaaggagacctgaggcagccaagggctgggcagcagaagctcttggcccttgctgggttatgtgaaggctgtttctctggaagatctctgctgtcaccagtaaagctgacctgccactgttctgtagaactaccagtagaaatgctcacacatgttcacaaagacaggaacaccacggaagccaggttggtaagaatcagaagtcaaagagttggtgcaggtgtgtattagtagcagcctgggaaataattgagattaaagggaagcaagatggagcatctaaacccccagacagcaaaatggtgggttccttaatgtctgatccatgcagctcaaagcagcttctattgctgagtgaggctaaaaacagggaggggctcatgggccagctgagattcatgcaaggtatggctggtagaagtaaacatggttggcaaggaagagtaaacttgtgtttgcaaagtacaagttaaaggacacaaagaagagcccagaattggaaagatgcctgctggagcagacttgtgttgagaatcactgatgagtaagggacccagagataaggtgagctttaaagcagaagtgttggctctgggttagaatactagctgctcctctagtggaccaaggttggattctaacatcccatgacagttccactacaactcccgtcctaggggatttgacacccttttctggcttccatgagcgctacacatacatgatccacaaacatatatatctacacatattaaacatatatatctacacatattaaaaacagggaaaaaattggggttggggtgaaacaggttttcctgtgtagccttggctgtcctggaagttcctccacataccagactggcctcaaactcagagatctgcctgcctctgcttaccaggtgctgggatcagaggtgtgtgcaatcactcttcagtgggttttaaaaaaaaaaaattaaggtg

SEQ ID NO: 24532 - DNA, 1202 bp, Mus musculus
gcaatggaagcaagcaagagctaaggctggaagggcgccgcctagtggacagcgggcgccagaacatcgacttcagcaatgtggacatctccgagctcagcagcgaggttatcagtaacatggataccttcgatgtccatgaatttgaccagtacttgcccctcaatggccactcagccctgcccacagagcccagccaggccactgcctctggctcctatggaggcgcttcctactcgcactccggggcaaccggcataggggcatcccctgtgtgggcccacaagggagctccctcggcttcagcttcgcccacagaggcaggaccccttcggccacagatcaagacggagcagctgagtcctagccactacaacgaccagtcacatggctcacctggccgtgctgactatggctcttacagtgcccaggccagcgtcaccacagctgcctctgccacggctgccagctccttcgccagcgcacagtgtgattacactgacctgcaggcttccaactactacagcccctaccctggctaccctcccagcctctaccaatacccttacttccattcatcccgtcggccctatgcctcgccactgctcaatgggctctctatgccacccgcacacagccccagcagcaactgggaccagcctgtgtacaccaccctgacccgaccctgaggctgctgcatccaggaagtctagccagatctttgagttcttccggagtgtactcggtagaggttggaggcagccagcacggccttactccgtcaagtgcctgctgaatgtgcaggaagccaggctttgtcatcctgtgtccctttgcttctggatatccaaacttctgccaggggacagagctctcttttccccctcttctttctctgaggtgactggtggtttccaaaacaggcattccgttgctctccggtttggataagtgtacaccagctcccgagttttgcatctcagtagataagaagatagttatgcctaaggacaaaggagagaatgggcttcatgtccttatcagcctacccaagacctccctgggaccaatggatgctgttcccacggtgaaagcatgaaaggacatctgtggatgctcgaggatacatccaacccggggactctcttgggaccaatgtgagattgaggggtttctcattaccaccgttcttcccagcaagg

SEQ ID NO: 24533 - DNA, 1196 bp, Mus musculus
tagagggttaagggtggttcatccaggtcacactgatttgggatcctgctgccgaggttgctgctgagacatcctgagtcaagtcttgctcccctttctctatagatggtcattctgtggaacccctctgcaaggaaggaagggctgccactcccagtggttgtatagcacggggggaggttcattttattctctcagatgatcacccagcatccctgtgctcttttctgtgcctcatgtctgtgattttccccactggtccccgtgccctaaatggcccatcctggaggtttctctgatggtgctcccacctagtgctgctgggtgctccaggcacacacatttgtcctgtgccagccatggattcctcctgtggagtcacctgcagacatggtatgggatgtgtctgctgtctagccagttggtggacagagctaggaaatatgaggttaacaaccccacacaaaggagaggaatgaaatacgggtggcagctgagggaatgctcctgctgtgtgccccttgctttgtcctcagggcagccgtggtgagaggggacaggctgtgtcatcaggcaaggactgggaggaagctgacctggggatgatctgtcaacactcagatctggggtgaggctctaggggacttgtatgttcatcgtcagtactgtagacttgaacctacactgtcacatcatgtctgccagatggttagttttagcttctctttgtacatttgtgcagaagccgagcaggaaatgcatcagagaaatggcctgcaaaccagtagtatctgataaacacaagtggaaggcagatagtgtgtcacactgaacacaggtgaaagagcttgacgcaaatggttctctcttctgccagggcattttgaagcacaaactacaaaagctactagagaagcccagtgggcaggggctagggtgatagccccattggtagaatgctttatctttcaagcatgaggacctaatctgatcccggaccccatgtaaaaaggcggccatggtggaactcatttgtaatccagccagcttaatgtacttgtcaaaccccaggtctcggtgagagaatatctcagaaaatagaagatggctgtgagctgaggaatgatacccaaagctgatctctggcccccacgccatgtgtgcacatggacacgcacagatacacaaacacagag

SEQ ID NO: 24534 - DNA, 1972 bp, Mus musculus
ctgtccctaccattacgtggaagtaatggcctgcccttcaggtagctcctcctagtaccgcaggctctgcttgctgggataatacagcacctttccaccagtgggaggtggaaggggtaggacaggaagagggcatgtccccctctccacacccagggggtcagagggctaaccctgacatcctgtcaaccatgcccctgccccaccacaggttgcttgaatggagggggccagctcaaggctccggatacagagggcagcgagctccttcagcagctggaaagactgtacagcatggtgaggactgaggcgcccgaagatgcaccgggggtccaggagctgtaccagcactggctgcaaggagaggactcagagcgggccagccgcctgctgcacacacaataccatgccgtggagaagcccagctcaggcctgagcatcaggtggtaggaggccttgagtctgtgagacccccggggccagcaccaagactcacggaaagactagactgtgtgggtatctgaaacaaagcccacaggatacgcccgagaccctcaattcaaggagagctccaaggatgtgttggactctgtgctccagtggggcactggctgcacgtgggtccttggagatgcgtgacccatgtctctggctggtaatgttgcctgcagcccacataaagtgcaggcaggatcagaagtagccaagtaggttcactgaggttccagactcttccactggcctggggccatggacatcttgtgagccctgccctctggctgtagttgtctgagtgtgaggggtttcatttctatggctaatccccaaagctgtaacacatagggcaggtacctactgaggcacccaggcttctaaaaactgttctcaggaccttgggctctgggcagtctgtcagtaccaagcctttatgcctatgagaactccatagctgggtctcaccactaataaacagacctgcacctctggaaggatccactgtgtgtctggtaccacactgggcctttcaaagttttattcaccctcctcagtccccaggatatgtctctggacccacaagagctcctacagatcccacttatagggctccatgagcagtagagacaagacaccacttgctggttcttcaaagcagggtggcaggggtccctgggggagtgtggggacaagccggttccccacatagttcactttttctggtgtgtgctcagaagcccccactgtaaggccaggagtgcccgaacctgcggctgtggtggctccacagcaggctggaagcgcgctcgctccctgcagagggcctccaggacctgggctggggccacctggcctgtgaacgcacggactgcatcctctctgcagggaagaatatgctggggaattgtggggctggccagctgcccatgggggtggggcccagcagggcggtggatggaaggagggcccttaataaatgaccttctctggtgccagggacattcagctcaataaatagtccctagataccctcctaactactcaaatgactgccaaagaggccctgaggaggccaggctagtcctgagactgctccatggggagacttgtcactggcagtgcacacagcctcgtgaggttgccctacccactgatagggcccaggccccaccacaggaagacccaggacacagatgtactcacgtcaccctcaggaaagggttgtacatgagctcctcgcccagcgtcgaaggcacagtaggaatatcctcgtcatccctctcctgcaaagcacagaagaaccaacggccacggggaggttacggcacagcagggcaacccccaggcccagccagctgaagtcagcagaagcctcattctgactccccagagattccctttctaactgaccccaaacttcaggaaggctacttccgtcccccccccttccccctctcccacccaactggcaatggat

SEQ ID NO: 24535 - DNA, 1147 bp, Mus musculus
cgaagcgttgactgagctacgcgagaagcggctgggcttgctggagatagtgcaagcggcggcaggctcgggattggccgtctatactatatgggcgctgctgctgcagccgggcttccgccgggtgcctctgaggctgcaggtgcagcgttgaaccttggaaggaaaggggccaatactggtgcaagccaaggttccatgggtggggtcaaggctactgtaggtagcgtaaagatgggcggaatcaattatggcgcgggacctaacccgggaacccgatgtacggagagttgggaccaggaagttgcggagcctgggtctttcgtcaagaccaagtctaaatgaatgaagctgggattgagttacttagggggtacgggcctatgactggagagtgggcggggctcactggatggtatcaatttaagaaaggaaatctagtaggctcccatcggcccccaaactggtgcttctgcctgtgtgatttctagcctcagcccaccaaattccttattcaggtgccctacgttggcgcgagtgcccggcaggttgagaacgtgctgtcactgttgcgaggccgccctggaaaaatggtggatctaggctctggtgatggcaggatcgtaagacctgtgtctatatattcgttgtccctctggtggtggccccattcccttcatccagatcccacactcttggctcccataggtgctggcggcccaccaatgtggtctccgtccagctatgggatatgagctgaacccgtggcttgtgggacttgcacggctgcatgcctggagagccggttgttctgcgagtgtctgctaccatcgaaaagatctctggaaggtaccctaccaaacttgatacccctccctccccctcccactctctttctttccaaacttgattttctttaccctccctcttcctttcattttttttttttttttgagatgtgtgtccaggcttatctcaaactagccttggattataggcatcagacctagtttatgcagaactggagattaaacccagggatatgtgtatgctaggcaagcactctgccacctgaggcacacctccagctcctgatatctttatctcccaagtttcatgctctgagtggctattatgtggatatctg

SEQ ID NO: 24536 - DNA, 1169 bp, Mus musculus
aaggggatggagggattggtcccccaggacttaggggcctggaagagcccccaagggcctcccacatcttccactgcaccgcgcctggagccctccaaagggtatgaggcgccacaggccactgccaaagccatggccccctgaggagcccaactccccatgcccacctgacctagtggcttcccttcttccttgttgccatataggtcagttcttgtcctctgtatcctgcgcccctacccccgtatctccttctttccccctggcctacagatccttgggccctggccaggttgggacagctttaggaggacgcagaccttggaacaatcaacattagcctaaccggtgcccatccacctaagtgcaagggtggaataggcacctggcagaccccaatctggagccacccacagggctatcaggccttgggatcagcccacccatttgagcccctaccccagctgagctcaggcctctcagcactgtgcttctccctggataggtctcctcaggtggaatctgcagagggcctggccatgagtcagggtcagtactgaccagcgattctgatctcccagtggccagcacccccttcacaccccagggaaggagggctccttcccagtcctcctttagttctcccagcttccaaaacctttgcctgcccaaagggtttgtgaccatgttctgtcaggtctcaagaaatttggaagtcctaggggatcctggcatataggtgacaataccgaggaagggactgggaaccttccctcccaaccttgaaccccaggagacacagcacccacaactaatcttgggacacccctatctggttggaagagagtaaactaattcccagagagccagagggagagagagagagagagagagagagagagagagagagagagagagagaggagagagagagatgctgttgacgaaaagtaaagattcaacagcccaaagagttccctgcccctgcagtgttggccagggaggccccaggctgaagtggtcaggagccagatttgtcagcccctcttcccacagtcccccaacagggagggggaagctgtccatttgcccaaagtattaatgcaactgaagctgtgatatttccaatgactgtaggaggaaaatttaaggggagagaggaacacaaac

SEQ ID NO: 24537 - DNA, 1193 bp, Mus musculus
acacatagtgaccttacactcctgcctccagcgctggttcctctaccctcctgagaagacacctgagttccaccctaacaagaccacattggcctggctgctggaaatatacccatctctagccctgtcagcacggcctctagaatgtaccatccaggctggtgaagtcagtagctggtaggtgggggttgggctaactcaaaaagccatgaatcaaaattttttttttcttttctcccaggtactgtattttcctgatcggtggtggcatgccacactcaatctggacaccagtgtcttcatttctaccttccttggctagccagacaggcaactggcaagcccactgcaccagcacatgccaatgtagtgctcacagactttattacaggacagtggcagcagcagcaacctcagcccaccctcacccactctccagcccagaagggggacaagggaggctcatggtccagcaaggggtatgctgagaaggggagcagttcagaacccatcagcagggccgatgggggcaggcccagggacacaaactatacagggactggagcttccgtctccagatcctcctgggccagggtgccaggcaggacatggggcctcaatagtcctctacccagccgttctcagagatgaaagcgtcaatgacttccttcatggccaagttggggatgagctgttcctgggtcagagggctccgggtcacagggtcaaagtggcccacacgctgcaacagagtcaagagtgttcaatggcctgagtataccgatccgggtaccaaggctctccatggcccggtctccatgggccctccttacctgcaggtgctcctcaatgtccttgcggtcataggtgataccactgggtgtaatgcagggttcccgcatcagctcaaagctaatcttgccacacaagtagtcagggatatctcgcttctatagcacaaggggaaaatgtctagaactggagggggctgtgggggtcaccataccagcagcagccgatgagcttccgggggtcctcacctttcttttctcgtccacctgagagaagagctcatccatatctgccatgtatttatcctgcagagttgagtgccatgtgtgggcaactcctgtctccacacagacacacacactctgtccaccagggcactcatgtcatgcatgggccaacag

SEQ ID NO: 24538 - DNA, 1234 bp, Mus musculus
gaatgtttcttttttcctggcagcgttattacatggatgggcagaccccctgcctctttattgcctccaaagctgatctccctgaaggtgttgcccccccagggctgtcacccgctgagttctgccggaggcaccggctgcctgccccagcttcattctcctgcttgggacccgcaatgcccagcacagatgtctttacccaacttgctaccatggccactttcccgtgagtataccgcagcctcaatgtgggtggggcttagtctgtctgggtacaaaggtgtcagagctgtagacccgtggcctgtggcccagagagctatgctggatggcctctggcttggcctccgcctgcctgggacgggttttcagcagtgagcttttcgcaagcacacgtcttgagtattattctttccacagacacctggtgcacacagagctgcaccccacctccttctggctccgaggagtgctggtggctgtcggcacggctgtggctgctgtccttagcttctcactatacagggtcctagtgaagagccgatgacaaaggacccatgagcctctcctgcccccaggcacagcacactgtggtgccttatgtgggcccacacggcaaagaagtatgggctttcggcctgttggagtaatatctgtgtggctggctacagggtccctgggactgatgtgggttcctgctcaggaacttggtatttagatcttggcttccaaaagtctgttgccctattccaggcctgtcctgctgagcctgagagtactggtgccaggtgtgaggccttagccttggagggagggaggattgtgtgtaaggggctgggctgtgggtaaggaatccagtgaccaggacccgaagttctcagggtgtgttccccccccttcctggttgtgcatggccagtggacatgtagagggcaagaggtagtggtcaaatcagggagggacccgatagtcacagaggtcccacctttttgtcaggtgtggagccttatccacactgcgccagctgcagagcaagcggaactgactttcctgattaaatttcacttgtcttttccatctcttggattttgatctctcaatgcaacttactttctctctttctctccctcccttccttccttcctttcttccttcttcctttcttctttctttctttctttctttctttctttctttctttctttctttcaaaaatatgcttatttttatgagt

SEQ ID NO: 24539 - DNA, 1103 bp, Mus musculus
cagaagcaggtttgtgcgatcactgctctgtaggtggacatccagggctgtgtcatagggttagaaggccatggagcctgggctttgtccctggcaggagacctcagtgtcatattgttttcctacaggtgatacagaagacacctctgcccttctttgccatgtctttgagcctgtccccaggatctcagctcatggtggttggttttgctggtgagtgctggtcgacacacatagagagggcagctttgacagtcctcagccatagcaggtttgggggcgtagatgtcatggccctgctcccctcagcaaggttcccagcaaggtgtcagtactcagagcaccctgtcatctacccacagagtgcatgatgaggctcctagactgtgcgtcagggactgcccaggacttggaaggccatgatgactcggtccacctgtgtaggttcactccatctggcagactgctcttcacagctgctcacaacgagatcctggtgtgggaagtcaccgatccctgagctattgctaggaacataggcagaaaagccagactgtggattgctgtatgccgagccaggatggctgggacaggcttcagaactgcattgtttggaatttgggtgaaatctgaaaagattcaaggaggctgagggtgtggcagtgacttagaatctgtgaagtgtggttttgaccctcagaaccactccctcctacacaaaacttggcatactgggttgtttttcacatgaaggttgttttattgtttttattttgtacagtttaaggaaataaacactggcatttattatagcgatacattgttttattgtcccataaattgtgtctttgcatcacttctggcctgagctcaccctttcctcccgaggagcccgttgagtctgagttgtttgcaccacctgcagagtcaggaacactctactggcaggcgggcgcgggcgccttgccttagcccaaccactagctggtgctgtgtgggcgggaccggaagcttgggtgagggcggtactgaagacaggaagtgcgggggcctgagcgggttgaaggagagggttggggttgggattgggtctacttgggccg

SEQ ID NO: 24540 - DNA, 1103 bp, Mus musculus; identical to SEQ ID NO: 24539

SEQ ID NO: 24541 - DNA, 1172 bp, Mus musculus
ctaggttctgtcagtgtttcccggggttttccacgccctacctatgacgggttcatccctaagtctaggagcagtatgtacctcacacggaggtggttgggtcaagtgggcttgggcagaagacagttgttcccgtgtgggcagcctggcttggagatctgagtgggaaaggcccagatgggcatcccctcaactgtcctggggtcccacaggtaaacgaggtggtcttcagccccggtgagtctcactgtgccacctgtggtgaggatgggagcgtgagggtgtggtctttggccagcatggagctggtgatccagtttcaggtgctgaaccaggtaggttgggagatctggtggggggggggagggtgtcggtcatgtgctcggctccctctgtcctcttccttcctggggccatgctgatttctcctccatgcaacactagagctgtctctgccttgcgtggacgcccccgtcctgtgaactcccagagcagcagcaggtggtggccggctacagcgatggcacacttcgagtcttcagtatctctcgtacagcaatggaactcaagatgcacccccaccggaccgctctgacagccatcgccttctccaccgacggtgagcagacgcggccacagagtcacgtgcccacctcagctagcctgcaccacacttccaggttgtgggttgggctcacataatggcatcatagtctccatctgccacaggtcagaccatcctatctggagataaggacggacttgtggctataagccacccctgcacaggaatgaccttccgtgtgctcagtgaccaccggggtgctccaatttctgctatccagagcacgagcaaagaagtaaggcaagctcaggtgatggtggggaggggtttggggtgctgtgggcaggcagcagattctcacatccctcatttctcccagtatggagacctaggggtagagggtgtagaactgtggctggctgcaagtggggaccaacgtgtcagcatctgggtctctgactggctccgggaccgctgtgaactcctggaatggttgagctttcctgcacctgctgtctcagaggtaagagttccacggtcatgtgggtggggattggagtctgcacaacccagcacaacatactgctttccacaggctccaggcctc

SEQ ID NO: 24542 - DNA, 1071 bp, Mus musculus
gttcaggctctagactgatcagtgggagcaacacaaaaaggctgcgcctttgggctgtgggggttgtgccagagctaaggcgcaaaggctccagtgccaggtgagctgccgtaggcctctggcctgcatcatccccctggggtttggctataaagtctcaagtccttgacagatcctgcaagccagcactggtatagcacagctcttagtctcgggctaccctacatatctgtcttagttgggctcctctttatgggtgcactcaggcatagatagcacgggccttgcacactgcagaccgaggataaagaagcttaaaatctctgacctgtcgggtcggttcctttacccacgggagcacaggaccagactgatagctgccagtttccctgtcacctggcagactccgctggcttgtgtctccagcctcaagactcctttccctgttctcttagatccagttctgttttcatggagcgtgagctgaccctggatggggctgttgtgagtgccagttttgacagtggcatggacatgggtgtagtgggtaccacagctggcaccatctggtacatcagctggacagagggcactagcacccgcctcatcagtggccacaggaccaaggtgagctctctgggctgtgaaggaagacaggattgccagcccaggtagggtaggctagggcagcaagcccatttactgcctcgatctcttccaccacagtcatcgtgtcttcagctcatgagtaacactcggagactcaaaagactgtagtcttttctttttgtaacttattaaagaacccacatcacctgcttagcccttcccataggctggctctgctgacatcgtcaggatcctagtgtggaatcctggcggtcccgccaggttctgattgtatctgctcatacgcagttggaactggtctgggtatttcagatgtggtcaggtctaggcaggcctgccatttgataggactatctggatttattcatgcctgattgtcatgtgatagatcttgcctatggccttgtatgggcttccttcattgtccatcagatttctagg

SEQ ID NO: 24543 - DNA, 1183 bp, Mus musculus
atctgatgccctcttctggggtgtctgaagacagctacagtatacttacatataataaatacatctttaaaaaaaaatttatgtagccaggtggtggcagcactttgatcccaacatttggaggcagaggcaggcagataactgtttgaggccaacctggtctacagagttccaggacagccaaagctacacactgaacccgaggccctttgtaaaaggaaccaagttctttatactgctgagccatctctccagtcccataaagatttgtttattttatatgtatatgtatccttactgcctgtgtgcagaagcccacagagatcagaaagggcatcagatgcttcgaacaggagtcacaggcagctgtgagccaccgtgtgggagcttggggcagaacgtgagtcttcgccaagagtactaagctgccttttctgccgccatttttccagccctggtgatgtctttagaccttctatgagtgtgggtctctctgatccagaccagatgtgttggaattgggtgtgatgtgggaagtctgctctagcatatgctatgcagtgggcctctaggaaagacctcagttagaaaggagtggtgtttctcttctttctgggtactctctaggcccttctgggcgtggtctttgagtctttgatcttttgctaccaagatcaccagtcttttatggtgaagaggctttagttgatttctgcacatatgcctctgtgtgtgtgtgtgtgtgtgtgtgtgtgtgtgtgtgtgtgtgtgtgtgtgtgtgtgatgtgtgtgtgtgatgtgtctttgggtggccaaatgcctgtgtgtgctgtgtgcatacatgtgtgtgtcagactccccttctaagcaaccaagagggacctggctgggtttctgtggtgactttggtcctggccctcctatgctaggccctgtggaccaaagatggtgtggctgttgtttacccctgccatgcagtcataattgtcctgcagattgacactggacagcagaggtttttccttggccataccgacaaggtacatgcctgctgggcctggagagggagaggtgaacctgcaggccatattacattcccttgcttattctacatctccaggtctctgccctggcgctcaatggcagtgatacgctgctagcctcagctcaggtgcagcctccc

SEQ ID NO: 24544 - DNA, 1545 bp, Mus musculus
gggtgttgctcagaggccactggggaacagtgtatttcagatgcttctagcagcaggcttggctccggcttccatatctgacaaaggtgatcagtatgctgggcataggcaaggtttcagctcctaagacctaggagaagagccgttgatgcacctgggaaaccccactaatccctcctattgtgccctggccctttcagtgatgtttactatacacatctccagccggggctacagagcttctggcgggctccgtgcatctgggcatgggcacagggcctaggaccccagtgtctagcagcttgtactcatcaacctcggctgtgtttcatagctgcgacttgcctcttgtggcccttctgcctttaagttcatgtcactagaatctctttgacctgtttcttagtgacactctctggaacaccaagcccctccttagggactcactggcctgagcaacttgtgaagccatggactgttcccccacaatgctcctcctctcccagtctgggctgggcagccttctcccctgtggggatgctgtccccagtggatgtcctgtgtgactgcttccctgtccttgcctggtgacacagccctcaggcacgctggtgcttaactctacctcctgccctcagggccctggccataacaggagccatgacccctgactggggacctctaagtgcacgtttcctaagatcatcttaccatggatgttactagggcactggtagacgctgcgccagcctgctgttctgggagattgagtcaatgcctgtagggagggacggggctatggttgtgggaactgcctgataagcagcagcctgacctgggagcctgacccagaggctgggtacaatcaagcatcacctttccccaccagtcctgttgctgttgacagagaccttttctctggaatcgcgatagaatggtatagactttgaggacctggattggcctgcgtgcacaccatcaacactacacttgctgctgtggactccactattcctggttctttgttcttacttctttgtacagtaaatgtacttcagcagtgagcttgtgtctggcttcatctgactgtggtttgttgggggtggtaaggggtgtctggcggtgtgttctgccacatgctccagcatggctttgtgcctgacagaatgatcccaggctttgttaactttccccgcagctgaccctgctgacctgcagccatccatccactgggttcacattcccagccacaaagtagccaggcctggttacaagccacactgtttccggaggtcagatcttggccaggttagacagagcctttactcatacatagcccagggcacatagcttaccacaacatgaaggatatctgtgagtgggacctggcgttggtgcctttagcaggaaagcatctagcaggtcatggcctctgcaggccatgctcacccagggttctagctcatacactggaaggcaaatcccactgagtgggattggacagttcactttagagtggcctctggctcaggtgtcacctgcatt

SEQ ID NO: 24545 - DNA, 1906 bp, Mus musculus
tctgtatatccctggctgtcctggaactcactttgtagaccaggctggcctcgaactcagaaatccgcctgcctctgcctctcgagtgctgggattaaaggcgtgcgccaccatgcccggcaggactttattattaattaattttaactaatcttattatgaaatctatgtgatccagagctcagggattggccactcctggacaaaatgtagccaggaaaaaaaagaaaagaaaaagatacaggtactacctctgggatcctttggagagtcagaatgagctgagaagttctgttggaaggccttagggtggttctgccttccaggactcaggagcctccaccctacacacccttgaccaagagaatagcaggaaaacctgtccctgaaggcaggtgaggagagctctgatgccatttctcaggcaccatcccctcacaaatatttcctgaatattgtgtcaaaccaagtggcagtgttcacagggccaagacgctcagtaaaggctctgtcttcagcttaggagggaggtagtcacttagtgtggggctgctggaatgaaggaagggtacctgctgctggagaggaggcctggatctaacagtcccttggagaaaacaccccttgtaggtttttttcttaattctttctttcttggagactgggcctctgtaggcccagtcttgaacttgcatcagaatcccaagtgtgctgggattagaggtgtgagccaccatacctggctggttgtgtgtgtgtgtatgtttttcacatttcttaagtagctggtgggatataacctggaattactgaattctaatttcacctttgaacatttaatgttagtttttagcatcagcagacttgttaactgcctgacacaaacttgacatccaccaattgattagtcagtctgtgctaacctgacatccactgattgattaattcagtctgttttctcctgagggattgtccaatgactcccattctgtacaatctgggaaaaccaactgaatagtgtcactgaagtggtcacacagctaaagagacagttttcagtatgtgagtcaaatggacttcttggcctttccacatgcttgtccagtcacagctccctcaagttctgtggccaccacacatggcaactcagcttcaccctgcttgtctattgttgacatgactgtgagtgagtacaggtgctcagatgggcagaagagggcattggatcccctgaccatggagttgtataggtggtcatgtgctgtggtactgagagccaaattccaatcccgcccaagtacagcaaccattcctaactgctgagccatctatccagtaccttcagtaaacctggatttgtcatgtagctcaagttggtcttgaactcatggcaatcctcctgcccgagtattaggactataggcgtgtgtcacccacctaacctgcttaggaggaggtccttgccttcccagcagccaggagagctgtcagctgtggacacatctgtgctcagcgggcacctcatcactggtggcacactgcccagacttgtgttcagtggtcatgtgaaggagcagcaccgagtcggcactgatgttatcctttcttggcctcctgtctcaacatcccaagcagctgggcttataaacttctgccatcacagagttttggggtttttggttttggtttttttgtttcattttgtttttgagacagggttcctctgtgtaacaagctctgattgactgtcattttgtaaaccaggttggtctcaaactcagagattggcctgcctctgctttcccagtactgggatttacatgccctgtccaaattcattcttggggctggagagatggtttagtggttaagagcactgactgttcttccgaaggtcctgagcaac

SEQ ID NO: 24546 - DNA, 1101 bp, Mus musculus
tgaagaagggtccctcagttgctttctagcctgggactccacaaaggatcagtataagccaactggggagtgccatagggccctgtgtgaccctgtgcccagagagagcctgctgaaaatggctgtcacatgcaatactaggtgctccactctaggcaggccttccacttgtctcttggtccctttggactcagcagcacacggattactacttctgtgcatgcatttttccctactctgcctggccacccttacccatcctttagcttcctgctctcatcctttcactcctgtactcacatcaggcagagcttctgacctcagcccagctggccctgtcatgagattagtctggcagctgtcctcgtgtgcagcagagtactgggctgtctgcccttctgaggaccagtcagggcctggcaccagagctggccaaatgaacactggccattggagccaaaacagttgcctcttgcagagagctgtgcccatggaggtttttctgatgattctcagacatagctcatgtatgtctaacaacaagggctgatgtttgggtgggcattactttgatggacaggtgcctttcccaggagctgtcagggttcctatcacaatctgccctcctttgtaactgaaagaagcttgtctgcaggtacttgggacatgaacatggcccgacttcattctgtctccactagctgccatgtccgtcactatgtctgaatctgtctacttatgagaggttctagggcttcttgtttccagtcttaaggccaggacctctgagtaattgaaacattgccttttttgtttggtttgtttgtttgttttttgtttggtttgtttgttttgtttctctgtgttgccttggctgtcctggaactcactctgtagaccaggctggcctcgaactcagaaatccacttgcctctgcctcccaagtgctgggattaaaggcatgcgccaccatgcctggcggaaacatttcttttttgaaatatgtatcatgtgtttcaggctggtctcaacttgctacgtagctaaggatgaccttgaactgctgatcttcctgcctctacttcctgagtattgggatta

SEQ ID NO: 24547 - DNA, 1180 bp, Mus musculus
tgtggtgaccccaaccataaaattatattcattactacttcattactgttaattttgctactgctatgaatcatgatataatataaatatctgtgttttctgacagtcataggtgaaccctgtgaaagtgtcatatgacacccaccccaaagggttgagaaccactgctctagtatcacctatgtagggacccacatggtttttgtagtcattacagtgagcctgattcctaggagttcccggaccccgtgggatatgctggcaggtgctcttggctgctttattgggtgggagcactcctgggcacctggtgtacttcataagcctccgcagaacatttccattgggaaacaggcagctgctgatcccttagcccctcgaactaatccctcaccctgtacttcattgggcttacttgctactctggagattgctttgtgaagttgctgttaataggcctttgggtaccctttgcttgaagttatatcaactgaggtgattggatacctgccaacctggctagtgctccatgtatgaataggccctttggcaaaatattctatgttctcttatagactccttatgggaccagatagcttccttctggacaggcacttcatggctcattgtgtgaatgatcttggggtggtgaaatggccagggttggttccctaacacttagtgggaccccatgtgagctagtccctagggggcaggaaacctcactgcctgaattgtctactgtgggcaggaggggacagccggcccagcctgtctttcaggggcacttgggactattgacattggtctgtctgtgcctgcttcctcttgctataggtcacagccactcttaagcagccagtggagggttttggtgaagatgaatcctgatcctgtgatgacaataaaaatctcatgaatctggagtaccagcttgggtgtcctgctcgtctggccaggctctaggtgggtgggctaggtggggcactgggttaccccaggtgactatcatcatttcctgcctaaggcctctgcagaggctctgctgagttgcagccctaggtacttgaagacgtcatagataggtgaacagagctagagcctcagtgcctctggccatagtttcacccagattccgggagctgggatacagtctggaagggctggggttgtctaatct

SEQ ID NO: 24548 - DNA, 1206 bp, Mus musculus
agtactgagactatagtcaaaagccatctcccccaaccccttcctttgaaggctggtcttgaactggcactccttcctccacctctccactgctggaatcacaggtgtacattacacagctggctggcttctggtttgctaaagttatcatttgtgtacatgctcatatgacactcataaggaggcctttctcattaaagccctcaggctcagccccacactgctgtcagtcaacagcatctgtccagtacctcactctgccctgcttcaggctgctggccttagaacgtgtggaagcactgccctgccatcacacatacagctgctgcttcctggggcagtgatgggaagagttcagtccctgggagatgcacagccatgacccaccgaatccagaactgtgctttcccaatgtgtggctgggtgaatggttcgtaagcagggtacagcatcttgcaggcactatgctgccagccacagcagctctaaaccaaccctttctcgtctcttgcagggcccccagcatggtgctcaaggtcttcttccccacgtgctgtgcctcggcagacagtggcctgttagtgggacgatgggttccaggacagagcagtgctgtgatcctggccgtggtgcactttcccttcatccccatccaagtcaaggagctcctggcccaggtgcagaaggccagtcaagtaccagtggctgtgctagggacctggtgccaccgtcagcaggaaccgcaggagagcctggggaatttcctggagggcctgggcaccatcttctcccatgacccctggttgcagctctgccgggagaggggtaccagactctggagctgcaaggccacttacccgcagatgtctaaccctctggacatgcaccccgaagagcaggtcatgctcatcttctatgatcagcgcaagctgctgctctcctggttgcatccgcctccagtcctgcctgcctgccagatgggagacaccacagccagcaccggaggcctagctgacatctttgacacagtggcacgcagcgaggtgctcttccgaaatgaccaatttgatgagagacccgtacgcctgagccactggcaatcagagggagtggaggccagcatacttgtggagttggcaaagcgggcctctgggcctgtctgcctgctgctggcttctctgttgtccctgatctcagcagctagtg

SEQ ID NO: 24549 - DNA, 1165 bp, Mus musculus
ctagggcaagggctgtgtgcagatctacccacctgcccccctacatgcactttatgagggagacccccaatggaggatgcttgaaccagaatctcaggaccctgcccagggagccgccagccacagggtgcagcctcccttgggcctccctcccctcctatcccaccccaagtaccctcagtaccccaccaggcctcccagctgccatgcagaatacctcgaaccgggtgggcttcattccagtacttctgtcttgagccctggggacagcttcagatggccaaggcccaaagggggcggccctgtgaatatggggtcacttattatggagaggcagcccagataaatgttcgcagaaccagtccgggttttagaggccatgccctgctcgccgtgagaacctgggcaaccctttgtggggctcagatctgctgctgctccccttgtttgttcccaagcccagctccctgccctaatgatcagggtcctgatagccctggcatatgagcagtgcattgcaggaagcagatgcctggtggccatcggccagggcttggggacagctacacctcctgcaacactatgcaattcctggagcacctgccaggatcgaagccatgatggagccacaggacaggagccagtcccagccctgctgtctggagaagtgctttgtccttagtttccctggccacagtcagctctgcccatggcctcagtctgtccacaaagagggataccccctactccggtcctatcacaggcacatgtaaggtgtgactgactactccctcccctagatgagggagccaagctgcccacctgcccagcattccctcagctgcttgtcaaaatcagagcccttacctgccacatggacgcctgagtcatttcctgggccactgttgtgcagccccctaggtaggggcagctcccaagcccactgtccctgcctccatggggcttgctagggtttttatacctagagaaacattccccttccctctgggcctccttttactctgagctgtgaatatttttaaccctgtaaataggaccagctcttcgaacacagagactattttatcagctgtcagtcccttccttgttcgatgatgcaccccataggccatttccactcaggctccacggaccaaataaaagt

SEQ ID NO: 24550 - DNA, 1135 bp, Mus musculus
aaccttttctggaaagatgctggggctcctggggcagggagggagtggtaggagacagcctgctatgagtgctagaagctgagcaccaagggccctggtgtgagtgagcagggcaccccagagcagccccattgggttgtgctctgctcagtcactctttccctcactgtttaggtacttcgactctgtggacatctgcaaggtgcactcagactggcaagaggcacgggttcagggctgtttcccaagcactgccggtgggcctgtgggtgtgacagcactcacagtgctggagcgtgcctcactggagtttgccctcttccaggagggcagcaggtaggtaacaggatggccactataccaagctaggagtccatggctgtggccacatgagcacccagcctattgtttctggccctcaggcgctcggattcagtagacagccacctcctggatctgtgcatcctagtgttccgggccacttttggcactggtggccgcctgagcctgggccgcctcttggcccacagcaaacgtgctgttaagaagtttgtgaactgtgatgtcatgctggagcctggggagtatgctgtggtatgctgtgccttcaaccactggaaccctgctccaccagggccccctgcccagggtaagggccccagccagatgaggcccacaccctccttcccaacctccgagccccaaagcccacccacgggaaagctgctggctcccttatccacaccccccacagcctccagcccctcagcaggggtcccccgaggtgcccccgagccacccggccacgtactcgcagtgtacagctccaggctggtcatggtggagccggtggaggcgcagccaaccacactggccgatgccatcatcctgctcactgagagccggggcgagcggcatgaggtgggtggggtcctgatgggggagggcagagggtgggcaaccaccagccctggcccacccaccctgtgcctgtgcccagggtcgagagggcatgacctgctattacctgactcatggctgggcgggactcatcgtggtagtggagaaccggcaccccaagtcctacctgcatgtgcaatgtgactgcaccgacagcttcaatgtggtgtccaca

SEQ ID NO: 24551 - DNA, 1193 bp, Mus musculus
gtagctttgtttttgaggctgagaaccagctttgcccaaggtaacttacgtttatctccactactcatgtcacttcccctcagctcacgtgcctaggagcgtcccagagctcccatgtgtaagctcacagagatgaggatacagtgaggctgttctacacagggcagcatggagaccctgttaaagctcaaggctggggcaccctgtgttctgtttaagctgcagagcctgggacctaggtgacatcaccattgggtcagctgaaagagcagctggagccatgccataccaggctaccatgctcactgtggcctgcttgccactggcctgcagtgtcatagtcagggagtacaggtgtccccttgcccactcaggatcatcctgatggtgagcccttcaaacctccaaagttgcctagccccaaggttggtttaatgtgcaagggccccaccccaaccttctgccgctcccttgggagggtgggtcttcccccaaaaggtagagtgggattattctgggcctgaggctgtcctgcccagcctgagtgtctggccatggtccctgcagaatagtgtgaactttgtggatgacagcttcccccccgggcctgcatctgtcggcttcccagtgggcgacagcgtccagcagcgagtgaaacagtggctgaggccccacgaaatcaactgctctgtcttcagggaccacggcactccgtggtcagtcttccacaccctgaggccctctgacatcctacaggggctgctggggaactgctggtgaggctccaggttcccgtcagggccagacaggctcaggggaggatggaggctgctggtccagttgtgggcatgttgtgaagttgcctggctccctccaggttcctgagtgcgttggcagtactggctgaacgtcccgacctcgtggagagggtgatggtcacacgtagcctatgtgcagagggtgcctaccaggtgcggctgtgcaaagatggcacgtggacaacagtgctggtggatgacatgctgccctgtgatgaggctgggtttttgctcttctcacaggtaggacagcaaggtgggaggtagggttagagaaaccaggccatctatgactctcatccttccccaggcacagcggaagcagttatgggtggccctcattgagaaggcactggccaagctgcacggctccta

SEQ ID NO: 24552 - DNA, 1731 bp, Mus musculus
aatcagctctgtctcccgagatgaggtaccttgccccgccttggtataaccctaggcctctttctcctgtacaggccccttcctttccctgcattgaccctctgctttcctgcagctcatggaagcaatccagaagcaggaggagatcaatttccgcctgcaggactacattgacaggatcattgtggccatcctggagaccaacccatccatcctagaggtcaagtagtccatcttagcccagtttgggctggttagagactccacagcacccaggagtggccctgtcttgccacaaagagcccgaccagcaggtcctgcagcttaccaagcccagggtgtgtggggccctcacgcagttcgactgggaaaatacagaagggctgcagaggcaataagaaggaagaaagggaagtccacggcaggcaaagggtgtggctggctctctgaacatcaggaaaccagggcctcccaccacaagccagcctcaccaacaacaccatgtctgctcagcagtatgcagatatgtggggatagtctctcaggctggcatgggcccctttctgctatgcgccctattaggaagagagagagagagaaagagagagagagagaatgagtcctccctcagttgctgcctctcactcctggtgacatggtgccacccaagcttggccattcccacatagtcagcaagctgaggacccaaagttggacacagaaatggtagtgttggaaagacagacaggcaaagacggcacacgttgggtctgcttccagtccataggccaccaattctccttgcgctgctcaggccttctctcaccagatgggcttccattcaccttcggacccagggcctccaagccacacagctattctttggccagaccctcactacagtaactcatcaactctggctcttgtaggggctggagcagctagttcatgctgcctgtggaactcacttcctggactgatgagcacggtcagcctctgtccccactgcaggtgctgcttctcctcaggtgtggcctacctaggctcctggacccacaccctcctcaggctgactttactgccttgggagaagtctacatttcccagacaatagtctaggcctctggaacagtttccttctctgcttttgactttaaatccctgggtgtcccccaggagtcagtttgctagtggataatggaggaggttctacactgacccagaggcataggaaggcttgctgtctgccctgcaccacccacagagctgcggcacccatagcagctgggcctgagcctgagcactagccggagtctgggcacagtgtctgagaccacaccataggctgcgtgagtgtgagtgtgtatggaagtgtgtgcgcaagtgtgtgcgcatgcatgagtgcgcacacaagtttgagtgtatgaattcttgtgcccacacatgctgccctgcatcccttcactgcctatccccctgcccccgcctcacactacagtttaagatgttgcctcgtattgtacattttggggaaagccttgtgtgtaaatcagtgtaaacttggaggagagatttttctatcatgtagagtaggtattttttatagattgaaggttgatcaatttttttaatactttccagagagaaaactatctgtgtatacatatgaaatatatatatatatatatgtataatatatcaatactggagccccgcctttctgtgcccagg

SEQ ID NO: 24553 - DNA, 1417 bp, Mus musculus
acctggggctcatagcagcttctcctgttcccttgcccttacacactccctgtaagggctggactgggcagcagtctccctgtgtctgctgttggagtcagcctcttagaactggctctgtgtggcctcctgcctaactgtgatcttgccagcccagtagctcacatggagaggagagagggtaaggaaaaggtcttgctagagtcttggtttttgttttttgggggagggtttttttttttcttttggtgttttgtgtgagtttttttgttgttgttttgttttgtttgcttttggggacagggtttctctgtgtagccctgcctgtcttggaactcactctgtagaccagactggcctgcagctcaagagatccacctgcctctgcctctcgagtgctctgattaaaggtgtgtgccaccaccttgtagctagctcttgctagtcttaaaggccagcttttgactttggagtttggctgctgtcatcttcctgctatagaaggtgagttgtgcttatgcctgataatcggctcccggccactcttcactgacatccttgttcggggtctgaggctctgacacccttcttaaggcccggctcaggcagtactgtgtttccttctaagacaagttgctgctgagtccgtggtcactactgtcttctgagtctatccagtctccactggccagccttctcctggggtcatgggggagtattccttcctgtttatacagagtatctcctggtttcacaactagggtcctccctacaccttgtgaatctgtttcagagattgagtcacacagctccctgccccagccttgtcttttgttttgcatatcttcctgtggcttccggagctgggagggcctggaggtggaactgagaccttgagtgggagtgtcctttgcctgatttgggttaaggttatggttttccttagatttttctggagtcattggtcacagcctttggtactagagttgctactaagtctatcaacttgtttctttatggcttttctctctctggaagcttttaaaatgttgtcttggcttcagaaaatcataattttagcttgtttggttagctacagacctataatcacaactacttgggaggttgaggcaggagattcaacttagctgctatttcaaaattttacaaagattctgggaacacagctcggtgatagagtgcgcgcctaacgcgtggtccttggttcatcccccaaaccgttcaaaacaaagaaaaaggaacggaaacaaaagataataaatttcgtgagactttgttgcgtggcctctttctcatagatcatgagaagcatagcaaagctgaggcgactgacctggctgctgcgctggctgctagcatctctagtgcagttgtcttgctgtgtctatacatcctc

SEQ ID NO: 24554 - DNA, 1176 bp, Mus musculus
ctggccccaggaaccagacgcattctgtcacttgctcaaggaggtggaggaacctgatgcccttcgctgctggcttcaagggccagacgcaccgtgccacttggccaaggaactggaggacctcgactcccctcgctgctggccccaggagcccgacgaatcctgtcacttggctaaggagctggaggaaccagacgcaccgtgccacttagccaaagagctggaggaacccgacgcccctcgctgctggccccaggagcccgacgtgccctgtctcttggccaaaaagtgggaggaatccgacgcaccgtgcctcttgacggaggagctggaagagcctgacgcccttcactgctggccccaggagtcagaggcaccgtgtttgttggccaaggagctagaagagcctgatgcctctcacagctgtcctcaggaggcggacacagggtgcctctcggccaaggagccagaggagcctgatgtctctcacctgtggcagggggtacccgatgcaccgtgcctcttggtcaaggaaccagaggaggccgatgcacttcactgttgttggcccgaggaatccgaggagccggatgctctcaacccaccgtgtttctgggccaatgaaccagacgagcccgatccatcacgatgttggtcagaggagccccaggtgctgtgcctctggccggaggagcagaacacaaagcggtgctggcaggaagagcccgatgcaccctgcttctggcccgaggatcgagaggaacccatagtttcgtgtcttcaatttaaagagccagagaagcccaaagtccggagcagttggcctgaggagctggaagactgctgccctacgcggggcctaccccttgagcccttgctcgccgacggcgagctgctgcaggcatgtcccgggccaccctcggacccaggaccagcgttgtcgctgcccagcgagcccgggacagctcaggaggagggtgcacgcctcagggcggtatttgacgccctggacagagatggggacggcttcgtccgcatcgaggatttcatccaattcgccacggtctatggggcagagcaggtaacaaactgagtacagttctggtcgggagagatgtcgctgatttctcagggtagtttcccacgaatcccctcttacctctcagaggaaggtgt

SEQ ID NO: 24555 - DNA, 1234 bp, Mus musculus
taggatataactttttcttttcttttcttttcttttcttttcttttcttttcttttcttttcttttctttcctttcctttcctttcctttcctttcctttcctttcctttcctttcctttcctttcctttcctttccttttctctctttcttcctcctcctccacgttcttcttctttctccttataacttcatctcaggtcaacgtttattcagtgatgattaatgattacttttctattaattaatgaattaatcaattttctttacatcatgactgaagcttcctctccctcccgtcctcccgtcccccaggggagtcctcccgtggatatccaccttcttcttctttgaagataggatctcatgtacactatgtagctgaagatgattttacaaaagagccaccctgccaatttttgcagtgtttgaagatcacacccaaggcttccagcaggttcaaccagcagaatcaactgatctgtacgtcctcccccggggatcttctgacacataaacttcgtactcaagatagttgttttgaggaggcagtgttcttcatggggaatgcctcctgccttgcataggtctatagtcacacaggaagtgttgagtctgacttggaaatccgagcccactcccctgcctctgggatcaagctctttgcaagctctgcctctcctccgcccacatcttgagtaggaataacccgatcatgcatagctgaaacttgcttacagtatctgaggaattcctatggttttaccagaaaaaaaatgcattttcttgtaaaaaaaaatttttttttttgagacagggtttctctgcatagccctggctgtcctggaactctgtagaccaggctggcctcgaaatctgcctgcctctgcctcccaagtgctgggattaaaggcattcgccaccactgcccgggtttttttttttttgttttttgttttttctactataaaaatagctatgagttggaatttgtaaaagtttctagagggctggcaaaatggttcagcaggtaagagcactgactgctcttctgaaagtcctgagttcaaatcccagcaaccacatggtggctcacaaccatctgtgataagatctggtgcatctgaagtcagctacagtgaactcatgtataataataaataaatctttgggccagagctagcaggattgagcgagcagagcagaccagagcgagcagaggtcctaaaaattca

SEQ ID NO: 24556 - DNA, 1254 bp, Mus musculus
aggcttggtggctcacacctttaatctcagcacttgggaggcagaggcaggcagatatctgagtttgaggccagcctggtctacaaagtgagttccaggacagccagagctacacagagaaaccctgtctcgtaaccccccaccaaaaaaaaaaattaacaataagagggctggagacctggagacatggtttggtttagtggttaagagtaaccacatggtgtctcaccactatctataatgtgatctgatgccctcttctggcttgcaggtgtacatgcagatagaacattcataaaataaacaaataaatctttaaaaaaaattaataataatagaatcaatgtggagtcttgcctggtggtgcaagccagcgctcccaacatttgggaagattttttttttttttgtggtgggggagtaagattttaaaatcaagggctgccttcgccgttgtgccgagcccgcagaggagtcgccatgagcaaagcccaccctcccgagctgaagaagtttatggacaagaagttatcattgaagttaaacggtggcaggcatgtccaaggaatactgcggggctttgatccctttatgaaccttgtgattgacgagtgtgtggagatggcaaccagtgggcaacagaacaacattggcatggtggtcatccgaggaaacagcatcatcatgttagaagccttggaaagagtctgacctgtgctcagcaagcagtgtccacatccctcctcaaaggcctgtttgattgtgatgtagaattaggtcatgtacattttcatatggaactttttactaaataaacttttgtgatactcaaaaaaaaaaaaataaaataaaatcaagggctgtcaggataacctacaggttaaaactcacctcaaaataaataaataaataaatagatctggggatggtagaaaacttgtctagcatgttcgggcactgggtttgaacttcagcaaggcacagacctggtgtggtgacccttgcttgtaatgccagtacatgggaaattcaggaggaagatcagtttatctacatgatgagtctgaggacggcttgggctataagaaatcctgtctgaacagcaacaatcgtagcaatagatggtggatatctggctcaatgcttaagaacacttgctgcagccgggcgtggtggcgcatgcctttaatgccagcactcgggaggcagaggcaggcagatttctgagtttgaggccagcctggtctacaaagt

SEQ ID NO: 24557 - DNA, 1128 bp, Mus musculus
ctgcctagaaacttccagagggtgctgacttgcactggcctcgctccatcctgccatttgctactgtcctctccaccctggggccggtggttacaagtgacatttgagagcctggctgaacctcatgtgacagtgggctttactgctaaagctgtctttacaggtgggctccatgggaggggagtggggcggggtggacgggctctgtctacctcccccagagctctgggctttcttccggttgagccccttgtctttttgacagtatgtaggccatggagtgtgaccatccatcatcttatacaaaacaacccaaaccagacttatgatacctctgcaatccagctgtcccaaagcgctgtccaccgggacctgggcaggagtagcagggtggacagtggccccttctgtctcctgaactatccagtcctgagggaggacacagatgtggtgtctgtacacttccagcccctgaatggggccttcgtgctagtgcattcaagcatgccttctgtaatgcagctccgccttgatacaggcatggacagcggaggctccttcatcatcgtcctgaggactaacaaggtatcctctggaagcccactgaagcagtctacagctgctggtagcctgggcttggctcagggtacagggtgacttcagctctgagactggggtgaagggacctggtaggtgatagcatgctatcaatagcatgggccagaaggggattcctccaagataaaagacttcccctacccgaagccctgtccctggtagaagttataattatatctgtgcaaatggacagggaaatggccagaacaggagacagctgaagataattcagctgaagaaaatttggaccatgatgaactttgggctagcaggcggcctccctcccctcaaaaaaaggacccagcatgaccgagctaaagtacaaggtggggaggcaaactgctccttagatgtctttgaggggtgacaatggctaacctaccctacttccccttccagacagaggtcacaaatggcaccttggtagcagcttgtgtgaatgctgcctcccctttcctcagcttcaacacttcactcaactgcaccacaggtattctgggcaggcagttt

SEQ ID NO: 24558 - DNA, 1148 bp, Mus musculus
tggatacacgtgctcgtccagaccctcccgtgcctacatgcatcttccacttttgtccccacttgcccgtgcctgcccactcttgcatataccagtatctattagtgccgatttcctcctcctatgcccgtggattccctcaggcttgtctacacagcatcctctgggcgaggaagggccctaaagttcagaagctcatgcctaggtattgcgtggcccccaggttggcgtgggtggagctgcaccgacaacagcacagcgcagaccgtagcccagcagagggcagcagcgcttctgctcacgctcagcaacctcatgttcctggcccccattgctatatccctgcaccgttccttcctggtcgaggcctctgtctacttttacaccatgttcttctccacggtaggcttggccctaaccctctcgggaactctgggtggggaggtcaggtctgcttgctcatcgcttcacctcatagttctaccacgcctgtgaccaacccggggaggcagtgttgtgcatcctcagttatgacacgctacagtattgcgactttctgggctctggggcgtccacctgggtgaccattctttgcatggcccgtctgaagacaatcctgaaacaggtgagtggcctctgatgccaagcctgggctccagggaagcaggggccctcacatacagtacatgacgtggcagagagggatagaccagataggactgggtatcggatctcacaagagaactcgtcatccactactggaggacgttgtaggaagctgtgagggaaaggtgtagccgtcaggacgccaggaaagaagatggggaccgggaccctaatctcaaagaggagtcagggcaggcctccctgagaagctggagccatgttcctgggttccttgtctaagggcacttggggattttatgcagcatctggacaatagaggtgactcttcggtgcttgtgagctgtgtcctctatagcctgggtactgcccatcaggggcacccatatcatctcaaagagtgggaggagaaagttctggaatttggagatccagcaggctgagtgtggagggcatgaactttcaggcagtgggcagatagaaacttaggcatgggtcccctcccaggttgcatctaaggccac

SEQ ID NO: 24559 - DNA, 1726 bp, Mus musculus
cagctacccatagagccccagtctggctatgtgccttaggtcttgtgccgataaccactaggcatgaggccatatgcacttctcctgcccagatctagatagaccccatacctcttggctctgggtctgcaccaaccaaccaactcccatgtggctatccactctagatataccgctgtgggcaccggggacagtgctacccaacctcctggcagcgctgggtcttctacctcctgcctggcatctccatggcttccgttggcatcgccatgtatacttcaatgatgaccagtgacaattactactacacccacagcatttggcacatcctactggctggtagtgcagcatttcttctgccaccacgagaggaaaaagctgggtcctgggcctgtttgcagaagttcccttgtcactaccagatctgcaggaatgatcgggatgagttgtacacagtgacctgataaggctggttcatggacacctgaaactctaatgacctcttcagctaggacaagcgagagaggtgcttgtctagccccaaccaggtttccatctgaataaaattgtcctgagacgcttggcttctttctccagagaagaccccctccaccccaaaaaatctttatggctgctgccaattcctctgaaggtcacagctgtttccacctggagcccacaggtgccacgtgtgggctgatcacgctgttatggatggggatacagataagggattcctgtggtccccttcctttggaaagccgtgatatgagacccacaagcaaggaagtctgagtgcacagaggtcactcactgtctctgacatcctgtacccttaatgccatcctgccttggcatggggataccctcctgctgcagttgctatggtagagtccagggtcatcagagagctgattaagacctggagtgctgtgtgctgtccctccctcattgtctgttggagcaggaggccttcgggagagcctgaggtagcaggctgctcagctgtatgaggtctggctccagaaggcacacaatgctcgctagtgttcccttctctcttaaggggtccaaggccccagtctggtgagcattctcctgtgctggccctagacacttggatgaggctgacccctactggatcaactgaggattaaggagtgggttctggatccccagcccaatctttctggtctcctggggtcactgagctggtagtgctgtgtgcccaggccatttggttcccactgtgaggctcatctgctctgagtactgggattgcaggtgtgggcttctgggctccttcccaagctactaacatcctttatttggcaccaaagcacactttagcccctgaaaggggaaatgtgtatattctgttgggggtggggggcaggtggtaaaatgttactgttctaagatatgaaggcatatttttatgtaattggtgaatttaatattctacaataatttttcaaatcaaatgagtggtcttttttttttttttccttgcgtccctggagggaaagggaggttgagctcagggtagcctttcccaacaggcttgccaaagctgctggggaactcctgggctgcacttggcagacggtgccttgaacccattcgcagtagataatttttcatggtccctaaaggaggcggagggaaagggattagtttagatggacgggcgttgctgccaattggcagcgagcgaaggcgcacg

SEQ ID NO: 24560 - DNA, 1191 bp, Mus musculus
gcctcaaactcagaaatctgcctgcctctgcctcccaagtgctggcattaaaggcgtgcgctaccaccgcccggcactaggtgttttcttaatcccttggcagcccctaggatgttccatttgtgtctgtttcccagaatagtcaagagcctgtggcggccagcagttacagggaagccaagggtaggcatgtgagtttgtgtgaccaagggaaagcagtcctcttttggcggtcaaatgccctccaggatgacaagcagcaacatccccagtccttctacaccctgcttctccccatggtcagccagaagcagctggctgtcaccctccttagggcgccatccctgggctacgttgagccttaccatgccctctccccttcaggaccctgtacccctgttcaaggtctacgtagaggagctggtccagcggcttcaggagcaggttctgtccaggcccgcagtggtgcagaagagagccggtgaccacgcctgagcactgggctcagcctcccctgtgggcagtgggcgaaccccacttggcatgtgccgagcacacagttcctgtggtagacttttcagagaacccttctgtgccaggactcgtggaagcctggagcggagcagatgcctgtccaagctggtcaagtccttctagttcttgggctgaaataagtaacagtctgaggcagcctgcgccacagtaaagtgtgttggtttgcttggaagtctggagtcctgtgagttctttttttttttttttccccatcctgagacagggtagtcctggctgtcctggaactcactttgtagaccaggctggcctcgaactcagaaatccacctgcctctgcctcccaagtgctaggtttcaaggtgtgcgccaccatggccagcctcagttctgtgcattcttgtccggatcattcctttgttccagaaacacgcagactgtttgcactgtccagctgtagctgctgacttctgcgctgtgggcactgagggcctttttgctgcttatgtccctcatgtgtgaggcatcaggacatagagagttgggttacatccagtgtatgctcctgcctgctctggaatgtttttctgggcacaggaagggagcctgggccatgggtcaggcctgggaagggtctctgcagtatgccctgaagagctaaaagtgggaagctttctgg

SEQ ID NO: 24561 - DNA, 1644 bp, Mus musculus
ccatgtggatagcagagctgggaccccaagacctctttaaataagaaagctatcaggaaagccaggcatggtggcgcacacctttaatcttagcactgggaaggcagaggcaggcagatttctgagttccaagccagcctggtctacaaaatgagttccaggacagtggggggggaggtacacgacacggacaatggacataaataaataaatagggagggagggagggagggagagagagagagagaaacaaacaaacaaacctacctatcagattggggctcccaggttttgtgttttgttttgttttgtttttgcaattcccaacatgctattaactcagcccatcagtggtcccagcccttccccaagtgttgccactgcccagcaggcaccaatcaggagcccagcccagctcgacttctgggagaagcctactctctagggtggtcagacttctagaggatcaaggacaggcaggtattcttatcttggagcaggtttttctcactatctccacacttttctgtccctagatactactttaagaaagtgagtgatgagtttgactgtggtgtggtatttgaggaagtacgggaggatgaggccgtcttgcctgtctttgaagaaaagatcatcggcaaggtggaaaaggtggactgagcactgggcagcacacccggagcacaccatcactactgtgcactgtcatcagtcaggtggacagccttgtcctcaggagcctggtgtggggaacaacacaagattgtgtcatgagctcttctatcggggtgaggctggggaccttaggtgtctgccagcctctgtccctctggctttgggaaagtgggggtggggggtcgtcctactgagtggttccttgggtttctctgttttgctgttcaagaggaaagttccacttaccaccacattaccccctgaagcaataccaggagccatctcatgaccctcagcagctcttgcttctgaatccagtctgacctagggatactttgccctgggcttgtatcccactgtcctcttctctctctctgggacctatccactgcacctggttgggctcaggtccaggagcaggggatcctgtgggggcctctatatattgtacatgtcactgagtgccttcaacatagctgtctcttgcctgccactgtgtgaatctggcagctgagtatctcaggcccctttgcctgtctctagccaccagcttggttcagcaggagggggggcggtgtgtctggtcccttccaagtgtccgtgtaaatatgtacatttctcaggccagggccagcagggggataccctgagcccatttttcatgcaatgacttgtacaattatcttttcaaaggtacttggataataatgaaataaaaacgtttttgaaccttccttggatatgtgatatactatctgtaccagtggggcagggccagtggctatgcggccctcaagccaagtagtgaaggaggcaagatggcctcttaacatgttatccattcttgcccaggcaaagccctaaaggccaggggccaaactaggcagaccagctgctagccctgcttatgaaccacacaaagtctgggacaacatgtttattcatagtacacagctccctccagca

SEQ ID NO: 24562 - DNA, 1196 bp, Mus musculus
tttttttaaaaaaaaaaaacaggaggtaggatcttagtctcacaaagaccacgcttccacagggtagcctgacacccaggacgctggccttgaactactcaagcctgatcctggggattacaggcataccacgaccggccaaaatcaagcttagttgatctagtctttagaacgatttgcgaccgttccactcagcgactcctgtacacttcccgacaggccttgcatcaacgccaaagaacttcctcccagcattccccgcggccggaaagcgccgtgcgggcttcaggctgataggagcgtctttcctcgtcgctgtttgcggcttctctggtcgagttgtgcggagcttctcggccgtccccactggccaccatgtccgcccaggcgcagatgcgggccctgttggaccagctcatgggcacggctcgggacggtgagtctgagcggtggcccaggctctgggcggggtgggagcaaggcgaggccgcctggaagcctgaggtgagggccgtgacagcgtgcgtctgcgcggggcgccatttttctcccctgcttgctgaccccaggctcggggcctttgtctgatctgcttggcctgcgagtctctcgcagccgccgcgttctactggtccgggctgcctccttcctgagagtccgatccgacggtggggctctgtccccttctcgttttccgtcatgcgagttcctcttggtcggcacggcggctcggcgccgccgggcaaactggagcgtcggcgaagggctggaaccagcgcgggctccggggtgctggctgccgggtggcggaatttctctgatactcttcggaggagaggcgatccccgaaggagctggacgggtttcgaaaacccgggcgttcttgctccatacggttacacggggagccgcaaatgagcatttctaacgtgggttccctccgcgtacttttctagtcttccctcccttcattcccctgcctcacagattagcctcggtttagtcacctctcggcattcattaggtagttggttcagtaaggaggcgtgcaagatcatggtggtgtctcaggaaaaagcagttgcatcctagcaaagctagatccctgctgtggtttgtgttttcatttttactaaagtaataaagttgtaatttcacactggcacatttcacagggctgtgcagattctttgcac

SEQ ID NO: 24563 - DNA, 1889 bp, Mus musculus
gagcactgtgaccttccccatggcagcttgcttttttttttttttttaaggtttatttatttattttgagtacaccattgctattttgagtacaccattgctctcttcagacccaccagaagagggcaccagatcccattacagatggttgtgagccaccactatgtagttgctgggaattgaactcaagaactctggaagagcagtcattgcttttaaccactgagccatctctctagccctaacatgatactcttagagagtcatctttttgggcaggtatagaaagcaggtattgtgggctgtagaaatgacagtaccggatcaccagatatcagggtgggaacctttatgtgaaaaatcctgatgacggtattgatgatgagcgtctccggaaggagttctctccgtttggtacaatcaccagtgcagaagtaacgatggagggtgggcgcagcaaagggtttggttttgtatgtttctcatcccctgaagaagccactaaagcagttacagagatgaatggtagaattgtggccacgaagccactgtatgtagctttagctcagcgcaaagaagagcgccaggctcacctcactaaccagtatatgcagagggtggcaagtgtacgagctgtgcccaaccccgtgatcaacccctaccagccagcacctccttcaggttacttcatggcagctatcccacagacttagaaccgtgctgcatactatcctcctagccaaattgctcaactaagaccaaatcctcgctggactgctcagggtgccagacctcatccattccagaatatgcctggtgctatccgcccagctgctcctagaccaccatttagtacaatgagaccagcttcctcacaggttccacgagtcatgtcaacacagcgtgttgctaacacatcaacacaggcaatgggtacacgtcttgcagcagctgctgctgcagccactcctgctgtccgcaccgttccccagtataaatatgctgcgggagtccgcaatccccagcaacatcttaatgcacagccacaaattacctgctgttcatgtgcaaggtcaagaacctttaactgcttccatgttggcatctgcgcccccgcaagagcagaagcaaatgttgggtgaacggctgtttcctcttatccaagccatgcacccttctcttgctggtaaaatcactggcatgctgttggagattgaaaactcagaattactttacatgctcgagtctccagagtctctccgctcaaaggttgatgaagctgtagctgtactacaagcccaccaagcgaaagaggctgcccagaaagcagtaaacagtgccactggtgttccaactgtctaaattgatcagggaccacgaacagaaactcgtgcttcaccgaagaaaaatatcttaaacatcgaaaaatttaaatattatgaaaaaaaacattgcaaaatataaaataaataaaaaaaggaaaggaaactttgaaccttatgtactgagcaaatgccaggtctagcaaacagtgctagtcctagattacttgatttaaaacaacaaaaaaaatacaaaaaaatagtaaaatataaaaacaaattaatgttttatagaccctgggaaaagaattttcagcaaagcacaaaaatttaaagcattcctttctttaattttgtaattctttactgtggaatagcttgggacatcagctctgttttaaggagcagaactgatgactgagcaaggaaacataatttgcattataaaattcttgctttaataaaaattccttaaacagtaaaaaaaaaaaaaaaaagaaatgacagtaccatatgtcctgccagcacttaataattgagaatacagggatacaccttcatagacag

SEQ ID NO: 24564 - DNA, 1142 bp, Mus musculus
gtgcagaccatagagcaggttctgtggatgggagaaggtggccatatgacacagttattttcctaggaagagctgtatctgttgaaaccttagctcaggtcagctacactgcagttccatcttgttacttaagtggaataaagacatagatgacctgctaatcaagaagtccttgagggagagttacagcttaggtcaggtattctgggaggtttatactcaagacaggctaactgttaccccctgagcatttgttgttgctcacaaggaccaatgccttaagaccaaagtgaagcccaaatagaaaggatcactgaataggagttgcttcccttcacttgtcttggggagggaggcattacagtttgtttttggagggaaccttagttggttgtgttaaatgaaaaagcctccccttctccatgctgtgcttgtaaaaacttagatgctgttcttgagctgttgatttgatggttacacataggatcttgtgattttgtaatgtggctcctggtgatgctgtgaactcccgtctgcaggaggatgtatgtgggtacctgctctgctggtattgtgaaaacaggcttttcttgatcagctgtctccatatgcaagaaagtagggtggactatctctggaggcactggggctccgtaccatatacaggtgccgtgtgtagatttcattcacctctagtcccttggcctccaggtggggctcagtttagctctgctgacttcctggaataaggtttgtacctgggcttcttggtcccaggtagacattttgactagctgtgaccacttatgctgggcacattttgtttcttggactcttttgggccttaactggacagtcctaaccttagatccaacatcagcatgtctggtttggatccctctctaaatataaatgtgtgtatggagaaacagctgttttgctttattttatcacagagtaaagattctggaaacatttctgtgccatggcctgtagtacccacaggatgatccctggggtcacgtggtatacaactacaactactgggtacagtaggcagaccccctgcttacatggcatctttttgagtggtcggctttcccagtctcttgtggagggtgagttttacaaggatgttgtgg

SEQ ID NO: 24565 - DNA, 2209 bp, Mus musculus
tgatgttttgttaacttttcttaagtggagtttcctgtaatttaggtggacatagatgataaccagagatctgtttgtggtgttgttggtagctctggacattatgcaagaaatcatagggtccctgggcagtggtggcgcatgtctttaatcccagcgcttggggggcagaggcaggcagatttttgagttccaggccaacctggtctacagagagagacccaggatagccaaggctacacagagaaaccctgtctcgaaaaaaccaaaaaggaaaaaaaatcatagggtcttccatctgtaacccgaggtctgacacaggtactgattacgaagagcaagcctccaaggaagaattgggagagccagtagttttcaaaaacccagtaaccagtcacccatgggcccagagcacaggaggtgggtatccagctcagagagagtagatacacccttcctgggccctcttgttctttctaggcttttggtgttgcccagtgcactgagtgaagaggttggagtgcactgagtgttggaggcctcttgaatttcccaatgtcccatggtcattgtaacaggtaaaaggctgggtcttcccttggatctgtgactcttggaacttggcccattgtattgaaagaatagccacttaatatccagataatgagggcagatgcaggttgcgcctcttggaggacccatccccagttcagcagtacttggaagtcagtacctgagtcgtgtggcttaggaatgtcactgtctgtcaaggcctgtatggtgagccagaagtatccagagtgggccaggtgaaggttaacaagctgacaattgcttcaggaagctctgggaaaacttggttatcctgatgggggtcccaacagcaggatcagttgtctgcgtttgactttactctgcagtctggtcctagaatgtgtgagctctgtttgtttccaaaggtagctgtggcctggcagctttaagcttacctggactctaaagcctcacattttatacctggcatgcactattagaatacactgaattttagtgtgtactttgtcagtgtcttctgcctactcagttcttaacacacttccttgggtctaaatttaaatttactgctaaaatgaaagtaattctcaagatactgttgttaggtgtgtgacttctagcacatgtttttttcagaacagtgatatttatagaatactgtgatgtattccagtgatagcaaaatgcaacaaagcttcttataacaaactcccattatagccacttctgatgggtataagtcagtgacatttatgtgtccagtgttgtgaagtgatcactgatacaaagttgcaggatgttcgatccagacagaaacttcagcccaccagttgaaactgactagcttctcctgagccccctggcaaccaggaacccgttttctctctatagtttgctcatttggatatttcacaaaaatggactcatgcactgggtggcctttggtgtgttggcttcttccactcaaggtttctacaaaacttggctgtgtgatgtaatctcattacttttatgagtaagaaatactccattctgagtgtaagctacgtatttctcactgtgatggttaacttgctaaactcgatgggcttagaaacgccatgagaacacacccctgcgtatgtcagtgcaggtgtttccagggaattcagtgagagacccaccaaggatgtgggcggcaccatcctatgtgctggtatcctagaatgaagaaaaaaggagggcaagagctgagcaccagccatctctcaacttcctgactgcagatgcaatgtgaccagctgccttaagttcctgcaaccatgacttcccaccacaaggactgtacccttatactgtgagccaaataaaccttccctcagttgctcttgtcaggtgttttgtcactcgtgggcccagggaaaagagactctgatgttactgcccagaatactaagaaccctgatgtagttcttggctggattcattacctccaaggtttgtttttgtctctgtcttttgagacagaatatcactgtatagccctaaactcactgtatggcctacaaacccgaggatttatatgaaagctgtgtatatattggtgctaaacctgataaaccagggcctgctgtgcagggtggatttacatctaaggaagcatttggttagcctt

SEQ ID NO: 24566 - DNA, 1229 bp, Mus musculus
aggcattttctcagttgagttttcccttttcccaaatgtgttgtggtcacaaaaaacaacaacaagaagccgaaatggcacacggtgatggaaacacatgagaatgtgtaatatttaatgccactgaactgccattgaaaacgattatttcagcccccactgaaaagatagaaaacaccctcgggaaaacaccaaatggcagttgactccagtgcagccggagggcccagaggatccgggggcccaggattaggaggccgtgtcaacttctgcggaggactctgcagcagtcattggggctgcagtcgtggtcgaggccgtgaccgtggtcgaggccgcggggctcgtggaggtaaagctgaagacaaggaggtaggtctgggccgctggcggggcgggctgcttgcccctgcaccgagaggcagccctttggtgtcttcttccttcagtggatccctgtcaccaagctgggccgcctggttaaggacatgaagatcaagtccttggaggagatctacctgttctccctgcctattaaggagtctgagatcactgactttttcctgggtgcgtccctaaaggatgaggttctgaaaatcatgccagtgcagaaacagactcgggctggccagcggaccaggttcaaggctttcgtcgttattggggactacgatggtcacgttgatcttggtgttaagtgctccaaggaggttgccactgccatccgaggggccatcatcttggccaagctttccatcgtccctgtgcggagaggctactgggggaacaagattggcaagccccacactgttccatgcaaggtgacaggccgctgtggctctgtgctggtgcgtctcatccctgcccccagaggcactggcattgtctctgctcctgtgcccaagaagctcctgatggccagtatagatgactgctacacttcagccagaggatgcactgccaccctgagcaactttgccaaggccactttttatgccacctccaagacctgcagctacctgacccctgacctctggaaagtgactgtgttcacccagtctccttatcaggaattcactgatcaccttgtgaaaacccacaccagagtctctgttcagaggacgcaggctccagttgtggctaccacataagggtttttatacaagaaaaataaatgaattaagtctgtttttaaaagataggaataataagatggatgctatatatgc

SEQ ID NO: 24567 - DNA, 1197 bp, Mus musculus
gtctacagaaggtaaccacagtatctgaaactgtctatgggacagctccctctgtccctccctagtctgtggcaaccaccactcacttctctgagcttgcctgtttttaagagtttacggagaggagtcactctatgtttgtcctgtggctggttcacagcatttaacattaagtccctctacaggacctccttttttagtgctgcgtagtactccgatgtgtactcacaatgctgtcttatctcctcatctctcaggggaccttgaagttgttcccacagcttggctggtgtgcttaatcctcagcgaacagagatgtggagacacttcttcatgagattccgactcaaacttgtggagagtaatagatgccaagtaacgaggttgctggttcaggtagtctgtttttaattcccacggtggttatgctgttgttagtcccagcaacctgactccttgccctcaccagcctttaccttttgtctttagatgtcgtcatgcagggagatatgaggtgaagctccaggacttgtttgtaaccatgaacttttccattcatgccattttgttcccccattttgttggttagactctaagattttatatatatatatatatgaataaatgcctaggctaaaagccttggatctttccctgactagctcataccttaaatccctttattctagtctaagttctgccaggtggctgtgaccattgtcctctgtccatggggccgaatcttctcttggcatgactgtccctctcccagaaccccctcctcctactgggtgtcccaccttctaattctgcctcaactcattggccaataaactttatattgacaattgagtctttcagagagtgcacaagagattatccccacacctatttgccttgtcccctctgctcagaccttctcatggggccacgtgtacttttgccgtagagatgaaggactccctgtacgtcttggatatattctccttgtcagatctgtggttggagaatattttcttccatcccctaggttgctttttctttccagtaactgtttcctctgctgattccatattagaataggaagttagagcccagagctgggaagtaactggccaggcacatagctaccaagttgtgtgcaagtctggaatttcagagctcactcataggatgtcctgcttttccagacaccct

SEQ ID NO: 24568 - DNA, 1099 bp, Mus musculus
tgtgcctgctgcatcagcatccccagacggatgtcacccaaaggccatggttcacttgcatcccatgtccccggacgaaccacagatggcactccagtttctgtgactttgccatttggggcagctttctggacctcttatcgacctcccccctcccccaccacctttaaaatgggtctgagtaggcatgaccatgcacagctataatcccagcactagggaagctcagccaggaggattgagagttcaaggccagcctgggcatagagtgaatttgagggcagtgtagtgagttctgcttcaaaaacaaaaataaataatccacaaacgcaggagcgcttgcatcgaattcgcctcagtgaatatctggaaggtgtgcctcacgttcccatgcttgtgtccttggcagacattactaatccatctcagcatgcacacaccaggtcagggctcagcctcagctgcagggcttctagacctgtagacccgatccctttcatggaaacttccctggactccaagtccccattgagctctgcggctttcactcaagcctctgctctcctactgcctacagtgcagtgctccctgttctggtataagtgtgtatcgttgtcaagattcaaggctgaggtcacaagctgattggctgtcctcaagccaaatctgatgcatagatatttgctcagcagttctttttattctttaaaaacagtagttggcagactgttttttaaaaatagtagtgccacataagacctccaggtctctgggtttcccagatctgacaattctagggcctctccagtcacttcagggcctgcctggcccatttctccatgaccaggacctctggagccttattctatatgctctactttggagacgtgaggtgtggttggcttgatgtttctagagggaagattactctcctctctaaacgcttctctggggaattagcactaggcttctggtttcccgtatggttttcttcagagccagagccaggtgagccggaagctgtggaggtaagtgcaggctgtagtgactggcctgcttacattgatgctatctgtgactgtcactgccagcagggccg

SEQ ID NO: 24569 - DNA, 2815 bp, Mus musculus
tatctgaaaataggatcataagtagctgggaaacatgtagtagaagttaatactataggcaccaaggtcaacacagacgtgagttcaaatctcagctacttacttagtgagctttgggaagtgacctcacttccctcacctgtgaaatgggtctgataatccccttcctcctgcagaaagttcatctgggaactaaaggagctgacacaggtgataatcgcttttattgttatccagttcatccaacaagtggttcgctttgattccctgagtaccatcagcgacaaggtggcaaacaaaatggtatcgtgggcagcgtgtctgcatgagtgcgcttcttgtaatgcaggagggtgcccgcctgatgcccctcagcactgatgtctgacacactctgttctctcaccctcttgcagatctgtgccatcatcggcggaaccttcactgtcgccggcattctggactcctgtatcttcacagcctcagaagcgtggaagaagatccagctgggcaaaattcactgacgtcctgtccagcccagtgactgaggaccaggaaccctgctagccctgcctctggcgtcctatctccttctgccttctctggcccagtgtgtgtgggaggagggtgatggttatgggtggcaccaggttccccagctacctctctccccatgttttagataaattaacactgcctggagtcacgtgtctctttccctgcagagccccaagaccagggtcaggcatggggaggtactccagggatgccggtgacctctctgggaaggctgtagtctattctctgttagggaataacttagagtacaaacagataagctttcagacaggctttgacaatctttaagcccccatcatttggacatgctaatagcttgatttgtcccccgggcagccaacctgtgctctcagcctcgggaccagactgcccaaaggtactgctgcttggcgctctcagtatggaatggtacttggcagggacacccataggcccggcactgcagctggaacttgcttctgcctcattgcttcatgcccgacctagagcccggggcttgtctcctaccccagccctgcctcctcctccgggcagatgccagattgcttgacagaacggtggagactcggatttgcccaccagtcctgaggcagctcacgggtgccccttcctctcttgtctttgcttttctgaatcccccaccaatgtgcctcagctgctgtgctatgcggcaatagcatttcttggtgaaggggctggttcccattgcaaagcccccctccccccaacagttacattctgcagtgccaagggatagggccatgtgactggaaggtcatccttggaagaccatataaggcacagtttgtacacttctgtccaaaccagaagcatccttcccaatgaaccacaaatgatcatgtctgacatccacctttggtcccaaggccttagctggggaaatgaagcaggcttctctttccatccctaccttgcagggtcccaaaagatgcccagcatctggaacccacttgctattgagaccccctgttagctgagcacatgccaactcattcttagacccagggggctcccgtgtctcccccacttcctcctgagttagatctctttcttgttccccctcatccttcctaaggggaggggcagtggtctaggtatgaattccatgcagagaattttagctatgttctcaagtccagagagagccgcgggcctgggcttcatttatattgagatggtttgcatacttttgtaatgaaggggtacctgcagtaggaagttttggggttttttgtttttgtttggttttggttttgtttttcttaaatagtctcttatgggtagctggattctctgccatttgtaatttttcctctgattccaattagcaaaacttccctttttatatgagttgattcttattgtgtatgtaaactgcccctggccacttggctagatttcttatcttcttttaaacattctgttccacagtttaagaaaccagtccctttggtgtgtgaatctgtcacctgtggagggttgggcagggtgggatgggacgggaactatgtggcatgcgtatgagttgaaatcccacttttgtgaggacacggtatgccagtttcccatggaagagacgcctctggcctgttgttcttgtaaaggtattcttaaggggacatatgttttgattctttcccactcactgggttcaattagatattaaaaggctgcttttcagaaatattgctgtgactctgccttgatggtggctgggtagcccagagtctagggtgggagtgagagtgaaatttaattctacagaaagaacagcggttgacagtgctgaagagagccaggtgatggcacacgcctttgatctgccttaagctcataggaggcttagccaggcagatctctttgagttcaaggtcagcctgatctacagagtgagttccaggacaaagcagagaaaacctgtcaagaaaaacaagaataataaagccaggtgtggtggcacatgcctttaatcccagtactcaggaggcagaggcaagaggatctatgtgagttcaaagacaacctggtctacagagagaagccctgtaaagggaggacgagcaggaggagcaggaggagggggaggagagaaggtctgccgagaaccaagaaaatcttgcaggatatggttacaaaccattgaccttgaagagcctagttggctttatcccagtcagattatatatgtagagagttgtggaagcttctagagaga

SEQ ID NO: 24570 - DNA, 1149 bp, Mus musculus
gcaccaacgattaagagccttacaaccgtgaagttacttacaatgcgactgtgattcttcacttgcagcagagatggcgattgtgagtagttcatgggctatggaagaatgcaaagcaggagcctagcatacaagactctagaacagtagtccactattgtaggttttacttatttatgtctgcgcgtaaaatatagataaaactgtaaatgacacatcaccaaaatgggcctaagttctttccagaaaactctgctggtcccctccccggtggctggaggttcatctcagtcaagccccatggaaccacagccttgagactagccaggtaagggcggggctctagtctaaggggcggagtccgacggtcgagtcacgccgcgcgcaaagggcggggctttagcgcgccgatcacgtgagcctctgttgacacttccgggtgggacgagagcgaggctccggaccgattcggctgctggggcgcaggcatggcataccacggccttactgtgcctttgatcgtgatgagcgtgttctggggcttcgtgggcctcctcgtgccctggtttatccccaagggtcctaaccgggggtaagtgcgccaggtccaaggtggtgggagcggaggaccccggtgggaggatcacggagagaaggatcgtacgtggaggactacggcgggaggatgaggcggggtggaccacagaggggaggaccgcatgcgctcctcagagcctgtcaacgtccccggctggagggtgaggtcacctttggcggcccctcccggaagtgaattttagggagtgctttttgtcttgatggactaaaagtgtgcacttcgactgaagagaaattagggcgcctcccaagccactgtcgctgctttggttctgtctttgatgcacgggaggctttttgcctaaacctcaaagaaagggatctgagaacagaaatctccctctcgcccccttgctgtcgcagtttcggactcagacaagcttgatgcagagcgttaagttcagcctttgcagctagtgggcccaacccaagccagggtgagcctgatctaaacgaggttaaatcacccagagctgaaggcattgtgtagaaacctctgcgtcataccttccagggcgctcctgcccttac

SEQ ID NO: 24571 - DNA, 1315 bp, Mus musculus
ggcatggtggctttcctactttctcctcgagctctcctctgccttcctcctctgtcttcaacttttacattttatatagtgttttgctgcatgtgtgctctagccctgactacttttagttcttgtccctgtccctacaccccacccgcacccccctttcttaaatcctatatatggatggatgttttcctcagcatgtttgtctgggcaccgtgtgcatgtagtgccctcgatggcctgaagagggcatcaggtcccctaggactggagttagaaatggtggtgagcctctgcgtctgctaggaattgaacccaagtcctctggaagagcagccagtactctactactgagccatctctccagctctttggatgttttgaaggagggtgaaggatctaggcagtagaggaccttaagtgactagaactgttgtgttttgcaggtcgcagacagaagccttctgtgcagaatcacctgcacatcagaccttcctccatagcccacttcgggcgttacctgccttacacttgaagatcttcctctgcatacagtattttttcccttcaccttttttacactctgaattatgtgcctgcgtagctgcctctgagatgtgtctgcactccactgtttcgggaaatgtgttactcttatcttgaagcctgtggctttgaatatggctcttgccagctcacaacatgagagtcagcgatgtgtttaagaattgctgcgagacaaacaagactcggcgggacagtcaggagtgcctgctcaagaggagccctaccccagcagatgtacaccaagctctattttcaggatgaatttcttacttctacatctttgggaataaattatttttcttctttctatggaaatctggctccagtgtttaaaaagctcagttttctaagctcctctgtctctagataatgccttttcaaaatgaggttgttgtctaaccttaggttggatgtataatccatctgggccctgtaatttgagacctgaagagactggtaagtgcttttcttgatcattcattcagtaactgtttgagtgcctatggcaggcaaggcatcggaggaagcagagatgttggaaacagggtccctgcatgctcatgagctcacaggttgtttggggagagattgattgttcctatgcatagagctgtcagatgatgtcatgcctgacctttggtgagaggcaggtacataccgcttagtccctgctccttgggctgagataagagggccacttgagctcaggacctggcggccagcccaggcaacacagcgagaccagttgagg

SEQ ID NO: 24572 - DNA, 1173 bp, Mus musculus
caaatagagcagctgcccctgtgtgttcttcaaagacacttcaggctgaggtcccatcatcagactgtgtccaaaaagcaagcaaacctacttcaagcacacagatcatggtgaagaccaacatgtatcataatgaaaaggtgaattttcatgttgaatgtaaagactatgtaaaaaaagcaaaagtcaagatcaaccctgtgcaacagggccggcccttgctgagccaggtccacatagatgcagcaaaggagaacacctgctactgtggagctgtggcaaagagacaggagagaaggggggtggagccgcatcagggtcggggcactcctgctttgcctttcaaagaaacccaggagctattacttagtcctctgacgcaggatagtcctgggttggttgccacagcagagagtggcagcctttctgccagcacttctgtttcagattcatcccagaaaaaagaagagcacaattattctctttttgtctctgacaacatgagagaacagccaaccaaatacagtcctgaagatgatgaggatgatgaagatgagtttgatgatgaggaccatgatgaagggtttggcagcgagcatgagctttctgaaaatgaagaggaggaagaagaggaagaggattatgaggatgacagagatgatgatatcagcgacacgttctctgaaccaggtataactcttggagcctactaaattgacctttctagtcactgtttgaaataggaagcttgttttggatggttgctatattttagttcggggattaaaaaaataaataaataacttaatgtctttatttggatcaaaagtagctttcttttagccacatgattctaaaatcatttgtgtttatgatcatttgtgcctatgtcatagtttatcttgattctttgagggcttattcttattttttttcttttttcttttgttaagtgatctactttgccaccctcttgagcacttaagtaaaaactccaagagtatgttggtttaaaatcgggtgccctgttttgcatatgcccctcttgtggctaagatgggtgtatgcagaatagagtcaagtggtgtcatctcatgtcactcatgctcagttaacaaagcctgctcagtaaacagtctgaagacaagcattttctttgtctgctgtattaag

SEQ ID NO: 24573 - DNA, 1094 bp, Mus musculus
cagactatcctcaggcctagatacagactatactcagacctagatacagactatcctcaggcctagatacagactatcctcaggcctaggtacagactatcctcaggcctaggtacagactatcctcaggcctagatacagactatcctcaggcctagatacagactatcctcaggcctagatacagactatcctcaggcctaggtacagactatcctcaggcctagatacagactatactcagacctagatacagactatcctcaggcctagatacagactatcctcaggcctagatacagactatcctcaggcctagatacagactatcctcagacctagatacagactatcctcaggcctaggtacagactatcctcaggcctaggtacagactatcctcaggcctagatacagactatcctcaggcctaggtacagactatcctcaggcaggctcagctgtttttctcagtgtgcactttgaggtctctgttacttgactttgctctgcttctcctgggtgcaccttatcacctgaaggtcacatcacccttggttatctctgctctttgttgcttctttaaccttttttatctgctttttatttcattttcactttttcttattcagtattcttgtgtcatgttgtagggtatgagtgcattcgtgtgtgtgtgtgtgagtgtgtgtgtgtgtcttgggcatggaagtcagggtctcagatatacttgtcaagaatactatcactggatgtaatgtatgagaaaaggagaaggaggaagaagaggaggagaaggaggaagaggaggaggaaaaggaagaggaggaagagagaaaaagaaagaaggaaggaaagaaagaaagaaagaaagaaagaaagaaagagaaagagaaagaagagaaagggagagagaaagaaagaagacggtgacaataaaaagaatactaccactcactcctcttgttgctttcattttttttttttaacttttattttctgtgtcctatgtctgtgtttaccatgtcagaggacaacttggaggactggttgtttccttctatgtggatcctggggatcaaactgaggttgtc

SEQ ID NO: 24574 - DNA, 4772 bp, Mus musculus
gcagagtgttttgggtgagtgaatatattagtataatgctgagtgttaaggtgggtttatgctctgaaccacacaaaaataccgaggaagcattttttttcaaagtccatttagattgtttttagaatgactgctttttgttctaattttttacagccattaatctcacatgtacatggcgcacccagcactcacgtgtgtaccatgtttagatgtttttcagaactcaatatgatatataaaaatacatatatatatatatatatatatacatacatatatatatatagaattgtctgtgcaagtaagaaaaagcatactctttgtgccttgtattttggggaaactctaaaactggtaatattttgtatgatgaaaatcctaatgaggaaaaccaagatatatagatgagaaaattatggggtttaaatgtctttttgttccaactctttttcagatttttttgaatgtatataggactatgtcaaaatgtagatatatgccacagagtctgtgtattgtataaaaaaaaaaacaaaaaacaaaaacaaacaaaaaaagatggctctagagaactcctatttcggtacttgaccggaagaaaatacttgcacattattgcgattgttttattttttctaccaaagacaaatgcaactggtatggcagactgccagtctaagtaaagttttgcacagcttacatgatactgtatgaatgtatgaaacagagaaaaaattaaaaggtcagggttagggatcttactcaactgtgaactttatttctgtttgggtccaattatctacagaaggagcatccatacatccaaatattattttgctgtcctctagtttgcttccatagtagataagttggtggccacttaggtgtcttttatttctgcagttattgtaggaaattttaatatatttcatattagtaagctattgataaaatagtttttgactttgaaaattaaagtttatttagcttattgtagtatacttccaccaaacaaccaaaatacagattatttttatcgtattatgtatatatatatgtaaagagataaaaaagctaaaaatatctaatactttagttgccacttttccaattgatgttattgtgcatgtaatattttcaaagatcaacacaagcttaaaacaaatttataaatttttatatttttgtacaggtattttcttcaaacttacatgtgacttatcttgtgtagtttctagacttgagaaacatgaccacgcttagttttaggtgctcttctttgctttagtggtcagttgtagctgtgctcaagctttgcctcttgatgagagattcctatgccccacaggtccttccatcccgtctttcttgactgttttatctcagatcttgtgtttggaactatgaaaactggtggcttcaaaagtaaaaacaaacatatctagaagaaaagcctgagatgtcagacatagttgctgtttctccaccaccttttgatagaactaagatagctgtccttggtctgtctgcacaggagtttctttcctttttctttctccccttttgtaagctatagcacatgaagtttcaattagaaaacacagttacaatccaaaaatgtgtctgacttgcctctttgacatcatgaatcataagaaaccaagacttgtcttgacacgttagctgaaactgtgacaaggttcctgtgtgtttggtggaaatgtacctttagttcatccaccctaacagataataagctcacgtgtcatggttaacagaattaaagttttactttctatgtgggaaaaggcaaaccataggttcacaaatggaagtgtctgaagtctcgaaagtgttccagaacctggcggttttcagtcaaatgactgtcacttcatgatcgcgagtcagttggcgaagtttataaaattgcccctttctagctaccctgttttaggaattctggttttttgatacctttttcttgtctgcaaaccagaatttgatttttggtcttgcatttcaaaacactttgaatctgtttagtagattccatacccgtgcatttcagtgttttatatgtactccttaagttaaatagttgaaagcctttaaatagttgagctttttaatgttgactctttattttgtacctatttatatatgtatgtatatcttaggaaagcactttgttataaaattgcattttatatgattcctgccatttgctgctaaacttgggctggtcagaacgctgcagcgatacttgatctaaataaaaacctggcagtaaaatgtagagtgcaagttaaatcctcttgctgtttaagatgacataggcaagctgtgcagctttacattttaaccaggggactctgtggcatttaaaaccgtctagaaatggttgtacttttaatgccagtaatgaactgcttcctctattgtctttaaaatatcctacacctagtgtatcacaggcggttctcacaagtgtgtaaaaacccagcagttgtatatgttgtattttaaaaaatcgtggtttgtatttttgggtggaaatcgttagagtgagagctgtctagaggttttctgtgttcatacatggtatacagagagctcatgaagtccagagccttcccttaagtgaaggaaggcattgtgaattctcctcagatcaacccaccgttccaaaggcaaccataaactgactacagtactactacagtaaaaaataacaatgaaccttctgcttcctggcttcagatacactggattctttagtctgtgcccacatgagagcatgctgccgggctgctcctacataagtttcctgtgagtcttgcaatcagtgtggttgcttgctgtgctgtaccatgtatgtgggtcctcatcctttccatgtccttcatgagcgagttgggtgtggcttaaccttgtgccttacttgtacacttaaatgatgcatcttcattccttccatcccattcccaaaccttaactctgttctttttgtaagagaatcacaactattccagaagcatcatgaaggatttcagatgggcgtcgtttcatagttccctctctttgtagttgttttatacttgtaggagagaacagttttgaatgatctttgagtaatcgtgttacgtccttctctctggcttctgtgaggctgtcctgcgtctctgatgcttggcttcgctcacaccttagcaagtctgcatttacaggcagatgtgctcacttcatctgctcgaaagtgattcttttgttttccagaagtttttaggagaagagtacctattttgtttgttttttacaacagatgacaagtctctttaaaagaaactgaagtacagtacttttgaaatacaatgctattggtatgaagttctcttttatatataatattcatacaattatctgatgtttgccttcattaataaagctgttagtttattcaccaaaatgtcaagaatggatgtgcttttctttattccatatatttaaacaatattttagctgctaagatttagttaacttcctaagaaatgaattcaagttgccttcaacaagaattaacaaaactcatgtcccctttctttatatagtcttcctaaacttctgttcaactactttctgattaattatgtgacagaatgttagcatctctctaaatcttgaaacttgaattttgagaatgcattgatttcagtgttaatggaaaaggtctcagctatgtttctagtggagtcttttgtggaataccatttcccatggaactgcgaccacttgcacaactttgcacagaactgcagtcttgttcttccctggatcgtgacaaatgagtcccacacagtgccgtcatacttgtggattctaccgtgatttttgtcatcttaaataagggcattatgagaaaatgactccatgtctttttttttttaatatttcaaacacagtgggatgaaacaacatcagaagtagggatggtggtttcgttttaaggaataagcatgttggaggaatgtgatgaaaatgtactactgagagttccacacttccacagcaagtgggattatgtgttgaagcatagtccccatgcttagtaaactgactgaaatagaaattacacctaggaactgcactatgccaaattgccattttgttttgaagagacttttggaggtggcaataaggtgatgaaatcttatagctacttccaaatagtattttggaattgaagactagtaaagagcacccaggtttgtgtctcagcgtgccaagtgtgaactgggcttgcctctttagtcacagtgtaaacacctagtgtagttattcagttccaggtgccagaagcgggactgattctgtgtcttgccctttgtcctttggggtttttttgtttggttgtttgttttcagaactaaataacaaaactgtatgtgtactgtatttgcttctccacatgttttgcgacactgtactcccactgcctgctattgtcttcttgccctagagtctgtcctgtggtgtagcatttgtggttaacaatgactccggagctgctaacacggaagggcaagaatacaaagcatttgctcctatggtttggcagcctcttcgaatagttgcccttagggtcctgtctgtgatacgatcataaatactccgtagttttgtttattccctgcccccagctggagctgtgactctttattggattcagtcttgtcttttgtctagaaagaattgttatctcgttcacg

SEQ ID NO: 24575 - DNA, 1160 bp, Mus musculus
gtctggcgtgcgcaagactcaagagggtatatgcccccaaatcaacaaactgctccaacaagggattttggtcccatgcaaatccccttggaacactcctctacttccagtaaaaaaaaaaaaacagggaccagtgactaccgtccagtccaggaccttagagaagtcaacaagagagttcaagacatacagcccacggtgccaaatccttataacctccttagcaccttgccacctggtcggacatggtacacagtcctgtatctcaaagacacttttttctgtttgaggttacaccccaacagccagcccttgttcgctttcgaatggcgagactccgagagtggacaagccggacagctcacatggacgaggctgcctcagggattcaagaactcgcccactttgttcggtgaagccctacaccgagatcttgctcttttcctagccaataacccacaggtgactcttctgcaatatgtagatgacctgctcctagctgcagaaacacgcgaggactgtgaaattgggacccaaaacctcctgggcaagttaggtaagctggggtatcgggcctctgctaaaaaggctcagttatgccagatagaagtgacctacctaggatatgtcctgagaaatggacaacggtggctcacagaagccagaaaacaagctgttatgcagatcccggccccaaccactgtttgccaggtaagagagttcctggggaccgccgggttttgcagactctggattcccggatttgccacactggcagctcccttgtatccactaaccaaagagaaaggggaattcacctggaccagagaacatcagctagcctttgaaactctcaaaaaggcactgatgcaggctccagcattggccctgccagatttaaacaaacctttcaccctatacattgatgaaagaaatggagtggcaaggggagtccttaccccggttttgggaccatggaagcgcctggtagcctacctatcaaagtaactggacccagtagccagtggatggccctcctgcctgcgagcgatagcagccacagctatgctagtaagagatgctgacaaactgactatgggccagaatgttaccatagtggccccacactctcttgagagcatcgtcaggcaaccaccgga

SEQ ID NO: 24576 - DNA, 1192 bp, Mus musculus
cacttaagagggcggggctaccgggccacttgagggccgggattggccaggtctggagactccgggaaggcagggctgctcctgtcacgtggtgcacactgttttcgcgtcacgtggctactgcaggtaagaggcggccgctccgccggggctcggggtccttcgtccgtgcaatgagcggccattgatttcttcttttctctaccagcgcgggctgcatgaactgggggcgggcgcccggcgtcttgctcggcggaggggtgagtctggccccgccttttccggtctcgaagtctcacccagcttctgcagcggaacagaggagctgtcccaagtttcttttaagtttcagggacatttttttttttcttcctggtgcagaaaaggcagcgcagaggcttggtgtctgccccagaaggcagcccaggtgcaatttcctggggcagttgtggggacactgaatccgccctcccccctgctccaggccactctgctcctgtcgtttctttggatgccagcgctactgccggtggcttcccgccttctgttgctaccccgagctctgctgtcaatggcttctggaagccctccgtcccagccccctccggcctcgggctccggctacgttccaggatcagtctctgcagcctttgtcacttgtcccaacgaaaaagtcgccaaggagatcgccaggtggggacctcggccagatgacctagagagagcgttggggttaggggaagggtgctgtttccgggtcgtgcacactctgatctcgcttcaccctcagggcagtggtagagaagcgtctggcagcctgcgtcaacctcatcccgcagatcacatccatgtgagttgtcagttagaaacggaaatctacccggaggggctgagagctttttctgggagaaatcttcctttcccaagactttgttcccttctttctctgacctcttcagctatgaatggaaaggaaagatcgaggaagatagtgaggtgctgatggtgagaaaattccccccctgcctggctcctttgacaactctggccctctcctgacaccagttctctaccccgttggttgaactatgtctgtctttgccctttagatgattaaaacccaaagctccctggtccctgctctgacagagtttgttcggtaagaactttgagattttcttttggtggtggt

SEQ ID NO: 24577 - DNA, 1263 bp, Mus musculus
gcccctcccactctgctgtgggtcctaaggctcacactcacactggcaccttcaccaaggaagccatcttgctggccctcagtgcgtttgactcatcacctaagcatctcctagcattaatcctgtaggaattcctttctctgttagcatccaaggctgctgtaaaaaaagtcaccgtgaactgagccagccaaagctcttctctcacagatcaggggtctaaagtccaagatgagcaaggccatgtcagttctgaaagctgtcaccttcagtctgtccctctttacatggctagcttccttctgtatgtctctaatgtgataaagtcaccaattgctggattaagagatgacattaatcaagtatgccctcatctgaattgacatctgccaggacactatttctcagattctagagagaaataattcgccactattcgaacccagtgtacttactgctctccttacggccaccatcttgatctcgtgtgctcactgtctttctggtgtgtctgtcttcacccttttatctgccccaaccacttcctcatgccaggacaacagccgccgagtagataacgtgctgaagctatggatcatagaggctcgagagctgccccccaagaagagatattactgtgagctgtgcctggacgacatgctgtatgcacgaaccacctccaagccccgctcggcttcaggagacaccgtcttttggggcgagcactttgagtttaacaacctgcctgccgtccgggcccttcggctgcatctgtaccgtgactcagacaaaaagcggaagaaggacaaggctggctacgttggcctggtgactgttccagtggccaccctagctgggcgccacttcacagagcagtggtaccccgtgaccttgccgacaggcagtgggggctctgggggcatgggctcggggggaggaggagggtcagggggtggctcagggggcaaagggaaaggaggttgtcctgctgtgagactgaaagcccgttaccagacgatgagcatcctgcccatggagctgtataaggagtttgcagagtatgtgaccaaccattaccggatgctatgtgcagtgctggagcctgccctgaatgtcaaaggcaaggaagaggtggccagtgcactggttcacatcctgcagagcacaggcaaggccaaggtgagcactgtggccccagggaaagctggcttgagcatggctgccagcttgtgggcggtgaagagagaataagatcatgaggtt

SEQ ID NO: 24578 - DNA, 1364 bp, Mus musculus
tcttccctggtgtctgtttttcttctcctcctttccttgtctctctcccaccctccgtctctctcccacgtgtctatctcccctcacccctctccccctctccatttctctctccagaatctgttcctctactgtggccctcttcttcagcagcctcctgtctttctcctgcagtccctccctcccggtctctctcacctgtctccacaccctcaccttctaccaccccctcagcatgttccctgaaagctgagggtctctggggctcagtcccggtctctctttctctctttctctctctgtctccccaccccttccccccagcgtgttcccgagggagctgaaggaggtgtttgcatcttggcggctgcgctgcgcagagcggggccgagaggacattgctgacaggctgatcagcgcctcgctcttcctgcgcttcctctgcccggccattatgtcgcccagtctatttgggcttatgcaggagtacccagatgagcagacctcacgaaccctcaccctcatcgccaaggtcatccagaacctggccaacttttccaagtgagggaaacttcaggaagggtgggatggccgtgggcttctggaagggtctcccaagtcaccacagcatctgtgcccctgtccaggtttacctcaaaggaggacttcctgggcttcatgaatgagtttctggagctggagtggggctctatgcagcagttcttgtatgagatatccaacctggacaccttgaccaacagcagcagttttgagggctatatagacttgggccgcgagctctccacacttcacgccctgctctgggaggtgctgccccagctcagcaaggtcagtggaggtcccctctgtcccatctccaggtacttccagaggcacctgggctgagagattatctctgcacagaactcttgtcaccttcctgttcccagaaatgtcaccaccacttccagtacacatcacaaaacctctacccatggcctctgaggccctcttagaactgggcacttactcatcaagtgacagccttgtccttccaggaagccctcctgaagctgggcccactgccccggctcctcaatgacatcagcacagccctgaggaaccctaacatccaaaggcagccaagccgccagagtgaacggactcggtctcagcccatggtgctgcgagggccatcagccgagatgcagggctacatgatgcgggacctcaataggtgagcaccctgcttccatgctgctatgctctaggagcctgaatgctcctggatgcttctcgctgggcctgtctgtatctctagcgctcagaagggaagaagggaaagttcttagggacagtggtaa

SEQ ID NO: 24579 - DNA, 2125 bp, Mus musculus
cccctgcagatgggaagtgctttgcttgcttgtgtggaaaacggtttgcagtaaagccgaaacgagaccgacacatcatgttgacgttcagccttcgcccttttggatgtggcatctgtaataaacgtttcaagttgaagcatcatctaacagagcacatgaagacccatgcgagagctctgcatgcgtgtccccattgtggccgtcgattccgtgtccaggccttcttccttcgccaccgggacttatgcaagggccagggctggcccacttaccactggacttacaaatgactactggtgctctctagtgatttctaggacaagatagcccctgctgctgctggactcttaccttcaccacctcagtcctggattgtataatcattccaagagattatatatattgtcatgaaccccttactcttgggtatgggtctcaccctggtagtccaggtttagacagactttagaaaatcatgcttctggtcacttaacctaaatggccctttttgtattgatagccagtgaaggaactgctgagctcagattaatgagagaggagttggggcatagtcacccagtaactcttaacttcatcttcatgggggggagagggagctggtctccaactaggaatgcatttgattcagagctcaagtaattgccagactaaggtctgagcggcttctccctccctgttagcagtattctgtttctgtactttctgtcattttccagatgctttttaggttctcaccagtatacacctttcccaaatatccttttaaaaatacttgagtggggctggagagatggctcagttattaaaagcactctgctcttctagaagtcctgagttcaattcccagcaaccacatggtggctcacaaccatctaaaatggatctgatgccctcttctggcatgcaggcatacatgcagacagagcattcatacatttaagaaaaatgtatttgaacatgcaacaagtgtggtgcacacatttaattacaacacagaggaggcagaggcaggtggatctcttctaagttcaaggccagccagggctacacatggtgagaccctatctttaggggtaaaaatagtacttgagcactttagcaaactgagcatttcatattctattctgaaagtccatagtagagtgtattccctcagcagccttcaccttgtccgcctttcactaccactgataacttgcttatgatcacaatgacagatatgacccacgaactcaggagatggcaggtgacctacaaagctctcagggtggcatttgctctctgagcagatcgccctgcttagaggaactcagggttgaaaccacacgtggtgaagtctgcagaggagctacaatgggaccgtactgctttcttcacccacacttggtagaggtagaggggtagatagtagaatggaggtgaagggaaatttaaggttgttaataaactctgccctgaaatctaaactgacagtagactggcttgagtgagtgctgtggagatgcagagctgagctgcaggagagctgagctgcaggagatgagtgtgttcctttcccagccagttacatcaatgggagaagagtgagctggtatcagagacttgacatggagagtgctatcctggactcgggcaggccctgctgctgctgaggaccctcaggtgagttactttatgtctcagagtctgacctgctgctactgcttggttctctgtcttggtttgtcgagatctcgtcttactatatagcccagactggccacaaactcaggatcctccttcctcagcctgtgtaatactaggattacaagcacatattgacatgtcaggtttatgtccactttttgaaaggctttgggtcacataatattagcttaaattatttcctaatttctggcagtatgcataatgttagatggcactttgatttattctataaatacttagaacagagcagtgtgcgagcccctggttttccctcattggaacaatgtctcagtgagtaagagtactcagtgctcaaacatgaagacctgagttcagatcctagcactcacggaaaaaaacccaggttttgggctgaacagagggttccacgggc

SEQ ID NO: 24580 - DNA, 1400 bp, Mus musculus
tgaaccccatcctgtctcagaggcactgactgacgcactggggggggtgggtgggggatggagaggctgggccactaattcccagaaaactaggtttgtttttatactaccctttagatacaatccaccctttttctccactgtgcccaaagtcagaacatggagggcttggggactggtggttcgaacctgtgttcccaacactcctgctactttggaaggtcagcccttgagaagagacctgagcacaatccttgccctccctacattggctcccaagaccaactgtaggagactgcatgacctacttcacccccacctcatcgtccatttccccaaccctaccccccacaccccctcccctcctatctcctaccccaatccatccatttttgccttggcggctggactctcagggattctgagcccagagtgagggcagaggtgagagttcagaccacagctgtctgaacacatccatcaggctctccaatcctgtgtccttcctgacccgtgctcccaacctagtgggtaggggaagacgccactttctccccagggctctcaggtgagcctgcctgctggggcggaggccttcctgacagacggacggacagagcctcagactcagccactatgacaggggagggggtgggcactctttggaggtgtccacactagagaactactccagcagaagcaactgtggacctgggtgcagttcctccccggaacctatgattacttgaaccccaccttcactccttgtctgcctaggtcctcctcgggttgggtggggtgggtgtttttctctgtcttgcacaacataggggtgagaagttttgattaagccaaatgtatcggggaagagggggaggcagagggtgctctgtgtctggaaataaactgtgcaatgcccccaacacctcgcctggcatctttacactccactgactgtcctatgttagactgcaggaagctggacacactgctgtaatcccagctccgcgctacataggttctcatgccgagatcgcaagatcctgaagtatgaagctgcagttggggctggagagacggctcagcagttaagagcactgactgctcttaaatctttgggctggagtgagcggggccaaagtgagaagttaaaaaaaaatagaaaaaaaagatcctgggttatgaatctgcagatggttggaaaaccaggacaaatcccaaccaatcctttgtaatgaccccggctcttcaccccttacatcagttatttatttatttatttaggttttttgagacagggtttctctgtatagccctggctgtcctggagctcactttgtagaccaggctggcctcgaactcagaaatctgcctatctctgcctcccgagtgctgggatt

SEQ ID NO: 24581 - DNA, 1205 bp, Mus musculus
taaatcaagtgtctgtcactaggattcctgggaattcatgaactcttagcccctggtctcttacctgacactcttggggcttgctttgtccgggtgcattctcgccccatgtacaccagcgagcattagtttaagggtgcaccaaggtctgtgtgcctcagagcatagcagtagaggcggggcccccattcttggtacccatactgtggaggtgtggggtgcagaggaagaggatgctatggggagtggtgagcagaaagcagccgcggtgtgtggcaccgtcgctcaccggctgtgtcctctcacctaggaactcctacgtgcggctgcggcacctctgcaccaacacctggatccagagtaccaacgcgcccatcgacgtggaggaggaacggcctatccggctcatggtgagagcccttgtgctatatgtggggctggggcctaggctgcatcatggccctggcatcccgctgacccttgtctctgcagttgggcacatgccccaccaaggaggacaaagaggcctttgccattgtgtcggttcctgtgtcggagatccgcgacctggactttgccaacgacgccagctccatgctggccagcgccgtggagaaactcaacgaaggcttcatcagccagaacgaccgcaggtgcactgggatagggatggagttgtgggcagtgtggagtccagggagggcaggctggcagggtcagagtgagtctgcctgcctatgtgagcacatgctggcaggccccctgggagctggcccctcagttcttcatgcttctggtgttacccttcgccaggtttgtcatccagctgttggaggacttggtgttttttgtcagcgatgttcccaacaatgggcagaatgtcctggacatcatggtcaccaagcccaaccgggagcggcagaagctgatgcgggagcagaacatacttaagcaggtgtgtgtgctcttcaggggcttatagctctccagtggggctcatggctctcctgcagtgttcatagctctccagtggggctcatggctctccagcgggactcatggctctcccgcagtgttcatggctctccagtggggctcatggctctcccgcggtgttcatggctctccagtggggctcatggctccccagcggggctcatggctctcctgcagtgttcatagctctccagtggggctcatggctc

SEQ ID NO: 24582 - DNA, 1206 bp, Mus musculus
agatgcctgcctagaattttctatcaggggtctgggaacatggctcaatcatagatgctagaattgatcaatgtggggctcagggtgtggatcaggggtagagtccttgcctagatccagccattggtagaggtagggatttgggtccactgtagagcacatgagaacctaccaatgaggagccaaggatgtagatcaggaatagagcagttgcagcaagcatgcaagcaaggcaggggccgaggtgctgtcccaagcattggaggaaaatgtatctgagccatgaccacgtgccaggcacttccttaagtacccggcaggattcacctcattttgactcctcctgcgggagaactgtggacttcattatggagggaggaccctgaagcccacagaggctgggatcctgctgagtaagacagctccgggcttctgtgaagggaagctctggagttagggtcaggactcctgggacgacgaggggtacagcaggacgggagagtccctcttactctctacacccctcagatctttggcatcctgaaggctccattccgtgacaaggggggtgaaggaccactagtgcggctggaggaactgtctgaccagaagaacgccccctaccagtacatgttccgtctctgctaccgggtgttgcggcattctcaggaggactaccgcaagaatcaggtgggcactgcgcagtccctgctgggcgtgagccctgtcttttctcctcagcagggtccctgtgggcacagagggcagcctggcaccaagtacaggagggcaccagatggtgggactgatttctggggtgcacagagcctgccctaggctctggtgttactatcttaaaatactgcatctttctcctcatcttcttctggttcattgaattgagagtgtctcacggtgtagaccaggctggcctggaactcgctatgcaaactacagagagatccacctgtctctgcctcccgagtgctgggattaaaggtgtgtgccacctcctagtgtaaaattcgtcacttttgaaccaaggtttcactatttattttataccatttagccagtcttgctaagcaggcaaggccctggtagggccggatcacagcttagaatctgtgtaagggaatcggtgtaaggtaaagccgccgccctttagccctggcggctgcatttgcatctccccctgaagtgagc

SEQ ID NO: 24583 - DNA, 1165 bp, Mus musculus
acctttgtcagtctcgtgcgcaagaacagggagcccaggtgcccgctgcacactctctgcctgccctctgcccccttccagcctctggtgctggctttgttttgagacagggtctcactgtgcaaccctggctgtcctgaaactcactttgtagaccaggctggcctcgaattcacagatacccctgcctctgcctccagagtgctaggattaaaggcgtgcgctactgtgctgggtttctgatgctgcttgttaactgcatggtgtatcgcttcctttccagtgcttgggggtgtgtgtgtgtatgtggctcagtgtagccataagagatgcaaattcccattccatggtgagccccaagccctctgctggcgactgagccggtgcctgctctgacccctgactccatctcttggccctgtcccacgggggtgtcaggagctgctgccccctggacatctgggaaggagggtgggtgaagcttctggcttgcggcagcttctgagtctgttgctggccctattgattcaccagattcctggactacctctccgacctgtgcgtgtccaaccgtatcgccatccctgtcacccaagagctgatttgcaaatgtgtgctggaccctaagaacagtgacattcttatccagactgagtgagtagcagccccatcctgctgcggctcgggttagtcctgactttctttttatttgtaggtgtgtgcgcagtgcctgtagtgcccagctttaagagtggggtggggtggggtggatggagggttggggacactgagtgggaaatgagccacagcctcattctgggaagtacagcagcttagagacctgggctgtgctcctcctaccgggggtgtgtgtgtgtgtgtgtgtgtgtgtgtgtgtgtgtccatagtgagactcggagcactgggacaatctcctgacattgctgccacctgcaggctgcggccagtgaaggagatggctcagtctcacgagtacctcagcatcgagtactcagaggaggaggtgtggctcacatggacggacaggaacaatgagcaccacgagaagagcgtgaggcagctggcccaggaggcgagggctggcaacgcacacgatgagaacgtgctcagctactacaggtgcccccgaccactccccacctcc

SEQ ID NO: 24584 - DNA, 1286 bp, Mus musculus
ggctgagacatgtcctatatgggttgtatagaaggctcttgctaaccacagctgtgctccaggtagctctctcacacctcatagcaaccctgggaagtaggtcacactgtctcctgcaaagctggggaaccagcatggagtggaagagcttgcctggtgtttcagggctaagccaccgttcctacccagggtggcctggctccaggaccctgatgggtaaccctgaagtgtgtggaggagggagagacatgacgtcactcacagagaagcctctgttatcgctctcatctgagcctcacgcctttcaccagctggctcttccctctctcccagctacctgcttcctgtaaggacctgtcccagcccagccagaaaacatctaccctcctttaccaggaggggtcacatcctctctgtgaagcgttggtcctcaccagggccatgccggttacctgctgcctctgactcagggctacctacaggtaccagttgaagctgtttgcccgcatgtgcctggaccgccagtacttggccattgatgagatctccaagcagctgggtgtcgagctgcttttcctgtgcatggctgacgagatgctgccctttgacctccgcgcctcattctgccatctgatgctacatgtgcacgtggaccgcgaccctcaggagctggtgacccctgtcaagtttgcccgcctctggacagagatccccacggccatcaccattaaagagtgagagtctggagggtgggaggctagtcaatgtggggcgggggtggggtggggcggggcggggcatggggaccctcatgcctcctgcttccatttttagctatgattccaatctcaacgcgtcgagagatgacaaaaaaaacaagtttgccagcaccatggagttcgtagaagattacctcaacaacgtggtcagcgaggccgtgccctttgccaacgacgagaagaacatactcacctttgaggtgggctgtggatccttggggctggaggggagtggggccatggtcctgcccctccctacctccccacccgaccttgtcggtcagggatggattgtaggatccatgatcccctttttctggtgccttcagcccagttatccttgagatagctaagatctcccccaatggacagtttcccccggttcagtacttggctgaatccactgaacccatcaaccagggtcctgccttcatcctggttttctctgccctatttggaccccaacagagcctcagtctccccctgaacaatcatgacctagggccc

SEQ ID NO: 24585 - DNA, 1107 bp, Mus musculus
ggacttcctttctggggtgggtgtgtggggtgacagtggacacgcacaggtgactggtggcgacaccagatagggcgacagggcgtgcttagtcctccaagctcctgccttcttcctgttggattttggggaggtctagcctacgtcaacctgcacccccatgcatgcctgtgagctcgatgcagtcagaagggtgggcagagccttgacagcctctggcttgatttgcatctgtcattcgtgcagagcttggtgtctgcaggggctgcctgggtgttgggtccagagtcagagaccctactatctgtgtgacagtctctgtgtgagccagcagggccaggagcggcttcctgggacagactagagaaacactatggtcagacagacattgggatccttgtgaccttgttgctgtcttctctagccagccccctggggatgccacacggagctgccacatttatgggcacatgtagtggggacaagatggactgtgtctctgaggtctcagtgcctgagatcctagaaggtgagaccggcgtctacaggataggatggggtgggtggggtggaatgggcagccccgggtccgaacatactgaccacccgcagaggacgaggagcccgatagcacggagcgggcctgtgacactctacttatgtgtatcgtgaccgtcatgaaccacggactgaggaacggtggtggcgtgggcgacatcctccgcaagccctccaaagatgtgagcaccttcccacccgtcccgtggatgctcccacacccagccagtttctgtgacactgtccagagctatcagcttcccaccccagcacactgtagaggctacaagggtcaccacggcaaccagtcttggctctgaggcttggggaggtgtgggccatcagcagtcagtggcttcctcagcctagagagggaggacaaggtggagcctcagtttggcttgggcggccaagctgtgtccatcactgatctctggcttagaccaaggttctggaatgtgagaggcgcggcatccgggctgctgatccgggagctcgcagctgccccccatcccccttaaccaagttagaggcagaaacaagccctgt

SEQ ID NO: 24586 - DNA, 1709 bp, Mus musculus
ccctggtgagcggcgagggggagggggagcagaatgagatccgcatcctgcaggagaagctcggctccaccatgaagctggtgtcgcacctcacctcccagctcaatgaactcaaggagcaggtgtgttcccagtctcagtgtcctaagcttctgtaccatgcagggtgagagccatccaagtcacagggaaccctggttcaggtggagtcttgtgcagcagcctggaagagcctccaaggcctgcggtggtgggaacctcctccgcctgtagcagcagctacccagtgcagctccctagcccctcgctgtggtctcccgactgcacccgatcaagcgtttgacttgccaactgagggtgactgggggcgactggggctgaccatctgccatcagagcttaatggtagctgggccctttggggaggatgcagactttcccggggctgtggggaaggcagctaggccacctgacgtcttgtttaactcagatgacggagcagcggaaacggaggcagcgtctgggctttgtggatgtgcagaactgcatgagccgctgagcagagccaccgaggccccctgcaggaggtccgctgcagatggcactgcccttccttcaggtcaggtggcccaccaccctctggaagccaggtgcccaccccacctccagctctgctggcaatctccctcccccaaggcaaactggccagcaggagtgcttcacagcagtcctgcttagtaccgttgaagagactcagtttaccttagtgccttagaggatgctaggtcctctgactgacattcctcagtggtcctcacaggtggttataggggggctgcctctcacctccgagcactacattgtggctgtcccctgcccgcctgcccgccttctgtcctggatcaggaagatggtagcctgctgttagtagcttcacagggcttttatgtttaacttattcccaggggccgtcccaccctgctgtgcctgcacagttcccagtgcctgtgcctgcgcctgctggggacagtgtggccctgtcccagtagcttgatgactcagggtggaccttgctcccaggacttgtctctccccaggctttgtaggcaagcctcacaagccgagggacaggaccgggctgtgtgaaagtggcttttgacagcttctctctttttggtgtaatgttttacatgtcctgtgtcctggggactaatgtgttaattgccttaaataaattaatagactccaagtccatccacagggtcatacttctgtctcccgcacagctggaggccacagaggccaacaccctgctggccctgtcacctaccgcaccctgcttggtccctttgctcacctgtaggacatcccagtgggatttgagcacctgacagaagtgaggctctaagcagttacagtaaggtggctgtgtacttgggcatgtgcgtttgtggtgggctggagtagcctgagtgggagggccaggcagggtgctcatgctggcctcccttccctttgctgttggccacaggatgccctctccacacacacacacacacacacacacacacacacacacgacagggggctgacaatcctccctggggctgggagggatgccctgggctgtatgctctacagcacccctgctcaggctgaagcacctgaggcagatgaatgagttccaaaccaggagggtgggagaaacca

SEQ ID NO: 24587 - DNA, 1659 bp, Mus musculus
tgctgtggaattcctggcttccaatgaatctcggatccagactgagtcccaccgagtggccggggaggacatgctggtgtggagatggactaagccttcctctttctctgattcagagcgatagggcagggcctgttaccgccagcctgacccagccacccagctggggcaaggacacagacctttggtgctcattcacacctgccttgattgccctccgggtctcaggtctggaacatgtgggcttacttagggtagccgggagaacaggggagcccttcctctatgtcagtattactgactgacaggggagagtggcttgttctccctggataaaaagatgggcagtggttggaaccctggaggtcctgcacacagctagacagcacggtgatcctgaagcccctcgcttggaaggtgggttgggtggtggggcaaagcttggtccatgtgccttttcgcttccagggagcttaaggggaggggaggaacccagcccactcctgcatgggcctctgtccagaaggggacgatgttatagaaggtaggagcagctggaggggaccaagcagaggtggctggggtctggaaggcgtggggagtccagccacagctgcctgtgcctcagagctgctcacaggtcagcagtgccacctgagccagggtggagctcagcctcctcacctacttactgtgcacaggcttcctggctgcttagccacacaggtagggtgcagcatcgtggctgcacactgccctctgcaggccacatggagtagtgtgggccattagccctcggctatggaggacctgctctaaatacacccagtggggggcctcattagctgagagggaggctttcgagcaactcttcaggcgggtctcacctacagcagcaggaggacagcccctggaggtgacgtgcagctgcctccagaagacacaagacacccccttttggacctattgctggtctctgtttcttaataaagtgtggtctccatgtagcagtatgctcatttcggtctccgtgtagcagtatgctcattgccgtgtgtctgggtggtcagcaggaccgggactgagcaggccccagccagaagacaatggcttttgtattgggggtggaactgttggaaaaataaaatatttattgagaacggatgtggttttatttgtggtgcttcctctgtctccctacagcggagggctggacagggccaggctgccctggccctgggagttaggtaagctgcttacagccacttgagttgcagggtagccatgtggactcagcactgagcccctggtcccaaggctcccagggcttctgagggaagctgcacggagctggtaagcccttgaaggaggcagcttcctgtctctgggcccagcattggtgatgggctgtgacagagttggggtgctttcagaaagctgcaaaacaagctataggcattcacctcttagtccgaaaggctagtggcccagaaacaaggtaacctagctatgtactgtggtcatagccagtcctggcctccttcctgtccacacttggccccatctgtgtggacacgggcttgtcagactcctgccacacacacctgcttggtgagctgtagcggggcccagtgcacaactcaggaagaaaccagcctg

SEQ ID NO: 24588 - DNA, 1220 bp, Mus musculus
agtgctgtgtttgtcactgtggctgtgacaaacacctgacagaagttgctcaagagctacagtggggaaggcacagctcaggaatgttaagcagttggtcacatcacaaccacagtcagtaagggatgaagagagggatgaaggccagggctcacccactttctcctttttttgtattcagtcagcacctcagcccatggggtggccacaaacactttcaggtgggtcttctctgctcagttaatgatctctggaagcagccttagagacaaacccaggtgatataaatccagtcaggctgactgtgaagattaaacatccacgatgtctctaaaagataagagctcggtttaaaatgtattacatccatttatcatgtgtataaatgcatgctgtacactgcggccctgtgagacgctgtctctcagcaccctgctctatgccctacctgcctcctcctctaggaacccctaccccgaccctggagccacctgcccctgaaggcccctgacctctgtcctccaaacccgatgccagttgtttgtcctccttgcaaggtagcagtaggttcagagccatcctcttgctgggctgcccccagactgactcccgtcttcttgtagtgggattttttttttgttactttaaaaacccaaaaaatgttatgtgaatatgtttttgttttaatcccaggtttgggatatgggactgcttccgtttgtctgcaaccgatgactacgattgtctcgtgctctaggaggggcgtgaatcttgccagctgcagatagtttaattctggggactctggagaaggactaaatgtcaaagtcttgagaggggtgggaggtgctccaaaaggaggagaaggaggaggaagtggtggcggaggctgctgctccctcatgctgctcctggttgctgttgttgcggtttgatgggaagaagttggaaatagcctaaagataaagactggactggcccaaaggaactctacacccctaaccagcaggaagtggcctatagaagtctgtggccccttttccctctagtctcctctctctcctgtctagtgttgggagtttggaagggaggtacagatgtaagaaccgagaaaaacagtaaaacaaatatgccaacatactccgacttgggtttttttgtttgttagcttgctttggtttgatacagggtcttataatgtttcttggctaacttggaac

SEQ ID NO: 24589 - DNA, 1204 bp, Mus musculus
ccttccttccagacggatgttgtgtcctactccaaagcacaggggctcggtctcgagagcccagtcctggctttttctccctccttctgcctccgtctgtcttgttggtgacccagttggtccccaccctgtctttgcgtttctcttctgtctctgctctgcatgtgttgtctgtttgggctctctactcctgtatttttctttctgctcccgccctttccccgccatctgccctgctccctgagttgccccaaccctaccactgtcattttctcttctgcaccactggacctcatttccttccagcctctccccctctttgcttcatctaccaactctttcacatcacaaaagagaaaaaaaggggggaatcaaccccccaaaaaagcccaaacaaaaactaatcttgagtgtgtttcgaagtgctcgaagtgctgcgtcctcctggtggcctgtgtgtccctgtggcctgcagcctgctcgcccaccctacccgtctgccatgtgtcctgcccgcctgtccgccttgcccttcctgccaacgacacggagttcagtgcctgagtgtttggtgatggtctctgatgtgtagcatgactgtttttataccgagaacatttctaataaagagaaacacatggttttgcacccggcctgcgtgtccactgcgggcccccgtgctcagccaccgctggtggccagaggccagcaggggcagaaggactgtgaactccagaaggctgctgggagcagggccctgtgagggctttagacttggactgctggcatctcaaacaaagtgagcaggacactgcagagtgctgcagtgcctaagggggttggagagatggcgtggtggttaaatatgtcttacagaagacccaagtttgggtcccagcatccacatagcatagatccaggggatcacctgctctctctgggctaacctgggtacacacctacacacacacacacacacacacacacacacacacacacacaatcaaaaaataaatctttaaagaaaacctgcacctctccaggcaaggacgtctcttgcagaatttggctcaggataccagggtccccagtccagtcctgatttcctatcttcaggtgctagggtgcctgggacccatgtgtcggcacatggcactgtaggggtatgactccttgtggtctgtgtgtctgtctcctcttttgt

SEQ ID NO: 24590 - DNA, 1099 bp, Mus musculus
ggagtcagagaggagaggttgagttttgagtcacttgggacactagcctccttagagagagaatgagtatatataaatgtgtttatgtgtgtgtgtgtgtggtgtgcacagatgtaagcagggtcttttgcacgcaggcatggtcagtggtagatgagctatgtatgaggcacacagggacagtggacatgagggaccggtgtactgagggactcatagctttctgcaaggaggagtatgtgtgtgcacacaggggttcaggtgctggtgggtacatacgggtggccatgcagttgtctgaatgaatctgtgtatattcatattcacccagctgtagggacaggatgtcagccagatgtgtgtgtgtgaggtcaggtaggtgtgtgcaggtgttagcaggagtgcatggttcccctgggtgttgtgtgaggcagtctgggctgttctggcgagccagtggtggctctcctgtcttaactgggattctcagggcttaagagctgtgaggtattcctgtgagccatctaatgaggtaatcctcttttgtgtgaggtcactgctcagccagccttgtgcagattgtggctgtagagtcagccaggatagaggaggttcctgggtttgtacagagtctaagcaccacagtccctgcctgagtgaaagccaaagtggggggtggggggactcagatcccctgtgattctcaccgccctggcgcagagacaggggacaatggtccacacatacaactgttgctctgtgctttgtcccctgtcaaaccctattcattgctgggcagtggtgactgtgaggactctacacagaagctgcagtgctggctggtctggtctatcaaagaacaggatagtagcaggctggccccaaggcagtgaagtcacattgcaggctagccctcacttagactgtcccaaggcctccccccacttactctgcctcgggtgccacctgagttctagaggacctctagactggcttctctagaaggagtcactagccaccacttctgggagccacatatatctgtacacaggggacaccggaaggtgctgggctccaggcgggcggccactctcctacc

SEQ ID NO: 24591 - DNA, 1166 bp, Mus musculus
tgactcgaggagtcaccactatgctctcgagactcagtttctccagatgagtgatgagtttgaaactttcccagatcactggtgtccgggtcacacggtaagttgtctgattctaactctcagttagctctggtgaggtccaggtagctgggcttttggccaacgtccggcctattcaggtgtggagatagagagaaggtctgggcgctgccagcatgtcctgaggccagctctgtggtcctgtcattggcagatagagcggatgcagtggccagggagtggccagcagctgccacgctccatctgcagcctgccctgccagccaggcgagcggaagaagacggtgaagggcatggcttgctgctggcactgcgagccctgcacggggtaccagtaccaggtggaccgctacacctgtaagacctgcccctatgacatgcggcccacggagaaccgcacgagctgccagcccatacccattgtcaagttggagtgggactcaccctgggctgtgctgcccctcttcctggctgtggtgggcattgctgccacgctgttcgtggtggtcacttttgtgcgctacaacgacactccgatcgtcaaggcctcgggccgggagctgagctacgtcctgctggcgggcatctttctctgctatgccaccaccttcctcatgatcgcagagcctgacctggggacctgttcactccgccgcatcttcctggggcttggcatgagcatcagctacgcggccctgctgaccaagaccaaccgcatctaccgcatctttgagcagggcaagcggtcggtcagcgccccacggttcatcagccccgcctcgcagctggccatcaccttcgtcctcatctcgctgcagttgcttggcatctgcgtgtggttcgtggtggacccctcccactcggtggtggacttccaggaccagcggacacttgacccccgcttcgcccggggtgtgctcaagtgtgacatctcggacctgtcgctcatctgcctcctgggctacagcatgctgctgatggtcacgtgtactgtgtatgccatcaagactcgaggcgtgcctgagaccttcaatgaggccaagcccatcggcttcaccatgtacaccacctgcatcgtctggctggccttcatccccatcttttttg

SEQ ID NO: 24592 - DNA, 1154 bp, Mus musculus
actttcctactgtgggtcaggggagattttaagtgacctgcttgccaattccaggcactggcccagcccctttggtatgatactgactcacagactaatcctttgttgggccgtggggtcctaggagtagtggggagatgctcaggcgtggagagggggagagaggtccctggttctctttccctttgccttttagggtatgagatgtgggccaattggtgtctatacagctgaggtaaaggacagtccctactaagccattcacagagcacctggctggctgggaacacaaggttggcacaggccacttgctaagtggaggatttggaagcaaggttcaggaggactgaggatgtagtctgggctcccagggatggcttggtgccccctgagtacccacatctctcctggggcacaccctcagaggatcaagtctagcggctcctgcctcatcccgtgacatggtacaaggcctgttttctgtgctcaattctggtgtttgggttttgtagctttctaaagccttgggttggctttagaagaatagaagtcagctcaatgaaagatggctagagttttggtgaatcaggcatggttttccaggattccatggttgttgctctgtggtctggttccttctggattgggccatgcctggggaggagccgttgaagtcagaaaggtatgaaggacctgcttgaggggactttgcgttgccaatgtgacaggttccagagccctcccacaccaccttcgggtgacgcaggcccctcccagattgcagtccgtcccaagttcccttcacaagctcctccatgaagagtatgctctggaacatgcctcacggttggcttgtgagcttgtgagcgatgctacaccaggaaggcaacgctgctctgtccctcctctgtgctgtcgctgtccaccctgaagccagtgggcgggattagggaggaggactaaggcaggggcagtgggaggagcgggaggagaggagggagatgtagccatctgcatctgggggctccttctggggagaggtgcccctagttgacctatttgagtttccatggctattttgaaattactggggggagagagtctggggcctggggaatggacatcaaagagcctcccccttttccctgcaggtg

SEQ ID NO: 24593 - DNA, 1197 bp, Mus musculus
aaggcaaggccacggtcattgtcactgtaggaccaggagagcccagctgatcctgtgggttgtaccaaggcattggggggtggggaggggacacgggccagaggtttgggctccctggctacctttcactttcttgagtaacagaaaccaacccttgttcctactggtcagggtaagacttctagttaaaacaaagccactgccctgatgcagggctgtcttcaggttcaaatacagagatgagaggcagggacttggcttgaattctgcagcacctggcaggcactgtccatcacagatatcgtggccacttctggcccgtggcctttgtgtggccatcgtagggatggagtcctgttctcagctgtggcaggatgcattggatagggctaagcacagggttcaggcagtgctggggtggtggtggcgtgaggtggtgggtttaggaggaggggggcaggacagggagggagcagaagctgaggagaagccaaaacagaccctcctgggcttgggtctcctgcagggaagctggggactatggcagtgttgagggaggtccggaccgtgggacgttggagggttagcatgagctttgaccccctagagaaggcaggcagtgcgagtttctgacctagaactggtgggatggctggctgaggccctggactttggtgaggagactttctgctgacgcaggtgcctgtccttctgggcctcaggtttgttttgccactgagctcaaagctcccatttctctgtctgcacagtggccacggagtcacacttgaccttagccagttaccctctctggcctttccccctctggacctgctctccagacacaaaggctaagcgtcaacctcaggacctttgcccctgtggtcccctcttggcttctgctccgaaatggagcagggtgcatccttcctagctttctgcttcacagtaatgcctcagagaagccttctctcagaccctcttcccaaagggctcctctgggtacctccccccagtcccctgcagcgctgcatggcttttgggccccccttcatcctcagggtcagctgcacaggtgtgagtctctgagggcaggggacaatgtaggatctcagccatatttgattgaatggtcccggccaaagggagtgcgttccgtgcctgagcacacccgagggtctcaggagtttggttcaa

SEQ ID NO: 24594 - DNA, 1166 bp, Mus musculus
ataaattaatctttaaaataaatcttaaaaaataaaatgagagagagagagagagaaaataccctggactacctcagagaagccctggtcattgccatacacacagaaacccatttgttgccttcctttctcgctccccggccatcttggcggctggtgttggttgggggttgtcccgcacctaaagcaggaagatggtggccgcaaagaagacaaaaaagtctctggagtcgatcaactctaggctccaacttgttatgaaaagtgggaagtacatgctgggctacaaacagactctgaagatgatcggacaaggcaaagcgaagttggttatccttgccaacaactgtccagctttgaggaaatctgaaatagagtactatgccatgttggctaaaactggggtccatcactacagtggcaataatattgaactgggcaccgcgtgtggaaaatactagagtatgcacactggctatcattgacccagatgattctgatattattagaagcatgccagaacagactggtgagaagtaaacaagaaagttttcctttaataaaactttgccagagctccttttgaaaaaaaaaaaaaaaaaaaaattgtcccaggagtgccatctttagctccatctgtgtctagtcagacaccccacacacagccactgcccagctgacaccagccctgactccacactgggaggaggcagggggagcacaaggtactgtcactcctgtcccaggtaccctggaggtccgtcctgctgctcttggtcctctcatagccctctagggccaggtcacctgcccctgctgccccaccccacctaccttctctgttcttcaggacactgagccactttccgcaggcccaggggaaagctggtcaccatgaagtgtcctaataccctaggttatgtcttcagcacttctttctcttgagtgattcctaagtgacaggaggagcctcatccgatacccatgctagctactcatccttgctgtccccacggtaggtcactgaatggccccgctgtggactgttagcatgcccaccttacagaaaaggaaactgaggcccaggggagttcttgatcaaagaacacacagctcggtagcatcggaagcttccagaaaggaccggggaccagggctcaccatcc

SEQ ID NO: 24595 - DNA, 1167 bp, Mus musculus
cctcttaagtacgggacacagggtcttgtggctgtcttccaataaacacaaacacacacaccacacgtgtggtgctggacctcagttaaaggacttcttgctacccagtcttttacttggaagggtctattgagaatctgcccttgccctaaggtagttgctagctatcaaagcacaactccagtttctcacgaagaccctcggctgctccctctgcacatggccaccctctatagatcttaaggatcttcatttactctgggtctcaggcttgagctgcggactgggactttcccttcttatttcaacccctaactaagggacaaggtagcgaaaagcctcaacttgccccaggtcgctctgggactctctagccgggtgacacctcaaggtcaccacccttggggtgtgtgtggcaggggtagcgggtggagggaacacctgtgtaactgctattttgtctccgtgcatctcccccagactcactgtgtgctgccccacacatagagaaggagaatgagcgagtcgggctcaaagtccagccagcccctggcctccaagcaggaaaaggatgggactgagaagcgaggccggggcaggccacgcaagcagcctccggtgagtcctgggacggcgctggtcgggagtcaggtgggtgtctaaagctttgctcctgtttcctttcttgggctggggggggggggcgggggtcagagctgactctttgcgcatgtgtatccctgtgtatgcttactgcccagaggtgtccagctcagtgtctaaggtcacagtgaaggcagccatgtcttaacattcacccagaaaagtgggagaatcagaaagaccagaccctatcttaaagaaaaaaattttttttttttttttaatttttttgccctggtcagaacggagccaacaggcaggcttcgactggtggtacacggttttaaacaaataatcagactcttgttcagttgccttcggggctctacatctggtctttctgtttctgcacttccctaagtcaggtggctgtgtagatgtctgcttgcttacccacctacttaggccctggctctgtagtagacattgaggttctgggggtggggggtgtccctgaacgcctggcctgtctgtcttcacaatggagatgcccaccctctccca

SEQ ID NO: 24596 - DNA, 1167 bp, Mus musculus; identical to SEQ ID NO: 24595

SEQ ID NO: 24597 - DNA, 1200 bp, Mus musculus
tagccgcagcccgacctgctgcgcacctccctcagagccgtggctctctgggcgctttgttttgcgggtcccttctgccctgctgttcctggcttccccgtagagggtcctgggagcattccctggccttaaggggccccagccccatctcactctgacaaggcccagtggctgacctagcagcagcagtgtggtcagggcaggggatgcttagatcccagcatgtccccaccaaagtatcaccgggtgggtttctcagcccctcctgccccaccctacagagatcatgcactgggttggctgagccccttgacaacaggaagtaggatgatgttggctccacccactttaatgttctcacctgagactagacagatggggttaccgcccatctccagagtaagggcctgttctcgcctccaccaaaggcaaacgggcaccaacacgcctcccccagtccactctaggctgttccttcctcccgcagggcactaaggagctagccttgccgccccctccttttcgctcctccctgccccccatggttctggttccatcttctcctctgttcacaaactacctctggacggttgtgttgttttgtttttgttccatgttcattcttagatacccactattgctgctgctaccagcgtcagatgttcatcctcctgaatttgcctgtattctctcccccacacaatacactcgaggggaaggggggctggggcgcagcagactggttacctaccccacactaaggaagatggggccccaccccgtggatgctgcagcagagtgaggatgggggcccactttgatgggaaaagggtgtagggccacctccccttgttctgtgggggaggggtggccagtatttgtcccagcctggggcttcctccctggtttcttatttgcagttacttgaataaaaaacaaatagccttttctggacagtctctggtgtaaggagcattcacagtaaaaggggcggggccgactatgacccttccctgccccaccctgcaatggagtccacccaaggagggcaacttgaagccacaaaagtttttatttacaaaacatatacacctatacatctggacctgtcaccgtgggaataggctagtgtggaagagcggctgcctggaaggcttggctcggggccagctgtaggtggttagaatagacagatgctcc

SEQ ID NO: 24598 - DNA, 1200 bp, Mus musculus; identical to SEQ ID NO: 24597

SEQ ID NO: 24599 - DNA, 1941 bp, Mus musculus
tttaaaatagaagacgccataaaggtgctgcagtgtcacaagcccgtgcaggcgtcatactttgagacgttgaggcaaggctaccctgccaacaacggcacccctgtggtgcccaccacctactccagctccgtgtcaggcatcagatgactgcagacttctgtaagagccggagagtggaaagcagactgaagcatggctctcctcaccacccctcacctcacggccttctctgtcacccaggcatggcgggcagtggagaggggacactgaggtgctgctgtgggctgtggcgggaggcgggtgggtgtggcagggtgggaactcttttttctcttcctgagggtggggctgggtgtaactcacaagcactttcctgcatgcccgatcctccccgctcgctcaccctgccctgagagggcacctccctctccttcttgggttccgaagcactcccatttgtctcgtcccggcctggccagatatttcctctgaattttttttttttttttcattaaaagacacccatgtgcgatgaaactttctaaaaatctgtcctgtgctgtgctgttgagtcccttaggttgaccacgctcccttgggacgcacctgtccacacattgcacactgtcacgggacacgtaaataagcggcgtagaacgaggagctcaactgttcaggttctcaaagttttgggttttttttttcctttttttttctcagatatttctggtttgaagcccctcactcttcacatttgtttaatgctagtaacttggcgggcttccctgtcctctgttcccagccatgccgagcccggccaccttgctctcactcctgggaccctggccttctgtctctaggctattcctgtgccaaggaaaacagaagggaacctgttttctttctgttacgaagcctggaaaacagtgagagaaactgaattctgtccgataggctcacagtaggctttaaactgtcaccctcaatgtcgcagaaaccgggcactgtgtctgtcctgctggctggagattctttctgtaatgctatttattgctgacatagcctctcttacccttatatgccttccaccatgctgacctggctgtggccccacgctctgcagccattctgcatagtcctgtccccacgccgagaggccccacgacgtcctgagaatacatggggagcagtgtgagcatgtatgtgccaaggggggaccaagagcttgctcaaaagggacattagctttctgtctgctcggtgtgagaggtcatctggaagaggggcccaccggtgaccctctggctccggttggtattttatagaggttttgtgccgaactccccagccagttgtggtggttagtcgggaagtaaagggtcctgggaggggccttgagcaaggagggcaagaggggagctaggcctggcttagcgtgggtgcttgggactctttgtggcattgcctatgttgaaacgtagccaagatgtgaattgaaaatagtacttctctttatttaaaaactaataaatactcaaactttgaaaagcttttgctctttgttccatgtcaggaatgtgtgtggtgatgagcaccgtcggcattcaacgctttgtggtatcaaccggtagacttaagttctgcatgtatctaatttgcatttttttaccccagcgttaaaacacagatttcctctcagtgtgtctcgggacaggagtggcctcccgaggtggcggcccagtgggtagagacctcaccatgtgatttgagttgagggacaggcttattgtgggtccccctgtggataaacgctctgattcttgttgcctggctcagagcatcctgaagtcccgtgcacatgcagaggaaacttcctctcagaccacagtcttctgggtcagctctccctcagccatgcagcctaatggtactgtggcg

SEQ ID NO: 24600 - DNA, 1146 bp, Mus musculus
caggtggcagctagctccctctggagctgccagtgtctatgagctgcaggatgtgggtgctggaaatcagacttgggtctctggaagagcagcgtgtgctcatgagttctgagccacctctagccccagggccggggaaggtttgaaatggttctgctttgtcaaactccttatgtagcccaggctggccttgtcctgtcagttctcctgtcttcagtgtcctgagtgctgagattacagacgtgtgccaccaggcttagccgcttctctgaatcttactggataatccaaaggacacaggatttctgtcagatgttaaactctgccatcgggaagggtttgtgctgggccgttgtactagatcggtaagcctgctggtgcagggctcgaggccagagggttctctttctgctgacattctggagtctttttgttttgctttgtttttgagaaagggtttctctgtagccctggctgtcctggaactcgctatgtggaactcccagagatctgattgcctttgcctcccaagtgctgggcctggcattgacggggatttggaagaatctgaggatgaattgccctgcagggtggcattaagtctggggtgcagtgtggacacttgtgttggcagcatacctggtttgccgagatggctcagtgggcaaagtcactgtcacatgccaagcctggtgagccgagctgggctgctgggacagccatctcagacagttgtcctctcccctccactgtgtgcatgcttgggccagcactcatgaaataaagatgtaataaagaaattaaactataataaaacaagaatattctaagcggaaaatcttaggctagccaggccatggagatccacaggtctggatacccagttcttggaagcttgcttggctcgaagtgttgatgggaaagaacagcatacctccttggcctagcagagaaagcaggaaggtctaggctggaaggcagaatggactttctctaagaagaagagaagatgctctgaggaaagggttggctagagatacccatgataaatgtccctcttgccacagccacttctaaaaccatccacagaataaccctcaaaaacacctttctgtgctttgactttttgcctcaaactcagccact

SEQ ID NO: 24601 - DNA, 1255 bp, Mus musculus
atggtcattcagaaacgccacagcccctcccatccccaatcactgtgtcagcatcagcctttgtgaagacggtctacaaggctctcacctggccaacctaggagattcaggggctcaggaacctaggagattcaggggcttggggaacctccaccttggcactgtaaggggaagccagcagctcaggctggtgtgaggaaggaactctggatggtcactgtagctttcttccttgaccttttagtccccaacatcccctctgaatgctggcagcacccccacccccacacacacactcccatttctctaagcccgagagtcttgagtcttcattaaaggattctgggtgtgggaggggacacagggcccttgtggttgggaagcaggtggcaggctctcccttgggaggatggggtgggaaacgaaacaggtcaaccaagacctcttacagtggaaagtggtcagaggctgtttctttggacctttgggaacacagatttgagaaagtctcatattcacagctggtgtccgctaggcctctggcctacggacaccctctgccttgtgaatcaggtgaccttttgggcctccagggaaagaacaggaccaccatccatgttctccgggaccctttagctctctgctgcttctcctgacactcaggtcatggacccaagctttggggtcctgaccaccgcccccccccaccccccttctcttgactaggctgcagcagggccttctgttgggtcagtcctccctcagggccaggagcaggaacttagcactcaagagacagggctgtaagcacccacttccctgtcactgtttgcccttggggcttcagctgcagcccaggttgggccctggagccctcagaaccggaagcaggattcaaacctccccttctccacagccccccctgcctccccagatggtagacatcccccagctcttaccttcaccctcatctcagaaaggcaagaagccgccatgtccgcaccttggggcctgggcttccccctctctgtgccagcggcttcccagcacctggggaggggctgtggccctgaccagaccccaggcccaccccacatagtatactagctgcccactctggggcaggaactggaaaatccatcccttttgaacaaccaccttcaatgaccccccccatctgggaccagacttggtcctcaagttattcagcacccccagtgcaggagggtcctccccccaccccccgaagtccctg

SEQ ID NO: 24602 - DNA, 3374 bp, Mus musculus
tccactgcatccaccatgttgcagtggaaagcagaaccgtgagagctcgatgtcaggctacttgaaaggtatgcagcccagccggaagaaagtgggcaccggtgaactgcctatcacaaggcaggcagtgtctctgccgcttgctgtggggttcagtgggaaactgaacagctgttcccatcctggtcctgggtctgatgagatgctcaggcctggggcagtgaccctcgtgcctctgcctggggctggctttgcttgtcaggcagcactgggagactccatcactgactgtcttcactctcttccaggggctccacgggccttaccccttcggccagtcttaaacgggtgtcagcaagaagaaaaactaacaaaagacagaaggcctgactttggggggagagggcaaggggttcctctggattgcagaccacatcgcacggacccctggctcagacccccacctaccccccaatcacagaagaagaggaagaaagagactagttttgagtgaactcagtatgcatgtgtgaatgctgaactgcaggagtggtgttgaggcgaccgagaagatccacgcagccatcttgggttttggtgatgacgtcagtctaatgagttgttaggtcacttgggaaggggaagaaatttaaatgggggaaaataagccatctttttaaacaaaaattattttacctacagagaggttgtagttttgagcacatgttagttcctccctcttcccgatgttcatcttctaagtaagggacagcatgctacaggacagacctgctctggaagcctgtcatagtaaggctggcgtggcacgtttggggactctgccagtcggagttgctgggcacatgctgtgtaccaccgactgcagtctggccctgttcttagtggcatctgccaatgagatatcaccttccccctctcctctttaatctcttgttaaattacccctttgatattggtgtctgtcagcgttggggcttcttagtatcaggacctctctgaggtaaggactttcctgtgtggccacagaaacctgggggcattccgttgcagaggtgtcctctgtcacgtgtgtaacagctggaacacagtggccgtcttccctcggctcttgttggtgtgtgcatgtgctgcgtgcacaccgggttgtatggcgtcagcaggtgtgagctgtcccttgcttctcttgtcacacagtgccccttccccacgtgtcctgtggctccagccattacagagtgaaggtgcaaccccatgtgggagccccactagtgaccactccctgagaggccgcaatcaggtgggaatgaaaaggcctcctccagcggggcaggctgctcagtgtgggtggcaagttgtagcccagctggaggacaggcctttgctccctgggcaggtgcccactggtgtcccatggaatccactcgggttgaaatgtggatctctccatgggactctttaaccaggctagaacagctgtctgccaaagatacaagaatatgcaaagtccctcctcctaaccctccttccctctaagtcggtggcttgagagccggggatgtggatttggtgtggttacagggtcccctgcctgcctccagcctccgtgtgctccagggttgtgagcagagcaggaaggtcaggtgagagtggctgtaggaggtcctccagcccgggtgcgtgggtgcacaggtgcgtgggtgtgtggaacgggtctgctctgcctgcttctgtctctgtctgggtgtttgagttccaaaaagtgtgtggtgtttgttcctcctcatcctcttctgagactgttgattttaaacacttgattgtgaacgaagagcttctatgaaaaccctcacctttccatgtcccaaaaaccaacacaagtccctggggcgggtggagaagatggtggagccccgtgagacggggcttctgtgtgacccttacttcctctgcacactgggacccttgagccaagggcagtccctaccaggtgcccaagccgcaagtctcagggggcttttgtctgaggaccttcttggggccagtctctgaggacgctgccaccctagagcacatgcatgcccagccattcttcctgcttctggcctcggagctgcttgtctccagatgccctcctgaaaccatgagaagcttcagccttgcctcactggcttccccatctgaccccaccaggtaccacactgtcacccagtgtccttgatctcctcttgttcccctttctgcttgtagcagcctcacttggcaaatgtaacggctcaggtaccctggcttccttcccagaaacaagccttgcctgtgcatcctggagagttaggtccttcagaaggccagagctgggacaagccttgacccgttctgcagcccttagagccttcacacgtgagcactaggccatcttagcagaacccccatctggcagcacatgccaagtttcaggaggattggggggaggcgggtgcaggcttgagaagaatctgggtgtgtgggtatgtgtgcacatgtgcatgtgggtgtgtgtgtgcacatgtgcatgtgggtgtgtgtaagtatgtgtgcacatgggagtgtgggtgtgtgtgtgtgcacatgtgtgggtgtgtgtgcacatgtttggatgtgtgcacatgtgcatgcctgtttctttttgccagggagacaactgaatttggggcatttttctacaaacacagcctcctctccccctgtatggactggctataaccataagccaggcgctttcaccaagatggctggtggccaaggtgggcagtaggcatgagcttccagcaggaaaggacaagagagtaggcaggcttacaggtgcagactgagtgcttctccgcctgccctcttccccttgtttccttgggtgagtgtggggggcagcctgctgtccctcccacctgcacagtgatgctgtctggtggggcctcgtggtgcctaggagatgaagatgaggttttccttaccgtgtaaatgaatatttgtatgattaaattaacacacacaaaaaaaaaaaccccgcctttatcctgtgtgcgtgtgattctgttgcatcctcgagctgctgcctgcagcctgtgtcacccacagtgcctgtgggagagagagaactgcgatcctgagaaacatattttggaaagtatattagtctctgtaggatagccatgacagtgtccaacaagggaggagagagttcctttgatggctgaggacctgacccctggacagagagagatgctttgtatctgatggtgacaggcagaccagggccaagctgtccctttcacgggctcatggctggtgagatgtttcagctaacttgacccctgatt

SEQ ID NO: 24603 - DNA, 2752 bp, Mus musculus
gcacccgagtgctcagctgctcctgagtgctcacctgcacccaagtgttcacctgcatccgagtactcacttgctcccaattgctcacctgctcccgagtgctcagctgctctgagtgctcacctgcacccgagtgctcacttgctctcaagtgctcagctaagagcatgatgggtgggtatacagttgctgttttcacagctgtccatgaccggtcactttctttctgtccctgctttcccaggattgctgcgtctctctgcctgtgctgacttaagcacttggtaattgggagctaaatgggcttccgtcaggcctccgaccaagctaaacttagctgtaccctcctcggtgtgctgcctcactcccctctattactatggcgttttaaaatcatgtgatttcaacttaagcaaaaccgaaaccaaagtccttgtaggtttccttctggccctatagaagtttccccctttgcttctgactggcaaagcctggctttgtggtgtgctgtccgggtagaagcacagcaccgggacccgcttgacttggcagatggtccatcctttgtgagctggtgatgccactggagtcctagttgtggctgaggggatggaaggagaagcaaacaggacccattcatggagggaggaggtcacatttgttcagacttgcaggagtcagtcatgctcttcactaaggcaagattcagaacgccacgtcttacaggactgtggtttctccactgaggagactcattacagaattgggactgacatctcctggagacagccttaccaggtgaagtccccccatttcagatttttataaatgacctggaactttaaatgaagtcatttacattagatgtcatacaacttgtagacaagacaatgaaaagcagaccagaggagagaagcagccataaagccacagggaagtgagcaaggctgtgaacagcatgcaggagagggtcagcacagtgcagggctggggtgtggctcactaggggagtgtctgagcagcagctcacccagcgatcacagacactaccacaaaaataaggattatatctgaacaacaacaacaacaactactactactactactacaacaacatactcaggaaggaattcagagccttgctgagggagcaggatcagcatgattctgtggcctaaagctggaggtgttccagcaccacgtgagggacttcatccagccattggcagttctgttacaaaagagaggttcagagaggagtgattaagatgaagacgttgtcctgcggaggtgaacactgaggggagtggggacccaatcttgaaacattagtcctgggggcctgtcactgcctcagagaaaaagcacttttagcaaagtcagaaactggaagggcttgttgaagtggtaccccgtgtttctaacattcttggaagagaagggagagccagtaactagaagacataacttctcagcctcaggatcacttgaattagtttaaaatcacatccctttgtcttctgctcaccgcatctcccacccccgggagaagatgtctgacaaccacggggtgcactgtaccctggagcatgcagtaggaacctattttgtgtggaggaaatgccttaatggctagaatgtcaggtgtttgagctgagggagtctgaggttcttgtccatgtgcaaacagatgtagttttggcttcctttatgctttggccttttgcgtcctgaaaccatccctcaggaacgtaaggttattctgtggcatttcaataatgtcttgtgattccgttcccctcttcactggggaataaacaggagagacttggctataatgaaactggctgtgtggatgtccagggtaagggtgatggaaaacacaaataggacagcacatttggagtttagctgtgaagttgcagtttgcaacatgaaataatacctcaagaagacttcaggagggcctgaaacactgtccctcagagtgtccagccaccgcacgtggccctccatagctgcatcatctgtgattgtctcaatttcccggtttacatgcatgtgctggaaatatgcactggtgtgtatgtagacttagagtggagtccgctaacggggctgcagagatggctgttgatctctaactcattttcagtttactgtaatgatgaacacagtctgttttatccctgaccttgactgtgctgtggactgcactcttcatgggctctgtgctgagaggatggggtctgtgatgtagaaagggtcgattccacatctcacagaccctggatctgcagtgtcttcatgttagtttttccttaggagctgcagagattttgcattgcaaaggaggtgcaaggtctcctgggtgggaacttcctgttcagacccctttctttcaccacccaagctagccaagtaacatctggctcagaccacaagagctgggacgtgacagttgatggagttaggacctcttggagacaagcaatgcacaattgtctgggtgaccagggccttggaggtgccaccacatcctccagtctatctccagggtaggtagggtaggtatggagagtggctggctgttaagaggcattttgcccccatggcacagggaaatatttggtaactgttaagggtgaggccttgctaagtggccaggcctgagatctgagcttcctgctctgttgtttccttatcctgcatcctttatcaaggtagacatagctcctgtgtgttgcagttg

SEQ ID NO: 24604 - DNA, 1173 bp, Mus musculus
ttgtgtttcaaacgatgcatcctagcctcattagtactgaaaactgtatcctgcctttctcttgaagtctaaggagcttttaactgcactgggtatagatgttgcaaaccacacgtgtgtttgtttccttatatgtttatgaccctcttcccctgttcatcccacataggttttgtacgtatgctttttgcatgtgtgcatgtacacatatgcggaagccattgagacagtcttccaggattcttcctgttagcttctccccagccctgggtttccaagcagacaccaccacccctggagttttcatatgggttctggggattcaacttgggtcctcatgcctacagagcaagcactttaacagctgagctatctcgccaacccttcgtgtgtgtgtgtgttctgaaattatagaatactcccttctctcctcacatgtcctgtctctcatagagctattttgtacctgagtcttagccttacacacccatgatggtcctcatacacacagatcttgccagctttggggtggggagcacatactgcctgtcaaatatagtagttccctgtcccatcctttgcttgcttcccttccatagctcactctctttggtctgtttgctggctagttattttgtcaactgacacaagcaagagtcacctgagaggagggagccctagttatgaaaagacttcatgatggatggcggaaggcctagcccactgtggtcgacaccaccctggatggtataagaaagcagaccgagcaagctgtattgaacaagccaggaagcagtgttccttcatgccttctgcttcagtttctgcctccaagttcctgccttgacttccctcagcgataaagtgtgacctgagcgttctaagctgaaataaacccttttctccctaagttgctgtcggccatggtgcttgacagtctatcactgtctccacactgcgatcctcatccaccgagagtatacatcttgagtcataatctcagccaagaaccagcatttacagatgccaacgtggatagtcctgctttccttggagactctggttttcaaaactctaagcctacaaaatactgtgttctcgtgactctcccgtgtatttactgacccgtcattgcagcatacagcattagactggtgctggagtcaggctgac

SEQ ID NO: 24605 - DNA, 1191 bp, Mus musculus
atgtttctgtgggaagatcatacaaactaatttcttctttttaaacattattattgtgtgtgtataatgctgtatatggatgtgcatggcccaatgcatatatggaggtcagaggacaactttgtgaaacccatttttttcttcaatccccagtcttgtgtgtcaagcatctttacctccagaccagtggttttcaaccttcctaatgcttcggccctttaatatagttcctcaggtagtgaccgccaattataaaattattttgttactacttcttaactgttatgaattgtaatggaaatatctgagatgcaaaatgtctgatatgtgtcccccatgaaaggatagttcaggttgagaactactactccagaccctgctcaatggccccaaactgacttctttagtttttaatgctttattccaaaaatattttaaattatatgtaggtgtgtgtgtacacatgtgtgcagccggtatgtgcatgtgagtacaggtgttctagcaggccagaggcatcggatctcctggagttgtgagttccctgatgtaggcggtgggaactgaacttggttctctggaaggagcagcatgcagctgagctaactctatagcaaagcctgttttcatctgactgttggtgctgtccattggctttcgatggacctttgtcactctgattctcaaaaccaagggaggggcacgggaactcttcatgcttctttcaaatgctttacaattatacaagtgtgattgcatgtctgtgattctaacacccaggaggaggattgctgaaaggttgggaccagcctaagctctagagtaagagctgcctcaaacacatgcaaaaaaaaaaagcactgactgcccttccagaggacccaggtttgagtcccagcatcccatagcagctcacaactgcctgtaacttcagttccaggatatctccttttgatctctgaggaccacgtgcattcatggcacacagacggacatgcaggcaaaataatggcacatataaaaaagtcaatctaaacaacaacaaaacaaaatacacagagttgtactggctggttttacgtatcaacttgacacaagctggagtcatcagagaggaagaagtctcagttgaggaaatgcctccttgagatccagctgtagggcactttctcaactagttatcattggggt

SEQ ID NO: 24606 - DNA, 1204 bp, Mus musculus
ctgtttgtttttttgagacagggtttctcaaaacctgtgtagccctggctgtcctggaactcactttgtagaccaggctggcctcaaactcataaagtcccagagtgtgcatcttagtaaagatcactgactcaagactgtgaagggaaactgctctgcactgagatggcttcctctgtgccctcagactgggtgctctgtggggcctgcgagatggctcacgggagaagtgaagacctgggttcagatctctccacccaatggaaaaaaagctgaatgtgatatgacggtgtggaggcataaacaagcacgcgcacacacacacaaagtgtctttttaaaatgttgcagagagaaccttggtctcagaaacttacataaacaagaagtgaattgccaggttttccagatgtctcatcttaaggaaacatttcctcgtttggtctactggaaaagttttcctttgccctgaaatatgctctgtgcccacgtaacttaaaaataaacatattttgactgtttagagtcccatctgcattgagtttgtagctctgtgtaattcacttgggaattgcactgcataaaaataaaggcagaaggtcccatatcctttgactgtgttaagctttgagaaattcctttagagtatttggtgtgtcctgaagcctcccctccatactggctgatcgcttgttctgaacagctcatgctctttgaggcagccgcaacatctgcactacctggaaggggtttgttgctcagggtcccaaccctcccgcttcctgccatgattggatgtagtttgtttgccaagtccatgctggagatttgtcctggggtgacatgttcaaccttgtaaaggtggtggtcagtatctgaggggagccatgattctttgaagcacgtgttagcagagagtggtgacggagctgtgcctcactccctggcatcctgtcctcacacacattcctgctatgttcctgtctgtcactgggtcctaccagagttgtttggatgccagcgccattttcctgaacctccagggacataactacagcatctcttccttataacacactcagcctcaggcatttccttatagtaacaatcacctgacagatgcatcctcctaccttgcttgttgtgtcagagtaaatggctcatgcttaggagaggggcctttccttctttcagatagacacagg

SEQ ID NO: 24607 - DNA, 1507 bp, Mus musculus
gtcaagactgttagagggaatctgaagtcaccttataacgtgggagaaagctagctttggggttgcttcattcccacggctattcaggactgcagtagcaaaggaggaggaagaggatgcggacaggccagtttgtgtctagtacctgtgaagggttgagcatcaagagtatcatgtcttccttttgaggtagatactggcctttgggaagtgtaggtgcatgttggagaagaaagtagtctccacagaaagcagtgtggaagagagaggggaggaaagagaggcttagatttgtatcgaaggataaaatgaggtaaaaagataaaaaaagaatggtttaatcaggttgtggggatttcatatagaaattgttttaggttttcccattgcttcaacaaaatctccaagtctgggtacattaaagaataaagacatttctttggctcacggtttggaataccacgaagccaagaggaagcagctgtgtgctcattagcttctgtgggagtctgactgcatcacagtgtggagggtgtgtggcagagggcatgggggtgccaggctcacatggtaacaactgaagtcatcatgtatgccacataagccacaactcccctgggagaggatttgtttgagaaggctcctaaggaccacacacccaccaggcccctcttttatggtctgcgtctcagcctcatgcactggacatgaagtttccagaatgtcaacctctaggcaagaatcagagctttgtcatgtgccacctgcctctgtccaacatgtctggctatttctgtctcctagggcctggctgtgagacccaggattcagagtagtgctccccaggaagaggaggagcacccatatgagctgctgctcacggcagaaaccaagaagctggggaccacagacgggaggactgaaggtatgcctaccccactcccacagcacaggaaggaatgcgctgcagggacggtcaggccccctgtgctcggtctccttcaatacccggactccatgcccttgaatggatgaagatgcagccctccctcacgtgtagcagggcaggtgagagtacccaggtgacagctgaggtcacctaagtgacagctgtgtgaacagaatccaggacagcagcacctgtatggagactagctggagcctgtcgtgctagctagcaggctaggttgtttgggtccatgatgggctctgagtcctgagcaggctaggttgttagggtcatgatgggctctccctgtaaccgtagtgctttggcacctcggcctgcttgtgcttctggatgtatgttctagccctgcagagggagtgagcaagggcgccaggcaggctggaggtggtgtctgcagagcctgcctctcccagctccctgtagctatggtgccctccactgtgcatgcctcgtgcctcctgttggctgttagctggccataaatagagagagatcacaggcctgtgccaccacaccccactgacaacttctttattg

SEQ ID NO: 24608 - DNA, 1185 bp, Mus musculus
gtggatgtggatctgagtggcccggaggagaaaggaagccgttactcgcttgcggttttgttttgcactttcagttaaggaactccagaagtcgcaggttgcagtcatgacctcccttttcccctagttgctgcttgccagaggaagggcgggcgggcaggcgggcgggcgggcggctctgaataacactgagcctttatgggaatgtatccagagtcccgggagtcactctcactggtccttaccccgtccttaccgtgtcctttctgtctgtagctcgtgcttctccccgccttatatagcaaggtctggtcgttcacgttaacagagatctaacaagagggatggctgccaggcagcgttaagcaggccagcgtttggaatttcataagcgctcaactttgggtacagattgaacgtgaacagtatgaggctgcttttctccctgctctctcctctcgctctcctcagcccggctagcctctctctgcctgaactctgctctaccaccaagtgagtgcttcataggacctctgttgatttttgctacgtttaattttttatttctctttgtccactccaagaccacaggcagagcggcagcggccggagccaggactctgtggaggggcaggacgggcaggtcccagagcagttctcaggtctcctccacggctcctccccagtgtgtgaggtggggcaggaccctttccagctgctcacggcccccagccagagccacccggagtcctcccagcaggacgcctgccacgaggccagcatgcagctagaggagccaggcgtgcaaggcactgaacccccgcagcccggcgtccctgaccaaagcaagagagtgggcttgccggcaggcctgacagccctggccagcagaacatacctcgatgcattgactcacacagtacctctgcgccctgctggtgccgaggaagaagaccagagcgggcccagaagcagagcccctcccaccagcaagcccaaagctgagctcaaactcagccgcagtttgtctaagtctgactctgacctcctgacctgctcccccacggaggacgccacaatggggagtcgcagcgagtccttgtccaactgcagcatcgggaagaagaggttggagaaatcaccttcctttgcctcagagtgggatgaggtaagtctgtcatgacc

SEQ ID NO: 24609 - DNA, 1213 bp, Mus musculus
caagatggtggagccgctgacaacctcttcaggcactcctgcatgcttcacggtgtctctggagtactaggtgcctaatgaagccatttgactctgtggtgtagacagtgagaacaggcggtacatgtagaccatgggtgtcagctgttttgttagtttattttcctgtttttcaacacaggctctcactgtgtagccttggctgtcctggaattgactctgtagaccaggctggcctcaaactcagatccgcctgcttgcttcccgggtgcttggtggtgtgtttgctttccctaacttttcactgtgtttcacaattgcttgaaactcagatgtggaggctgactgtaagaacaaaaataactgcctggtcaggttgtggttcgaggtacagaagtctgtgaggtcagctagttcccccacgtgcctacttttgaatgggattggagattatggaagagaaaaccacagaaggctgcctgtctacttagcaaaaacacgcaagccaggaaacacttggctgaaggcttaagtgataaatttgtgttttgtaatcagctttcataaatattaaagaagtgggagatggtggaaagcagtgatgtgctctgtatgcgtgctcagctccacacttgctcagcaatgtccacgtggagagtgccgtgctctcagtctcaaatggtggctgagggaccctcggctgagccccttcctgagaggggaagaggcggcaggcagagcaccctgtcaggccaagccctgagcttccccttccccgcactgctccttagagccagcatgacgtcatcaagaagagaggtgattggtgcagctccacagaggcattggcttccctcgccacctagaggtgggtgcagacaaggaggtctgccctttacccggaaccctcagcttgccacgatctgcagtgtgcattgtcccttggtatgtacactggcgtgcttgatcctgggcactcccactctaaacaagaatgtggctctcccacctctggggacagctcggagcttggaatgtctatttaagttgcttcctggctcacactggagtagaagccttaccctctgagtttccattggttttaggtttgaagcattgtcctggcagctctgccttccgggctttgtgtcagatccaggggctctcagtatctgccatttacctgcaacttgtaagtcctggctcctcagtc

SEQ ID NO: 24610 - DNA, 2313 bp, Mus musculus
acctccctgggacctgccctcctggcagcagctcctgcttacaccacccaacactgtgaatcctccccttgggctgaggacagctgcgggagggggtgacttgcctttgaagggggcctcataggcaccagagtggggttgaggcccccaaagccaggcactgtgaggtgagggtggtcttccagcagaaccacagtagctccctttgaggttgctctcctcgcctgggtcacagctggatgccaagagctaccagttgtcacctttcctgacccaaccaccactgtgacctcccagtgccaggatgccatacacacagctgctctcaggtgctggtttctctcctggtcaggcccggtgatatggcttcaccagggacagactttctgtagggggaaggttggtaccagccatgcccttgtgcatgagttggctctgatactatgagccgtgaccctcctaactacaggttcccgagggacctgtgtgtgcttggcccctttctgtgctgtgggcctggttccggaatccagctcactgaggtgtgccctgcacacaagtgcaccttcttccttctcggagtggagctgcccttggacagggtggagccgagcagcctcagtggtgtcggggagcgttctcatacttcctctggtggtggggtcctgagacagccatcgtccagcaatccccagcacctgcctgggagctagcgccatggagctgaatctcggaggaagcctcacgtgccctgatgtggaaagatcagtctagatggcaggagacagaagtgatccccgtggccgtggtgcagacagtatagtgcagtgtctgcccgagccagtcagcacccgagccatatgccagggtgggcccttcggctgcctgcctttccttgtgcctttctgagcagatgggccaggagcagcagtgggctgtaggctgtggagggcaccagggaggcagggacctttgtctgctctgtgtccctttccatgtcctccgccttgtgcagactcattggttaactctctcctcccccactgtttgcttctgccaagctgagccactgaggagccaccctgctttgcagaagtagccgtggggcgcaggctcctgccccagccccgagagcctcatctgcaacactgaagacccaggcccagtcctgctgtaggacctcctgtcgcctgctcggcctgggcctgccgacacctgcaggaccctgccctggaggcagcgaagacgccaggcatctagcagaggagaccggaactctggatggcccaagaagtggcctgtccaggacatgtgtttttgataagaaacataatcctttttatacatttttaacacttggctccggcctctcggtaaagctgccaatctttaaacaagacaggacctgagatgggcctgaaaccctcaggcagcctctgccttcacaatgggctcttggcctggctagagccatgaggacacgcccgaggcttcctcatctactgaggtgatgacacagatgtttctggggttcccagtggggataagcaagtagtttctggtgtgggggactccggagtactcacctgtccccattagcactgccgcaggcagctgtccccatgctgctgctgggccaatggagccatgttggaagggagaagtggctttgttggggcattgatagcaatgccagttatgactgcagcttgccagctggggactggatctgcctctctctgatgcttgttgactgttgtatcctgtgtggcaggctgggcacatctgttccagatgtgggaaaggctagtcaggcaacagtcttatcccctccaccccacccccgccccgctacggtcttgaagtcaagctggtgttgctttagctcttctgctagcttgctttgctttttaaagtgacttgggtggagagccacctcctgggcttaaggagcagtgaggggcaggctgctggggtcgggggaccaaccaggcctctctcaccagcttttccagagtagggagcaaaaaagagaagccctggcccacaggtacgtgagcaggcttcagggtctccgggcagcacccatcctggtcctggggacaggaggccaggcctgaacagcggttgtgagctgcaatcctgggcactgccaccttgtggctgctcagagtggaaagcagggtttccctctgtagacctgcgggctgtctgcctgctgcattcagtgcagcagctgctgggtacagctcctctctgggaaggagccagggcctccgctgctaggtgcaggtagtacttcctctcctgcct

SEQ ID NO: 24611 - DNA, 1181 bp, Mus musculus
ctgctcagacagatgctgggcatacgctgaaggcagagtcaacagctggctgtagctgagacactacggagtcaaggatgccccacaggcccagcctgagcagcggaggcctagacctgtggctaactgagctttggggttccaaaggagcagggggaggccctctgagcatgctcagtgtgagctgctgttagacaggaagaggggctgctgagtattcctctcccccacatgccactgaagctgacaactgccacctgccatctcctgcaggacaagaagcttatcaaggccttctttgaggtcctggcccaccctcaaaactacttcaagtacacagagaaacacaaggagatgctgccaaaatccttcatcaagctactgcgctccaaagtctccagcttcctgaggccttacaaatagtgcctgtgggcccgagacccagttcagagctcccacctccctggccctcagagttggcaccccaacctcagacaagaaactgtctctcttgaaggagagatatcaccacaccaggcgctctccctttcggcctttctagttaccttgtcttcgttctgtctctctcctggaagtcattcagtgcgtctctgttccccccagaggtgaaggaatagacaccctctattcctctgccgttatagcatggtgccttgctagccaggagccaaaacaccccctccacagcccccgtgctccccagagtgggtcttcacagcccagagtcctgccaaagaagccttggacatagcagctttgtgccagcatcaggctgctggggcacagagtttaagcccggggtgcccacacagttggcgttctcatctgtagagcttgctctcatctggccggggctgactccatagggtttacaagtgatccataccaatgggatagcaaacccctgccgggtaagggcgaggagcaggcaggggccctggacatataaagctctcagatagctctgcaggacagaaagcgggtttttaaaacattgcccaaaacagaaagaaagaaaatgtgtcacctaaaggaacttcctacagaacaagtggaagccagcctcaaacactaacccttttcttgccagtaccccccgcccccggccgtgccctcaccccacctaagggctccctgggggaggcctacccaccccctgg

SEQ ID NO: 24612 - DNA, 1666 bp, Mus musculus
gtaaagtctccaattgttccttcttgttccccgaggcttagtcctggacatccaccaatgactcctcaggtccaactttaggtaactgccaagagattcaactatcaaatagtctgatccccacacacaccagccagcagcaggcgaagctcgcttcctggatgccttagccaacacggtgggggtgagggtcgggtggggtcagagagctattgcaaagctgttgaatggtttcatgcaagaggggcgaatgggcatttagtgggtccccagaagtgccatagaacagcctgagtcacgagtcctttctccctaacattttgccagctcctggaaagccacaaagtgagagtgcctcccaatgtatgcctttagggcgtggcttctccgcactcccccaccccaccccccaacccccatctcaccatacatacacggacacttcctctaatcatttgttctatggctgatggggcagcacatgagatctatcgtacggagagagtaggccactagacttagctgatatcaagatggatggaggagatcaagcaagggctttctactgccaaccaagttggcagcaaggaatccaggcagagctgttacgaacttacaggggatattggccctgagcgcctcactctgggagctgagtgggctgaaggaggagttaagaactcagggactttctaggactgcacaggttagacaaaagaggtttccaggagaaggggggatgggaagatggtgtgaacaggaacccttcgtgagctgacctagaagcttctctgtgggctatggtgcttacgaggtcatgtaaccccggcgcctcatccatcccagtgcaagacctgctgtgaactgagtcccagcgtgggaagccatttccacatgtgctccaagcacggagtgacaaatgtcaagcaggccctgatatcctcagcagcacctcggtgcctctttagcctctgcctctatttgtgtcattgacccagccagtccccaagcctgaggtaattaggagaaagccgaccagagcctggacgttagctgcccaccctgtgccttcagtgatccttcgaggactgccactggcctcactacggtcatttccatgtggaggtgccgatggagaagatggtacagtctgggctctggctcctaggagtctctgtgaatctgcgaagtgttctccatgagcgcgcctgaggtgacttaaatggattaggaagtcctatctcagtgtgtaagagaaagcgacagcacattgaagggcctgtatctgctgctgagctccagagcaggggagcagaggccaaatgtaactgaccccaagcaggacatggtgccccgcctggttcctttcctaagcagactccacgaaggaaccctttctgtcggccctgtctcaaagctggtgcactctgtctttccgctattattcggactgagaacccgaaggaccagaggccccgttctgcgatcagcttaccaagactaaacaatggcagcagtagtttggacaagctcaaaatcttgttctatgtgagtcggactttcagagagtaattatcatgtggacggctttttttttctttttaacgcagaagaatatcttaaaatactatatttatatctgccttccactgcctctcatacagca

SEQ ID NO: 24613 - DNA, 1158 bp, Mus musculus
accggtgttgttttgtgtgaggctggatagcaaacatacagccatgggcacatcaggtgagccctctgctgctgagctacagccccagcaagcgtctaattattctttctaaggtcagtgcaaaaacaataggaggattcagggtcttaaacaggtcagatcaggaaaccccaactaaagaccctccatacacagagccaggaagagttagggttggggggttggggagttggctggggagggggcagtagcctgtctttctcctccggtgtcccactgattcgctctttgctccccacaggcccgggcctctatgcaggctgagatggagctgaagaaggaagaggcggcccggcaacggcagcgcatcgctgaactggaggagatgcaggagcggctgcaggaagctctgcaactagaggtgaaagctaggcgggatgaggaggccgtgcgcctcgcccagaccaggtaggcacggtggccagggaacctttcctgccagcgcccgcgcggaccctccctccccggctctgagatgtccctgtgcactctggcaggctgctggaggaggaggaggagaagctgaagcagctgatgcatctgaaggaggagcaagagcgctacatcgagcgagcgcagcaggagaagcaggagctccagcaggagatggcgctgcagagccgttccctgcagcacgcccagcagcagctggaggaagtgcggcagaaccggcagagggcagacgaggacgtggaggtgagacaaggccgggaaccgggagaagctgggggagccagtgtgtcactgagccggaccccagagccaagctacctgtctgccaactcgcattatcatcagctggctgtgccatcgcctacagattgcctaacctctctgtctgaagtctcttatctgtgagaggaagcagataccacgttaccactacagaacaagcttagtttaagcatggtatttagtatgtaaatgctgaacacacctgtggctgtgtttgccaatagtattattaacctgggcaggattccccacctcctagcctccaaaacactccccggagcttgaatgcctgtagaaaaggttctaggttgttgttgttgttgttttggttttagatttgtttcttttttaatctcttttaaa

SEQ ID NO: 24614 - DNA, 1180 bp, Mus musculus
gaccgtgcagttacagcctcccactgtccttgccagccttgaaacctcagcccaaacctctgtgtacgcagtagaacagggcaagctggtgctgcacctgagctcactccagcaggacttctgggagagtcctgacagcaaccctggggtccacagagacttgaactcctgggatgggagccagctgggcggagctccgcacccccacagttcccaacagacacactccaccccaccatcatccgggacccactgaagatgctatttacccaaagcccaccaggccccctcctctcccagtcagggaggctgtgagcggcagctgctcagctgcctgcctagcggggcttcccccgaccctgaactggagaggaggctgggcccttgaagcttttccccagtcacacagcccatggctgctgagctcttcagctgagctctaggctgcagctcttccttcccccacctggcttgtaggcctggtagctgattgtttaactgcccctccgtcctgtcttcacagacctctcccagaattcctccccttcctccctgctggaccagctgcagatgggctgtgatggggcctcaggcggcagcctcaacatggaatgtcgggtgtgcggggacaaggcctcgggcttccactacggggtccacgcgtgcgaggggtgcaaggtacagatggactgaggggcgtggggatttgcctgcttcaggtaggaccccgaaaatagctccagcaaagctctttggttccttagaggcctgagctctgggtcatccaagggaagaaaagacaggtgtccaaatggacacctgcctactgacccagctatccactcagacgctgtggatggccagctctggggcctgggctccagcaggcaggcagggaaagagcaagcttgggctgagtgtccattgaagtcagtttccagggccttgggtcttaagaggatctttggcaagagagtgatgcttctaagttgttctaacgacacaccatcagaatttcacaaagcgccatctgaaaggatggcgagaggcggctcagtgctgaagagcgcttgctgctcttctgaggatccgagtttgatttccagcaaccatgtctggtggttcaatctcctattaccccagctccagtcctcttctggcctgaagtcacccacactca

SEQ ID NO: 24615 - DNA, 1263 bp, Mus musculus
ctccaggaaatctacaaggacatgtactaaggccgcagcccaggcctcccctcaggctctgctgggcccagccacggactgttcagaggaccagccacaggcactggcagtcaagcagctagagcctactcacaacactccagacacgtggcccagactcttcccccaacacccccacccccaccaacccccccattcccccaacccccctcccccaccccgctctccccatggcccgtttcctgtttctcctcagcacctcctgttcttgctgtctccctagcgcccttgctccccccctttgccttccttctctagcatccccctcctcccagtcctcacatttgtctgattcacagcagacagcccgttggtacgctcaccagcagcctaaaagcagtggggcctgtgctggcccagtcctgcctctcctctctatccccttcaaagacatgagccatccaaagaaacactacgctctctctgggcccagctttccaagaagcctggcctggaccaactgccatcccagcttgtggtcaccaccacagggttcctcctccagagagcaagtgggcagggagcctgggccgggagccatattcccaggctgtctcagccctaggcacaccactctctgacacttcctttcttctcgccggcgtcctaggtcattgtcacagatgacccttgtgctgcctaggagatgacccctccagatgtcccctccagatgcggtccaacggccccactgaagggaagggggtagaggcaggccggaaggagcagcggcacacttaggtcccagggtcagaagctagacagcgagtgggcaggccctccatcagcacccctcctctaccctgtagcagcatccagactggcagatcccagtaccaggaactggaccatagctgttctttcttctcctgggagatgctggcacacctgccccccccccccccttgcagctgccccggtgtagccatgacactggctcacctctcggtcaccacagagtccctcccattccctccccaaggccactggggtacagctatggccctgttcttaggactggtgatctgtgagcaggcagggatatcctaccaggtcacccctgccagctcacaggcagagttgctagggttcctctgaccctgtcctctctcccactcacttgtaccagtagctctgtggccttctcttcttttgcctggctggtcacctgctcccatctgctgcttcaagtggcttgaaact

SEQ ID NO: 24616 - DNA, 1796 bp, Mus musculus
ggaggggtcacaagtgtctcccacgtgttagcctccatggtagcccctgtctccgcatacattttgggaatagttatccactgtgagctaggcagttgtcatgcctgcttttatagatagaaggtttctccatctgtcttaagatttggagtaatactgagtcttactgatgttgccagcctggggtctaaggttatcctctagaagtgctcaggactgtgccctgtcactgagctgtgttctcaggtgacattatggttcccaggcctgcttgaggcttctcagatagctggccttggtccacctttgacagataatgagacagcttttttcttaagattttattttatgtatatgagcaggctgatgagagcctcagatcccattacaggtggctgtgagccaccatgtggctgctggaaattgaactcaggacctctggaaggcagcactcttaactgctgagccatctctccagtccatagtttgaggcaatttaaatgcaggcttacagtgaatccaaggggtgggggccatcacagcccctcagttctatgcagcacaccagggattgtgggacatcctggtctaagacctctgtgaggacttgagggtggagctactcagcagtcatgggtctgaggaggcaacttggccttctcgttgtaaaggatgggttggttgtttaaaatgttttgttttgtttttttttttttttggtggtttttgtttgtttggttggtttttttggtttttttggtttttttttttttttttggctcaatcctgagtgtctgtgtcttctagctaagaagtacgatgcctttttggcctctgagtctctgattaagcagatcccacgtatcctgggcccaggcctaaacaaggctggcaagttcccctccctgctgacacacaatgaaaacatggtggccaaagtggatgaggtgaaatcgacaatcaagttccagatgaagaaggtcagtctgggcggtgtgtggtggggaaaccagaaagagctaggtctgggtgccttagccctgggttaagccttttcactgggggaaagggtacatgctagcttagcctggtgaccttttctgtccatgcaggtgctgtgtttggccgtcgctgttggccacgtgaagatgaccgatgatgagctagtctacaacattcatctggctgtcaatttcttggtgtccttgcttaagaaaaactggcaaaacgtgcgggctctgtacatcaagagcaccatgggcaagccccagcgtctgtattaggatgctccaataaacctcactgctgccactcagccttggtgtgcctgtgattgggggcagggcatgtgaggccactatcccaaagctgggagagggggtctgtaggggtctacaatgcttctcaggtggtgggagaggtacctctaaccccctcgtgggtagagagtccggcttttctaggtgaagttcccaagctaattcccccgtggttttgtttggggctgtagctgttgtcaggccttaggggaacacccatagtctgctcagtaatggctttaagccctgggcataagagttcctgtctgctgcagcttccaggtaacacccatcttgggcaggcccctcaaagccaggtggggacagggctgagggaaacaaaccagcagatgtgaaggcaggtcaaccagtgaatgtgtaaggtgtccatttgaatcaccttgtgaagatagctctctgagtactgaaactaccccaggctttgtgggtgacagaggtctcttatctaaagacttg

SEQ ID NO: 24617 - DNA, 1199 bp, Mus musculus
gtcccgtggctcgggagaactgggctagcctggaggagtacagtccacccagctgcccgcccttactgagtcctattcccttcctctctgccccataggtggtcacaagtcgggactcgcaggagaccctgctggtcattgcttttgtctttgaagtctccaccagcgagcatggggcgcagcaccacgtctacaagcttgtcaaagactagccagccctcgacctccacaggatgcaaggcggacatcctccacacacctgcctgcctggtcttcccgtgtgggttgggggacctagcccagcccccctgggtttcaggctgggacccaggctgcctccctggctccagcacacatgctccctgccactgttctgcgctttactggagagaagagggctccacggtggggtggcttgcttgggcactgagccacagatgaccaggctccacctggcctcaagtgacaccagaattgtaccatggaggacaccttggggcttagtgtgtggttgctggcccctaggggaatgaatgtgctgggcaggtgagggttgcattgagactggggaaaggcagcttgcaaggaggccctggtacaaggtgtcaggttggggaggttgagaagggcccacacttctttgtaccttctgggtaccagtctgttcccaggtcccttacccagcaagtttgggtctcccatatcagacaatgtgccaagatggaggcccacagaagtggacggagggagctggggctggttcagctacctccctagcagagctgcctatggggcggggaaggggctctgctgggctgaagcctagacagggctctatttcctgttccccccagcataccagccactagcgcccccccccccccccgccctcttctgtgtcctgaagacaggtggcagggaacaggaggctgcctctgccttctccacatccaggtcccaaggtcacctgggtatttatgagtttcaaatgaagtactgtgcccccaatccagcccgagcttccggaaggttttcgccattgctcaggccacctccaaaccccacgtaggttttataacatgtattatatatatatatttttgtgtatttttaaaatccagctgtgatgggctacatcataaatggctcaaggcaggggccactcaaggcctggctcctgctttaaagaaaaaaattaa

SEQ ID NO: 24618 - DNA, 1709 bp, Mus musculus
actggcctgctaagaacacaagcccacagccaggggctccctggtccacagctgggtctcaggccccttacctgccttccaagtcctttcgcagactcttgagtgtggctttctgtcctagccagcatgtcccacagactctgttgttcctccaacgcccgtcattagtgacagctttctctctgagtttctgtggtgtggagagtgggtagaagtaggtttatctttcccgctgtctgccccactcaaggacgatgttagcgctcagccatccctgcccagcacagctgctcagcctcatgctcccacccgcacccttgctgtgcagaacctaaggcttgctcccgtcccagactcgagtggacggacatccatgtccacccaggattgacgaaggaaggaacttcacactcctctatcatgcaaaaatagttttcaatttttactttttagcttgggttttgaaaggcaaactctaggaggcttaaaacgggcagttactcttaaggcgaggtagatacctcatcctgcaccgcagcctctgtattctggtgggagctgtaagggttgcgggcttccggtgtccatgcatcaagccaaagtctccaaaacttgggcattgaattagggcaaatcttaaatagttttggggttggattttagtcctacaggtgatgattgaacgtggctggcttctccacagcctaaggaacccccatggggacacacccaccacccaatgacccatgcacctctgcctggacagctcacttccagccctaaggaccactgtgctcaagatgtgtggctgtagtaagacagtctcatgtcaggcattaagtcaaggccttccttcacacctgcgggacagcgcttctgaggctccagttctgctctgctcgaagcaggagggatgggttgtgaaggagtctgggatgtgactgggaccctcgcatctcacactcggcactctgcctctttccatccatgtttgagagccctggtctcaccaggaagtgcagagcaggagccgactgtgtgtgtaatgctctagtgtttgtagttctcttcactagccttgcagcgccagggaggccgggctggaatttgagcctaacatgttaggtttttacgggaaagctctttttccagctgtctcccaagtgcgtattgtgggccaaggagactggtatgggaaggggggatggtcaaggttccaagccagaaatggaaggtgcccagcacccctggattttacatgttcttgtattcagtaatctcagacgatttacacggaaatcagaagatgtcttcaaatacccttagactggatagagtgatggggaagcagatgatgcattgaaattttggtttttaaaaaatcacttagatgctgggagtaatggtgacacacacccttggtcccgtgacctgggaggccctgtctcaaaacaaaacaaaaaatcatttagatgcattttgtgttccttaaataaattttttaaaaagtggtttttcattgttcatggctttttgtttttgttgtttgtttgatttttgaagtttacttttatctttgtctgctagagttttgtgtccagctgcccttggggaccagaaagggactttgaatctccttgaaatgaagatacagttgttagccagatgtgggtgttgagaactgaacccaagtcctctgaaaagcagga

SEQ ID NO: 24619 - DNA, 1115 bp, Mus musculus
tgtgtgtgtgtgtgtgtgtgtgtgtgtgtgtgctcgctggcacagatgcatcgatacatacttgtataatacacaacacacacacacaaatatatatatatatatatatatatatatatatatatatatatacactaaatagagaaagatttggacatagttattatgtgaaagcagcagtctttccacgtcagatgagtgcattctacacttgtccctcactgagcttggtgtgaaaagactcacctctttagatccattctgtgaaccatggggtttcacttaactgatcctcacaggaagattttcagggcttgtttttattataagggtcataataataaccataataataataaaggcagtggtggtgcaagcctttaatcccagcacttgggaggcagaggcaggcggatttctgagttcgagggcagcctggtctacagagtgaggtccagtcaaagctctcagcaccatcaggggctcaagcttcacccccgagctggagacattttatactaaaatactgacaagtgggtggaccgtggttgattgttgcgtgactcttgtgcatagttctgctcacctccgtgtgattgcgctgcctcagcactgaggtgacaggagcggcagttgtcccttccaacctgtgacctgcccacctgtccttctgttcttaggcccttggactggacagtgccaatgagaaaggcttgtacagaaggggcgaggcccagctgctcatgaatgactttgagtcggccaagggcgacttcgagaaggtgttggcagtcaatcctcagaacagggccgctcgcctgcagatctccatgtgccagaggaaggcgaaggagcacaacgagcgggaccgcagggtgtacgccaacatgttcaagaagttcgcagagcgggacgcaaaggtagtgtgcccacagccccaggcttgtaaggacgctagcctagggacaaggttgggcagcctggctggaagaaataagacttaggaagggactccatgtgggcagagacacaggtgggaggccctggcgtgtccctgagagctgagggctgactcctgaggtggagcagtgctcttcttgttctctgttttgttc

SEQ ID NO: 24620 - DNA, 1317 bp, Mus musculus
acttggggcctcacaccaccatagaagtttgcgagtgagttggctcagctggagtatatctaagaataggactatcagtgtagccttgattttgatttgtttagctgccaggatgccacatcagcaaagattgacttgatcctgtggctctcctgctctgcttttctctgaattcagcgagggctttgggaactgcagtagtgcatgatttactacacttgaatccatgccacgttcttctatggagtccctgaaggaagaaagagccagcttgttcttcctggacctaaaggcagcggagatgactcatttttgcctaactttttcccgtcataaggatagccattagcactgccaagcttagaaccatccggcatgacagtctcctgtgaaaacatgcttcctattatttttagatctaaaattataccataaattcatctcttctatcttgagaaatgggcccctgaggatgcaggagtgctgcctgtgtgcaatggcatctgcttgttgccactgctaagactgagactctgtgggctgccctcaccaaagggaacacagtgcttttgtcctgtctcttgccttggaggggttttgctataattcactctccaataaagctatttcatttttattgaaagagctttccccccttacagagtaggttcttcataacctacagtcactaatctgttttttgtttgtttatgagatgtattcttttatgttgtagccctgactgccctaaaactcagtatgtagaccaagctggccttgaactcacagagatccacctccttctggctcccaagtgctgggattaaagttctctgattatgtttaatctaccattccaaaattatagtagctctacactcaggtatctcacgtatggtcttacagttcagttctttaaagatggctctgtaaagtctgagcattcagaaacacatagcccagatctaagttttaaccttgcggtagatgctttggagagcagacttaccaaacttaacagcagagtgaatcaaactgcctctgtttattagtgcagctagttctctgcaggtgtacagttcctggctgaacgactctctgcagcctaccagtggtggcacctgggcaagtcacctaactccccaagccttgcaaggttgcagaggcccacatggagtaatgaggcagatcacttagcacaccgccccaccctgcccattagctgttactgtctcagcgatggctttcattcattttccccttagaccacgagaaaatagaaatctctgcaacaaatggtatttttcaaatcttttc

SEQ ID NO: 24621 - DNA, 1107 bp, Mus musculus
aaacatgaaaagcctagaatttgggatgagttgttagttaattttgagaattttctttacttttggattggaaaagaatgtgtattgtgttgttagttcctacaggggattcagtttaggaatacacagtaggaacaccctgtggtgtgctttgcagagctccagtctgctgaaagccctgatacctgaaagctgatggaggggctcttccccatgcagagctggctcaccctaccgaagggcctttcattgctttagatgatttaattctactttagtgtacgactgcatgaaattggagggtttataatcttttatcctatggtgctgcataaatgtgccaaatgccataagtttattacttttaaattttttgtttttaagatttatttatgcatttgggtatcttgccagaatgtatgtctgtacatgcatacatgccatttatgtgcacggtgctggtagcagcggaggccagaagaggacactgaaggtcaggagctgaagtgtgagtgctgggaaccaaagcctgacccttgactgcccagccatctccccggccctcatagttcactgcatccagttacacaaaggcatgtggtgtgcgcttgaactagctagtacctttttattgaaagcccattttaaagctgagttttcaggtattttaattactggtgcttgtttattttgtctgtctgtggtaaccccataatagagttagttaccagcctcatttttctgtcagaattaagcacaaatcgcttcttgtatacacgcagaaagattgggctgctgctgctgctagggcacttaccctcaagtgcagctccttttgagtctggacattgcccggaaatttctttactctgctcttccctcctccctgtcttccttttctcctcccctccccctccctccctcccttcttctgtttttttctatcctaggattgaacccagggcctgtgagcactgagtgagtactgtgcccttaagtgatacctgacactaagaacctgctctccgggctgtgattccctcagatcctcctggtttggacactctaagttctgtaattcatgcacactgtgcaaatgtctccatt

SEQ ID NO: 24622 - DNA, 1199 bp, Mus musculus
gccggccgggcaccgccctcacctgccgctcccgagccggctcgcaccgggcaggcaggtgaccggagggtctcggaggtactgaggaggaagggctaattaaaagttgtctcggaggtggctgagcgggtacagccgcttgcagccaagcgtgacgacctgggttcgatcccgggaaccgacatggtagtaggggaaccgactccaaccgcgagttgtcctctgacctccctgtgtacacagcacaaacaccactggctccgatacacattctcatctctcacccccgctctcaataatactaaggaaataaaagttattttaggaatcttcattcccttcgccccagcggcatcaccactcctgttccggccatagtccttgactccaaacccagcattttgtgtgtgtgtgtgggatgaatctaagggagcacgttgcattatgaccatcttcctcctcctcatcttcgtctgtggatgagccaggtggagcgcttgcgcctcattttttaaataattggtgtctgcagccatggcgaaagcgttggaaggtacagatcgtaagcagagcgtgcagaacttgggacagccctcggcggggctcgggacagggtgtacagcgcttggccgccattcagtaaattctgcatgcggcagttgggagctggtggtttggggatttttttttttttttttttcccttcttcttctttcaggagtgtgttttccagcggaccagggcgttgaataggcactttctttgcttcctttaggggaaggagagagtgtttatttctattgtcatcccattttcttagggctgtggacaagggaaaagttaaggtgtgtttgggttaagcattttgtcttttcctccccacttcttgctgttagctttatatgttgttaaaaattatagcttttcctcttggtgtctgaatcaattcaagaaatgacttggaaaaaaatcttacttaaccgttttctgttactctcccagctgatcctcatttgcctgactttttggggggggtattttttttttgtttgatagttgaaacatcaaagttttattcctttgttattgggagtttactattcaattaaagcacgtataaatttctgtaacctaatactctccacacagctttcgctttggagtgctacagaaatggtgtattttaactatatttattt

SEQ ID NO: 24623 - DNA, 2366 bp, Mus musculus
gtggtttctatgctcacatttttttcctgcgacttttatgctacatttttcgatgagcaaccagtttgggtaccattttatcactgttgaaagtattgttggatccctctcatcttctcacaactaagttcctggaatcttgagtctgttgtttttgttttttttttttttttttttttttttttggtttttgttttttttgttgttttttttttttttttttttttttggtttttttgttttgatttttcgagacaggatttctctgtgtagtcctggctgtcctggaactcactttgtagaccaggctggcctcgaactcagaaatccgcctgcctctgcctctcaagtgctgggattaaaggcgtgtgccaccacgcccagctgagtctggtttttaatgtagacaaaagagaaccagtgaatttcagttactgggagcctcaggtgttgtgaaatagtccttttctgtgtcctgtgttgccgtaagaacagtcatttcagtctgtcctcccatttagaaggccctcctggagctttgcctgctcagcttgaatggactgactgtcttgtaacgagctttggggtgatccagacaggagacgaaggtttctgagctgccctgttcagggagtgttccctcccacattccaaggccttcccagacagctctgcttccatccacagctttcctgccttgcctagaattctggccttgactcagtttctccatgtggctgtgctgttctcatttctcagaggcctttgagatcctgggtgaggagccaaggggaggagaggctggcacttttctcaatcgttttcctgttggttttgacatgagtcatcctatgctgctatttccttgtataatgtaaggtttctgttttgtttttaaacatcaattttgagatgattgaaatgtacttgaggctttttcttcttaatgcaaaaaggctttgtgaactttgttttaggcttggcccctcatagacttgattacctaaacattacatgttcctggggtgaagcgtgcacgcatcagaaggacaggattggggtcacgtgacagctgcttgcagattttagcaaggaccaagtgggtcttgattatagcactctggaaacagctcagtttctaacttggagaaagccagagtcgcaagcctaggctcccctaagcaagctcactgaaacgcaccactgcctccttcctgtgtggaagactggagagtcaccctcatgattggctcaccagcaagcagcttcctgtaactcatcaacttcacctgaggaactggccagccattcattggctcatgcttggttatctggaaccagacttgttcctgtagaaagagttttaagtcaggttatctatgcacctatcaagaataaagagagcagatgacatcacataacggcagggaaatcttacagcagttttaatccactctgggttgtcaactgtattgacatctaaagcaatagcagacctacctgaaactccttctcagcaaatctcagttgtgggattatagaaatcctagtgacattaaggtgacctaaccaagaaacacaagccaacagcaggtctgttttaatcattgactccatgggaaattttaatgggggtagaacctggaacctcattccagacataagtcccaccagataagggctttctccttgctgcttgaggagccagagaacctgggagagtggaaggagacaggcgcaaaagctgcccttctgtgggctcctgagcttggccgagcagttggtgccatagaggccaggtctccctgatggactgctgttggctcctggttaaagataaggccccccgaggccctgatacgttttatattctttctactgagtgcgatgtttgtgtcctcacaaatgcagatcaataaacagagtatttaataacctgcttggttccacaagtttggtttctttgttgcccaagcagttaactaaatatgcaatgaaacagtagcataggtattgacctttgtgggggttgtaattttgtttctctaactctttttccttttctctctttttttttttttgtttgtttgttttgtttttcgagacggggtttctctgtgtagcccaggctggccttgaactcagaaatccgcctgcctctgcctccctagtgctgggattaaaggcgtgtgccaccacgcccggcttgtttctaagctctttaattgtggcattaacgtgtaatttgaaaaattgtaagaaaactttccccaattcaggagctggggatatggctcaagacagtgattatttaccacatgaacactgccgtaaaaggccaggtgtgagaatacagaagcgtgaca

SEQ ID NO: 24624 - DNA, 1122 bp, Mus musculus
ctacagagtgagttcctggacagcaaaggctacacagagaaacccttttaaaaaaaccaaacaaaaaagaaaaattgtgtcagaagccccatcttgactctgttcctgactgcattcctgacaacttatttgctatttttctgacaaaggtgtaggttcccatgcggttgttaggaaggccttccatagtgtggtcttgtgagtaaggcaggtctgactttgagttctgattgtaggctgacttggacttcatatctatgttgagtcactcagccacaatgacaggtagtcaggactgagcagtacaagaaagtgttgactggtacaggcatagagtcttctcaagggctccactataatatagccatgtgtattataaaggggtgggttgtctcaatgctgtggattgcctgtaaaaccagaacctaggcacttggagcagtgtgccatagtcctagagctggcttctagggctcctgcctccacaacacagtccctttgggtctttgtgctgtgaggttaagggaagtgaccttgcctaacttgaacaatttcttctccaccctactgttttagatccttctgtcctttctgtttttgttttctgtttgtttatttgtttgttttgggtaagggtggtcaggttctcttataggcctggctgtcctggaatttactgtgtaaattaggctttccttgacctcaggcctgcttctgtgctgggactgaaggtgtgtaccaccatatcctaatagaaaatagacattttctatttattctgatgttaactagttgtatagtgatcagttttgctttgggtgattaagaggtctgtgaagctaggactgggacctgggttgggcgtgctgtcctgtgctctgtggccacatggctagatggtgcgtcctgttgtgttgggacagataagctagagcctgaggggaggggcttcttcgaggtccacctgtgacgcacctcgcctgtgagcattctgatcccagtgtgtgcagcagggcctgccgccttcctgtctgccctaagcttctagactccagcagctcatgacttttagatggtatggagtccagcatcgaacactcatgtcaatagttagcttggagg

SEQ ID NO: 24625 - DNA, 1143 bp, Mus musculus
acagttccataactgaggaccaaacaaatctatgaaccatgggggccattctcattcagaccaccacagtggtgcatagtccatcatactagcactcaggaagtagaggctggaatcagaaagccaaggtcatctttgactaagtttgaggtgacctgggccacataagacttgccttagaaaagagaagacagagagaaagaaggcacttacagtgcacgtgctttctgatagcgtccatccaggtgtctcttcacctccgtgctttctttacagatcaggaaaaggacatagcaagtaggagtggtataaatgtggagaggatagtgcatgtaggaaggcaaggctggtgtggtacttcttaggcagtctttcctgcatcggtatataacatacatacacacacacacacacacaccccttgtgtttccaggtacctggtgacccatctcatgggggcggacctgaacaacatcgtgaagtgccagaagctgaccgacgaccacgttcagtttctcatctaccagatcctccgagggctgaaggtacaggcagtagctttgtcatttggggaagtgagttatctctcccgtgtagtaagaacttagaaaagacagtttttcttatgaaaaacttttaaaagagttacagaatcaaccaaccctgctgctcttgtatttcccaggccagtttactagaaagcaaatattgtccttccctttgatcctttagtctgaatatccaagagacttttagccacattgaaaagttagtagcatcctgatacaacctggtatccagtcagtgtgatactgaggctttaaaatattcttcggggctatgagctgcttttatattccttctcaggacttgagaggtagaaaaaagaaggaccactgtgtgcagcctgagtgccagccaccaaggctgtctggggcggggggacctcttcagaaccacctttgatgtttagcacattggagcccttactgaagtcatcctctagaaagaaaataggctgacaactccagtaggtggagtgggaattagagtttgtgtaatggcccgctgtgagcgcgcacagtgcttgactgaggggagagcactgcaagcactctagaggatatgacaccaaaaagctga

SEQ ID NO: 24626 - DNA, 1218 bp, Mus musculus
cacagtgatgacatagtaacctccatagtttcaaaaggtttgagtgtcccctcctagtgacccatgactctcacccttcattcaatgcaggcagccactgacccaattctgactctggattaatcttgtttcgtataaatggaactgtcgagggtcatgcacattactgaattgtgtgctcatctgtattgtgtgctccagcattcccagttgttcagcagtttccttttcataagcacaccaaagtttgtacgctgctgtcctattagtgagcacttgtggttcggaatataaacctattgtgaacattcctgtgcacacccgtgtgggcatatgtttttatccttgagtaaatgggggggggggttgctttgcttgaagctttatttttaaagtttcttggagtgttttatcatgtcatgcattctaagtgaaaactggggtgccctctttctgaaagtgacttttctgctttcctggttgtgaggtagcagaacttgctgctcccatgcctgacttctgctcttgcccttagattctggattttgggctggctcggcacactgatgatgagatgacaggctacgtggctaccaggtggtaccgagccccagagatcatgctgaattggatgcactataaccagacaggtactgactgcttcagtcgcctccccagatggggaaggggtgctccctaacatggctttcaggtgacttagcagctggggccttacttcttacgtcttccgtgtcattctttctgtgacactacctgaggggagtggtctcttaatcctaacacctatgtttcctgggaggattcaccatttaccagtaacaaagttttgcccctttgtgagttgcttatttcttttatcttaattatattctgagttgcacgacctgtggagtcttttcttgagtgacaattttaataagtttgtttctatataaaaaagattgtcaaaccttgggtgtcttaaatcctgacttgaatctctcactcatagttagagtcatttgtgtccatgaatatgaatagaaaccatgtcggtgcttgtatcctctttactgttccagtggatatttggtccgtgggctgcatcatggctgagctgttgaccggaagaacgttgtttcctggtacagaccgtatcctttaacacgttttggccctgtttctcatgtgtgtgctgtggtagatgtgtgcttccct

SEQ ID NO: 24627 - DNA, 1792 bp, Mus musculus
aaaacaaggcagcctttaggaaggccatggtgcatgtgtgtgcatgcgtgtatgtgcagccgccctccctcacttcaggagcaagctgtttgctgtgcttacccttcacctcagtgcagaggtctccagtgccgagcacaggcacctgccatcagtagttcctgtgtcatcttcacatctagcagagcacggatgtgtttgcatgctgtgctcttggagcttgtcctgtcttctggaagccctggacaaggcgtgtgaaggcttcccagaagttcctgtccacattgcctccgcccaccgacgccatgggcacactgctccctcctcctcctccagctactttgtgttgaacacaattgattctccaggtgctcatggtgcaggaaaacaggacagacagagagcacctgaacccttgccatctgatgtcaccaattcaggaaaacgagtcctctcctaggactatccccggttctggaaatcatgttctcctcactcatggtgacaagctaagaaagctgaacaaagggagagacgagagcgcctgaagccaggagctcctttactatctttctcaaaagggttgttagacacaaaccaagtcatcaaggccccgctcctctcctcggaagggtcccccaccccccggcagcttgacactgaatccagtgtcaatttggggagaaagcagttttgtcttggaattttgtatgttgtaggaatccttagagagtgtggttccttctgatggggagaaagggcaaattattttaatattttgtattttcacctttataaacatgaatcctcaggggtgaagaactgtttgcataattttctgaattttgagcactttgtgctatataaggacccatatttaagctttgtgtgcagtaagaaagtgtaaagccaattccagtgttggacgtgacaggtcttgtgtttaggtcaaggtgtctcctctcagtgcagggacatgcctgctctgtggggcaggcgaggaccctgaatcatttggagcccagaaggaggcagactggccaggtctcaccacctcagtgtgcagttcaactccatgccatcccatcaagatgggttagtagcagtgtctgtttttgaatgccaagtgtgatttccaacaattctgctctggttatttcattgaagacatctttgcacatgtgaccatgctgtgttaggggctgtgttccagggactggactcgaagctagaactggcagaagagttctggcatccacagcgcaatgctgccaccacccagtttcttcatcagaagacaagggaacgagaaaactgctgttcgtttgtatttgtgaacttggctgtaatctggtatgccataggatgtcagataataccactggttaaaataaagcctagttttcaaattcagttggtttctcaggtttattctgttcctcttcttggttgtgggacttttgttgtcagctgtgacctagcacatgtctgacagaccctttctaaagctgcttaggtggacctgaggggaaggcaggtctttgcagtgagtgagttactgtgcagagagaaccgcatggggagagtggcctagtgtgcgtccacacgcactgttcttgtacagtctgaaatgaatgtttttcacatcttcaagtaattggtttgatcagagaatatccacagagtttgttacgtatcttctgtggctactttcctgataccatgacaattgaaatccgaggggcgaagactgcagggctatccaggtagctgcttaatgtttagcaaaagt

SEQ ID NO: 24628 - DNA, 1125 bp, Mus musculus
attaaagccatctcttagtccccttccatttttttttttttttttgaggcaaggcctctcactgacttgccaactaaactaggcttgctggctaatgagccctggggacccttctgtctcctccctaccagcactggggttacagctgaactccaatacacccagcttttatacgtgggtgctaagggttgaactccagacctcctcatgcatctgagcactgtgtcagctgacccagctctccagccccgggactcactatgtagcccaggctgggtttaacacgttgcaatctctaagtgctgggattacaggcatgaactatgacacctgagtcgtcttctgccttcttgcctggtgttgtcttcaaggttactgttgtgcccgacttctgtccccaccccaccctgacctctctgaggtcacacctgggcctgtgggaggctgggaactgtgctaaaaaacactcctgccttccagctacctggtgatgcccttcatgcagacagacctacagaagatcatggggatggaattcagcgaggataaggtccagtacttggtgtaccagatgctcaaaggtctaaaggtgggtggagcctacatggtagccaaggcaacttccttgttgagagccagcccgctgttgtggggcagaggagggttctcgatgctggtgtggaagctgacgtctctgattcacatctctctctctctctcattctctctctctctctctctctctctccctccctccctccctccctccctccctttcagtacatccactccgctggcatcgtccacagggtgagtgctttctctatcatggttccggggaatgagttttggggtaggaacagggtactctggtggccaagggattgggagtgacagttctcaggagacagaggctgtgagtgtttcagccgtgagagggctgatgtagaatgttgagagaatggctgtgttgagaagttggggagatgtttgtgattgtaggtgtgtgtgtgtgtgcgcgcgtgcgtgctgcccccaaaacccctagctggcacttcaggctctaaggacaggaacatggtggaaaaggatgtgtagcccaatgtcattttacagatgaggaaa

SEQ ID NO: 24629 - DNA, 1883 bp, Mus musculus
aaagtagcaatgaaaataagtgcatggctggggatcaccacaacaggaggaactgcattaaagggtcgcagtgttaggaaggttgagaaccacggctttagagggatagtgcttacacaggaaacagatcttttggtgtccattcaaatggacaccatatatgaatgaacgcatatagcaatggatatccagctcacactcccgtggccttctctccttaggtttgccttcgtggtttccagttgccatgaggaagcctcgccgaaagtcacggcagaatgccgagggccggagatccccatccccatacagtcttaagtgctcacccacacgggagaccctgacttacgcccaagcccagaggattgttgaggtcgacatcgatggccgcctacatcggatcagcatttatgacccacttaagatcatcactgaagatgagctgactgctcaggatattaccgaatgcaatagcaacaaggaaaacagtgagcagccccaattccctgccaagtccaagaaaccctcatcaaagggcaagaggaaggagtcctgttccaagcatgcgtccggtacctccttccacctcccccagcccagctttcgtgtggtggatacggggagccagccagaagcgcccccattgcctgctgcttactaccgatacattgagaagcctccggaagacctggatgcggaggtagagtacgacatggacgaggaggacattgcctggctagacatggtcaacgagaagcgccgagcagacggccacagctcggtgtcggcagacaccttcgagctgctggtggaccggcttgagaaggaatcctacctggagagccgcagcagtggggcccagcagtccctaatcgacgaagacgccttctgttgcgtgtgcctggacgatgagtgccacaatagcaatgtcatcctgttctgcgacatctgcaacttagctgtgcaccaggagtgctacggcgttccctatatcccagagggccagtggctatgtcgctgctgcctgcagtctccctctcgtcccgtggattgcgtcctgtgccccaataaaggtggggccttcaaacagaccagtgatggccactgggcccacgtagtctgcgccatctggatccctgaggtctgcttcgctaataccgtgttcctggagcctattgagggcatcgacaacattccacccgcccgctggaagctaacctgctatatctgcaagcagaaagggctgggcgcggccattcagtgccataaagtgaactgctacaccgctttccacgtgacatgcgcgcagcgggctgggctcttcatgaagattgaacccatgagagaaaccagcctcaacggcaccacctttactgttcgcaagactgcgtattgtgaggcccactctccaagtgtggccgttgccaggagaaagggcgactccccaaggagcctcagtgaagtcggggatgaggatgggccgaaagagggtggaggggaggaggagcaggaagaagctgaggaggagggccaggaaggccaaggtggggtgggcagccccctcaagggcgtgtccaagaagggtaagatgagtttgaagcagaagatcaagaaggagccagaggaagctggccgagaggcaccctccatcactctccccatggtcactgtcccacagataccctcttacaggtgagcctcatgagacgctctcttgcaggactcttggtttgttcttcacagtagcccaggtcttccccacatacggctgatggatgcctggtctcctctgctcccaaatggagcctggccctgtgttgtggttttgtccctgccttcagagtaatgtgtctcctttagttctgagtgacataaatcattta

SEQ ID NO: 24630 - DNA, 1099 bp, Mus musculus
cctgagacctggtacctcagaggccagagggggttctctcagcattctctacttcttttatggcccaggttttggttcctttaagctgtcattttcctgtgttgcaaatccctcagcaacagtgcccacttctggaacaggattcactgatttttttttttttaaggtttattttatttatttgtttttttacttctcaagtgtgtgtgcctgtgtttaaacactaagcaggtagtggctgccactgtgtgcaggtgcctgtagagaccagaggcatattcctaggagctggagttagaggaagttgtaaatcagtcctgtgcaagagcggtacccaccctctagccccgcatttgctgattttcactgtttgaccaaactattttttttaaagatttctttatcttatatatgagtacactatcactgtccagacacaccagaagagggcatcagatcccattacaaatggttgtgagccaccatgtggttgctgggaactgaactcagaacctctggaagagcagtcagtgctctaacctgcagagccatctctccagccctgaccaaactattttaaacctccatctactagtaagaacttcactgttttctagccaaggcaaagctgtagggtgcgattccttcaaccccttagtcttactgagtttcttcagaaatgctttccagctgtgagggccatggccggccagcggtgcccctggggctggggaagctgtcagaagcctctcttcagtttgttcttgtagtacagtgctgaagactcactctagcaccaggaagcccgggcccggggccctgagcggtgctggggaagggccttcagcaacctcagggctggcgggaggctgaggcaaaaggaaggagaccacagcccccttgttcttgccttgcttagcgggagcaggacgagaagactagtgcagtgaaggaggagctcaaatactggcagaaacttcgccatgacctggagcgagcgcggctgctgatcgagctcatccgcaaaagggagaagctcaagcgggagcaggtaagcagagccctgccaggccctcgctggctcccctcactcctctgg

SEQ ID NO: 24631 - DNA, 1983 bp, Mus musculus
catcctctgcggcctggcagcaatccctccacaaggatggactggtttctggtaggaactcgcaggtcacatgcgccatgggttaatatcatgtaggcctgcaaaggaaatggagatgcctttgtctctgcctttgtgctttcgtagctccgtgtctgttagacatggaaaagcaagagtgggttggttccaactaaaaactgctcacttcaccctctactctgtgtgcagtggcctgacgcctcccaaacgcagccgtgggaagccagccctgtctcgtgtgcccttcctggaaggtgtgaatggagactctgaccacagtggctcaggtgagactatcgaggcagagctggggaagacatgttccaaggagcaagccgtccaagctgctcgcatctttagcttgtgttgtattttgagtttatgttgctgtgatcgtgatcatggtaaaagcaaacctgaggggaaggggttctcttcacttagagcctgcagtccatccactgtgaagcagagccgtggaggaacgctgcttactggcttgctccccgtggcttgctcgggttctttcttatatggtcctggaccaccagcccggggatctcatcagccacaatgggctgcgtcctgccctcccttatcagtcttctgttaaaaagatgcccactgacttgccataggccagtgatggaagcatttactcaatcaatagtcccagaggacccgtgtctaggttgataaaaactaaatcaaagcaaaaacactagccagcacagtttgaatagttaacatgtgcccatggaggccgaaaatccagaagctctaatggaagccagcattccccactggaacattggctgctaactgtgtggttgttttttcagaattacttaatggatattcaacctgaaacctgtgtgtgtgtttgagagaagtatagagggcccccattcctttcttctaggtcatggtagaccctggaaatcctttgctttcaccagcctgcccagcggccctctgtgtgggaggacttttcattggtttcactgaagccctccacaggagagatttcaagtgtcttccttggtgctgtgatgagtatctgcttgcacaggtcgtcccacccatgcagtgttaggttgcaggaagcgtgtgtttgtagctctagctgttgttgcttcgctttgctctctagcgtctcagtggtaatgtgtcactgataacctggctctgtcgagaatgtctgtttcgcctgatagaaaagcaggcaaggcagggccgcaggaggcctggggtggctcccggatggaacaggtctagagcagctgcttcttacctcacggttgtctgtcacatcactcgggacggcccgtctctgccggtctctctaacacagggttccttccctggtccagctgtttgcttccttctgcctttctcatgtctgttgacagatgcatgcctttgagttctctttcttgtgagtgtctgcacacagacgacaggtctcacgtctagactctgtgcgtctgagcgtgaagtcaggaagtggatctgacacactttgtacttctggtggtgacatttttttccctttttaaatccacatactaaaaatgatgccaaacaatattaaaaaagacttgcactcccgaagcccaccatgggaacacagctgcccgttcctgggttgcttccgattcttttagtcacattttgacaagtgcagatgatacacacactctttttttgttgttgttgttgttttccaaacagggtttctctgtatagccctggctgtcctggaactcactttgtagaccaggctggcctcgaactcagaaatcggcctacctctgcttcctgagtgctgggattaaaggtgtgcgccaccacgcccaacttgatgcacacactcttgtgctcacagtttttgcttgtatatttcctcctttttggctcacagtttttctgtgcactgta

SEQ ID NO: 24632 - DNA, 2779 bp, Mus musculus
acccttaagccgtcagtcactaaatgtcacctgatcctggggatggacatgaccttgggtgggcagctccgtagctagttactggagggagatccagaggcagaggggagtctggacagtgtggtgtcctttatgaaggcttggaggcctgtgcctagtaaagtgttgtcccgaatctctgtagaaaggaggtagagtggctggtaatggagctgtccgactttgcactcctctactccccttgagcttgcctgacctggagctgggtccagaggcccccgtagggccttctgcagctgcacctcagctctgcttgcattctaggcagtggcttccaagggacaaagtcctgcccctgggtgtggaggacactgtggacaagctcaagatgctagaaggccgcaagaccagcatccggaagtcagtacaagtggcctatgaccgcgccatgatccacctgagccgagtgcgtggctcccatgcctttgtcacttccagctacctgtgagagccgagctgggcctgtgtctgccttctttgcctctcctctgtccctgaggcatgagaacctctgctgcccctgccacgtgtatggccggcagcttctttctaatggcaggccctgactggactgggtctccgagggcaagacccaatattgaccaatcatgtggttcccctggagggctgctgtgtgccaaaaaactcccacccgaggtccctggggatattccactgaagaaccacttagaagtagaaacagctgagagtcttagccagccagggagatagacctggcccacaaggcaagagggcctaggctgcttttctggggccagccggctctctccatgtctctcccacctaaccatacctcagggcaggcaaggttctgacattgatcccagagatgtgccagggtccctcgggaaccctcagagcttcccttcccccacaccgcccgtgcttgcacccccctgtctcatctcccacacccaacccaggttctcccttccctcattgctctctgctctcccttgtgccaaactgacagcaacatcaccaaattgatctttttctttgatgtcccatttccttcctggccagctgctacattagatggatgtctgccaggcgcttgagtcccaggtagaagctaccccacctgtaaggaccctcccccactcacagccctccagcaggcatgctgctgccctcccctcctgcagcagccataagcctcactgcatcagcatgatcaccgcggcacgggcggcgggtggcgggtggcgggtggcgggtggcgtgcggcatggcactgccctccagcacccgccctctgggattgctgcccctgcctcccagaacagggctcttttctttcatctcctgccttcaacctcttctccaccatcacctcctcaatccctaccctcaaaaaggaaggaaaaccaaactgtgaatgaggaaagctgactgacaagccaacgcagctctcagaggcttctgctcttgacatttcttttcacttctttaagcaccaaagccgcaggcgggtttgcagaccgccaattgccatgttgacttctaccttgatgttatttttaattgttttcaattttttcataggggagttttgggcaaaaaacgaagtccctggggagatcactgccatttttacatactcaaactttttaaagaaatacaaccaaccaaccaccaacttcttacacttttgggactcgagccagagtttaaaagggaaccaacaaaactcaccaagagggccaggttctgtccagcaaacagcacagccacgcgggacagggcgtggtgtacataactgtaagatagcaggcacacactctccattaccggaaccctcccttgtgcatccatgctgcacagcctaatcaaggagccgacacgtccccctatccccaggtagctggtcagctgtggactctgtgacccttgtctaaacctgtgtcaagatcttggggcttctccctttctgtctccttcccccaacactatctcctctgtctctatttttcagtctcggaatccttccctctctccgagtcccactttaaaaactgctcttttaggacaggatgcggctcggatctgctgtggcacagggcctcttctctgtctggtctgctgtgaagcacatgatgctctatttattgtagaaagtgactttatttgccttctagaattgtttataacagatggttataagagaggtaataaacagaaaaacctatgcctgtaaagaatacaagagttaattttacctaccataatatgatgtcttattttctctccgagaaataaatgttctatgggctgtggtgtgcggtgctgtttgctgtccgtgacggggcctcctgtcctaacaccacccgcttctctgaaggcagaaccattaagaacggacctgtctgtcctttagatctcatggatggcctgaggagggtcctgccaggttgccgcaggttgcagagaagtcattgttcaagtcactgtgtgctgtatgaggccgctagaggctgatggtgggtgctctccttacagaagcagagctcactgatggagctcctgtctggccagccagccatcttctcttcccgtgctgaggttacagctgcctgtcaccaggcaggtttattttttgttgttttgtttttagaccatccctttagaagatctgaactcaactcttgtcatgtttacatgacaagtattttgccagctgaacccagaaaggggt

SEQ ID NO: 24633 - DNA, 1343 bp, Mus musculus
acttgcatattcataaataaataaatcaaaaaaaaaaaaagggggggagaatccctgttatttcccacagccctgtcccttatagggacagaggaggcttgggaggacaccagtcacatgccacagagcttttcttgctgtccttggacttggaagtagatggtagagcgaggagagtctgccaggagtgtgagcactgtatgctttctggttgcaggttaccctacctgtaaagagaagatcaagaggagacctggcgggcggtctgaagtcatctacaattatgtgcagcgcccttttatccagatgtcatgggaaaaagaggaaggaaagagtcgccatgtggatttccagtgcgttcgcagcaaatccctcactaatttggtggctgctggagaggatgtcttagaagaccaggagataataatgcatcacccaccacaagtagatgaacttgaccgcttaaatgctccactctctcagatggctccgaatgactttcaagattagggacaaacggcctctgcccagttgttggagctcttctttgtgtgggtacccctaaccaggcctccctgccctcctgtggtttctcaccgttaggagatgcctcttcctgtctccttcccttctgagttgttactgtgcccttttccgggtctgcctccggctgggtgaagaagctctctggtaattaggcggccagctttaccagccctggcaaacgagcttttgggtctggtgctcttggttgaatctttgcattcacctcctggtgcaggagaggaagtgaactgttgcctcacattcggcacagcagcccactcttacaccgggtgagtggtttcacaatcagacaaattgcttattagcaaaaggaccaaaacgtcagagaaacagtctgtgctggggttgggtgtgcccacctggggaggtgcggggcaggcgaagggaattccctggagctccagctcagctctgctttttactaacataggagcaaaccaaccccctaagaagggcagcctgatgcttcatttggaagtgaaacttgcaaatgaggtggcagaatggctccagattgggccagctggaccctcctctggtgggaagccacagcgcctgtccattaaataggccattagctactggaacatggtaagaaagtaatatgtggtcatcccccaaatcaggtccaggccttgttgttgtgttatctgctcaggcttacacgtgtggtagacggcagcccagatcattccctagctccttcctctcacatttccatggctgtttgcagagccaagagcctgacagcaatgtctgcaattattttacttccc

SEQ ID NO: 24634 - DNA, 1484 bp, Mus musculus
gcccaggcccagggtcagtggtgcttcctgtttctccatggccacaggaatgattatgtgtctgtcctgtgtaatgctcaggtgtgagcacggtcctttctttgtccttcggagttggttcactggctctggccttttatgaactaggtcttcaccccaacactccagcccatggagtttgactgggaggcaatctaaaggccactccagtgacactgggtggtggcaactaaaggaaagactgtgtgcagacataggcttcttgtggggagggaagcttttttgtacctcagccccacccttacctacatttcagtgtcattgtagtttggtgtcttgcctactgttcccagagttgggacactttttccttttgtttttgttttgtttttggtgtgggggaggaataagatggggttacaaaacaaggtttttctgggtagccctggctgtcctggaactcactttgtaggtcaggctgccctcaaactcaagagatccacctgtctctgcctccagtgctaagattaaaggtgttccatgccactgtctggtcccaattattcagtgatggggccttgcagaatcaagggctggattgcagtcatcttttgagttgattactggctatgtgagagagaggatttttctcataaaaagatggatttggggctcagtgtcttttgtaagtgcctgaataagtaagctgggctatgtgcatagaaagtctgatgagaaaggtgactttacacctcagagtctctaattatcttacaagataaagctgaccctgaggcttgactctactgtgtacccttgctgcagcttgtgtagttgacgaggaacacctgcagacacagtatcagaacgaaacaaatgggggtgaaggcagaattggaggaagatggggactgggtacaacaggcaaagctattttaaccagcatctcaggaggtactgtgtaatgtctcatcgcaggcctgagaatgctctgcaggaaatccaggaagggccatcttctcagaatatgtgtgctagggaaaataaatgttcagagcacaggcttcaactcaagtggaaagtttctgtggtggccatcaacagcttctgaggtgggtgacactgctgccttcccaggaggcagggccactctgtgtctgagggaatgaatcattctggagaattaggttttctcctaagggcaaaatgtgtgtggatgttgcctcttacaccatacttacttctgaagttgcacttgttcacctaccagtgtttacggaatcctgtgtgtgggatgctttttttctataataaagtttttttatttgtgtctcttgttatttaatagaaaagaaaatcacaaagcaaaccttcaatgaatttaaaggccaggatagtgggtttctttccttaggacacagactcacccaaagcttgcctgtgcacctcctccctgctgtcctaggatgccctccagttcagtt

SEQ ID NO: 24635 - DNA, 1912 bp, Mus musculus
tcctccacggtgcaccgggaagctgataggacagagacaagcatttttccatcggccataagcagctgcttgcttcttttgaagccccatgagccagtttggtatgtgctgtaaagagaatttgatttccccaagttgatcagaatgaaggggaaaagcagctgcccactgttactgaactgttacacactgagtaccagccaacgccctgtgctgtggtgatgatatgccacctgccaagcccaccaagtatttttctccttatagctgaaaattctgtagttaaataaggcaataatgaaagtctgtgtgaacagccaacagtgtggcagaaggaacaatctcggtctcgcaggtgccggtggtttctccccataccttggccctcacaagtggctttccacagccttcactcatggtgcactttacttatggtactaggacaaagaccctgatctactgacctgtctcccatccaaaagactcatgctgctcttctgttgatgggagaggtactagtgtgatcctttttgatcttagaaagcccataaaggcactgggcactgccaaggagttctggaccctgtggacaacccttactttcccttcacggctgtagatcatcttgaggcacacactgcctaccagcaagcaatacctgcaagtgctgccatgcaagtgcccacagcctccttgggagtcaaggcaggaccagcccgctgggtccttgagctcattcctcaatccatggtgcaaccgtgtttgtcttgatatttccttaccccaactttagccattttgccttggaatcatgattacaaaattttcctttgcagatgccttcttgggggcattcttgtccctccacccaaaagggttgcctgcagcttgggctgatacgcctctgctgtggcgttctctcatgagaaacactgaatttagcacaaagtgccttctctgtcatggctgctgccacctttagaagatttttcgctgtgtcagaaaaatgtggaggttccatataatgactttggttttaagtgttgataactgttaaggcattatttgcacctgtgtggtaacttgcagtcattggccaagctacaactgggatcggccctccgctggtcccgaagtttgtgaagtcagctcagtcttagctcagccattcagaggatagaatttaagacttataagcagaactgctttgggttttcatgtcttagatgaagaaaaaggaatgttagggaagtcttaactctgggttaagatgttagctccttaatcctctattcagagcctgctaatgcaaaggagatagaagggcctgggcgtggctttgtgttctattgataaaacagttgaggctcgatccccgtgtgtttgcaggagtgtgtggtgagcatgggagaataagaatagtggtagagtctgtgtggtggggatgattcatttggggggaaatgttcacattttaactattcaacttttgaataaactgtgaaaacgataatcgaactgtggtggatttcttttatgtgatgtatttttaaatgaacactggtggccactctcaatcccttagaccagaaacactgcaccatcatcttgatacaaaatgctgttctgtgctgtaccagcctgtttgcagggaactggtatcatgaattgccttccatagaagggggggggggttgcgggggccgacacaggacttcccagactgtattacatatacagtcaatatatgtaatacatgtaagggtccaggggactgaattcagcttgcggagcttgttacttggcatcttgtcagaacttttaaagtgattgttacatctctcagtgttctgtctgcatgtatgtatgtatttatgtgcactaagtttatgcagtgctcaaggaagctagg

SEQ ID NO: 24636 - DNA, 1103 bp, Mus musculus
ctcagcttgcttgacacggtaccataagaggaactctctcaagtgggcatctttttcccccttttaaaaaattattattattattctttattttatgtgtgtgaatacaccgtagctgtctttagacaccctagaagagggcatcagatcccattacagatggtcgtgagccaccatgtggttgctgggaattgaactcaggacctctggaagagcagtcttaactgctgagccatctctccagcccaagttgggacttttttaaccgtgttgtccctttgtttcttctggcgttgactcccagactgcatctctgcttatgtccttcctcttcccaatctcagctgtcagctgactctgcagttggctctctagtggcatcagaggtacaactctccactgtgaattggagaaaaatgaaaaatgggtttagatgttttccgggctgaatggaaatcccccagcatggggagggaggaatatgcagaggtctagctgctgttagagacaggggtctcctcagtcgacccaagtctgtgttctgggctgtaaagatccacacttcctgctccttacaggctacccaccattctgctccgagaccccacaagagacatacaagaaagtgatgaactggaaggaaactttgacctttcctccagaagttcctgtctccgagaaagccaagggcctgattctgaggtagcagagtgagcatcttccatgctcatccttgggattggagtgaaccttgtggcctcttgctttcttcttcagggtctgggggtgtcgggaagaacatgcaggagcctggctattcctttttcctgaagaaactggagtgtgctgaaaagcctggtttttttccaggttctgctgtgaatgggaacatagaatcggagcccctggagttgaagaaataaaaaataatcttttttttgaaggtgttgactgggaacacatcaggtatactcccacattagtttccagcatttaggatatgcatgccatgggatgagtgagggtcagagggcagcttttgggcttcgtcctttccttctaactttctgtagttctggggatcagatcaggtgccaggcttg

SEQ ID NO: 24637 - DNA, 1175 bp, Mus musculus
tttgagacagggtttcaagacgtgggccaccactgtctgacacaaagaagaaatgtaatgtgcggtctcataactgaaacatgaccagtgagtgatttctggttgggatttttttgtttttgagataggtctcactatgtagaccaggctggcctaaatcaacctacttctgtctccagtgctagaattaaaggtatgggctaccatgtctggcttcaatatttaattggtttctctaggtagccctggctgaaatggaactctctgtagaccaggctggcctcaaactcagatctccttgcttctgcctcccaagtgctgggattaaagacatgggccacacacttcgctggaaatctgtttaaatttgttgctgtgtgtttttccttgtagtaagctgggtaggagaagtctgttggcggaggtgtaatgggtgctggaaggtaacaatgtctgcctgtccaggagtccacacatcccttgtttccccttcccccacagggccatgtgaaactttccgactttggcctttgcacaggcctgaaaaaagcacacaggacagaattttataggaacctgaaccacagcctgcccagtgatttcagtaagtttgaacagtgatgttagctgccccagtccttaacctggtgggtgagtgagttccctggtgaccaaactatttaggaaacctgagagcgtctcccagcagtgtacagaagagatccagcacttttctgtattgcccatgctgtctgactaggcgagatgagcgcttccaactgtgctaatgcagaagttgaggacagaactctgctaggaagatgctggagtgaccatggcataagcagcaaggatgacaggatgaaagcgctcagaacagctccagaatagtttggttgcaagcattgtctttctacttgagcagtatcagaacacaggaaagcatactaagtcacagttgaggcttgaggagatggctcagtgggtaaagctcttgccctgcaagcatgaagacccgggcttgattcctaggatgcatataaagagccaggcgtgaaggaaggcccatggcaatgatctcaggactgaggagggggacggggaaccctggggctagtgcccagcccgcctagcctaaatcctcaagatccaggccactgaaggaagagaaaaac

SEQ ID NO: 24638 - DNA, 1166 bp, Mus musculus
ttgtaatgaaagcgtcctattcctggtgtgatgatctttcccgctgcagcctgcctgcctgcctgcctgcctgtcttcttcctttccttctctcctctcctctcctctcctctcctctccctctccctctccctctccctctccctctccctctccctctccctctccctctccctctccctctccctctccctctccctctccctctccctctccctctccctctccctctccctctccctctccctctccctctccctctccctctccctctccctctccctctccctctccctctccctctcccctctcccctctcccctctcccctctcccctctcccctctcccctctcccctctcccctctcccctctcccctctcccctctcccctctcccctctcccctctcccctctcccctctcccctctcccctctcccctctcccctctccctctccctctccctctccctctccctctccctcccctctcctcttcctttactttagagacagggtttctctgtgtagcctgggtctcctggaactcactctgtagaccagacttccaaaagagatctgcctgcctctgccttctgagtgctgggatcaaaggtgtacaccactgtttcttttggtaatcttctaggtgtctttggaaggcccaggattcttgtctttctgtggaaactttacttgctgtgccatgagggcaggaggctggtcagataatattttgtgtcagcagttctgttctgtaaggatgcatataaagagccaggcatgaaggaaggcgcacagaggtgatgtcagcactgaggaggggggcggggggaccatggggctagtgcccagcctgcctagcctaaacaggcaagttccaggccactgaacgaagagaaaaacgaagagggagacaagccaaagaattggctacatatggttcccttttgtacagatatgaaaatgtcaatctgaagcccatcgttttgcataagtaatatatgctaataaaaaagaatagtctcgggctggccagatggcgcagtggttaagagcgccgactactcttctgaaggtcccgagttcaaatcccagcaaccacatggtggctcacaaacatccgtaacaaaaaaatctgatgccctcttctggagtgtctgaag

SEQ ID NO: 24639 - DNA, 2138 bp, Mus musculus
tttgttttaggtcactttctagagataggagaagagaaaggtctctgtctcgtgagagaaatcacaagccgtctcgatccttctctaggtctcgtaggtaagtaagatgaatgactaaactattattgaagatatataaaatcttttttgtgctatgtactaagataattttgtttttgttttttagccgatctaggtcaaatgaaaggaaatagaagaccagtttgcaaaagtggtgtacaggaaataacttcatctgacaggagtatgtacaggaaattaaagttttgtttgagacttcataagcttggtgcatttttaagatggtttagctgtttaaatttgttttgtctcttggaacagtgacacacaaaacaatgtaattctctatggttttcagatggatcataagaggcacgtgatatcaagaattgttactttacaatgttcccttaagcaagatttaattttctttgaattttagtttttcatagactgaaataaaccttaggtcctgcccagttttaagtgtgatgtactaatgatataaagcaactggcggaaattgaaagaagctatagtcctctagtagctgagacactgtggcactgtgggtggaatgataaagcggtgtttaagagctgctgtgaacacaagccaacagataagggtaggaaccacactgaagatttgcaaaggggttccttcctggtttctctatggggatgcagagctattgtaacgtctttatttggaaatgtaaaactcagatgccagtgtcctttcagtttaagggtacattgtagagctcaacttttcagttactgtgcaagattgtttttcatgctgtcatttgtaatatgtttgtgagaatctttgggattaaagttttggttacaaattgttgtttaacttgaaagcctgtttttccttgcacactcaaaatctgtgagcttggtatcaagtccaggtaaaacattcctattggaagccatacttatattttcttgtaaagtgcttttgaattaataaagtactagcataattgtgtagtagtcagtcgagcgaaccactgttgccattgttcttatccctgggaaagtagttggttacccagttcattctttgtaagaaacacaactgagaagcactacattagtgaaggaatttttttttcccctttgcttgtcacttatgagagttagccattttttaggtgttgaagccagttcaggattatggctgttagtgactaacattttaaagtaagctccagtatggtaggtatattgtaattcccttaagttgcccataaaaagtggctttgatcttcagcatgaaaacattcaaaattttaaaatttattttataacttgaggtgttgcatgggattccaaattgatccatcatgatgtaaaatccccaatatggttaattgtaatgatgcacagttgaaatggaggcatgcatatcctttctcttagaatctggaggagttgtggtttcaggtatttgtgtgcaactagattaaatcataatgcaacagtcttgtggcttaagtttccttaaatgtgttcttttgagataagattctactgtactgacttggtctatgtaagagccattgcactaagttaaatctgtaagcttataaatctcccccattgttatctttaaacaataaatttcagtaaaaaaggagagagttgtgtctagaaggttccaacatgagcctttgaaagaagtacccatcttctttgaaggtacttttaaattagctacccttgatcattctgagtataatactaaaaggatgattccaggtgtttgctagaggtcattattagtacttaatgatgattaagaaaggcacctgagaatatgggtaacctcagatattacatacacaatgtaggttctcttcatttaccatctaggtgcctaagtgtcatgatggcatctctaccctgtattggactgtaataaacagccatagttgtcttagccactggcttagtgccttgtcttaactgtgctttgcttttctgaatccagatgagatttaggtatcaatctattccagtgtatatttttgtactaccagactcttgtcttctggttttcttttagggtaggaa

SEQ ID NO: 24640 - DNA, 1194 bp, Mus musculus
caggcgctgaggaggcccgaacaaagcaccgacaaccgtctttttatactaattggttcaacatcaaagagtgacattttattctcccatggttaacgccttgtctttcatgccaagcccagaggccaggggtggagaagcagggggcacgacaagtgcttcagtaacctagtgtagtgctggttgagctcatgtgcctaacactggcctcttcccggaacagaaagacacgcaaaggatatggcgctgagcatctctgcacttggttggtgaagtcgagaagtccaactagttcaaggtcatccttggctacacgtcaggcttaaggctgtcctctgtgtctcaaaacaaaacaaaaacgcataggcgatagagagggtgggtgtctaatagaaaaataaacggggccaggaactcatggttagcaagagaaatcgagttgagcaagatcggtaaaagtgcttgcaaccaagcatgacaacctgtgttggagccctgtcttagtcagggtttctattcagcttatacctccacattgctgttcatcaccaaaggaagtcaggacaggaattcaagcaggtcaggaagcaggagctgatgcagaggccatggagggatgttacctactggcctgcttccactagcttgctcagtctgatagagcccaagactaccagcccagggatggcaccacccacaaggagaccttcccccttgatgactaattgagaaaatgccccgcagctggagctcatggaggcgtttcctcaactgaagctcttttctctgtgataactccagctgtgtcgagttgacacaaacccagccagcacaagccctaagacccacaaggtagaaggaaacaaacaactgcttacagctatcctctgacatccataagcactcactggacaggcagacggacagacaaatatacacacacaaaaatcaaatgtaataagcgttcttttattagatattttacttatttacatttcaaatgttatcccctttcctggttttccccctctgcaaagcccctatcccatcccccttaccctgcctctataagggtgctcccccacccactcccacctcactgccctggcatttccctgcactggggcaccaagccttcacagaaccaagagcctccccacccattagtgccagataaggccccttcagctcctt

SEQ ID NO: 24641 - DNA, 1108 bp, Mus musculus
tttgattggcctgatggagttaatcaccaagacagcagggtagggagaccactggacctagcaattcacacgtatttgggatgttcacacccatgaagaacacgttagcacattgattttggctaatagaattcctggggtaaacaggacggtgactcctacttctgtggacatcacccgtgaccttggggtgcagggctggctgaactcaacacccaccttagtctcatggtgtggtggaaaagcacctgcaaggaccagagggagcctgaagactgtgatggggtagtttccatagtgacccgggtccttcttgtgtttcagccacaggcaccatgtccaatcctggtgatgtccgacctgttccgcacaggagcaaagtgtgccgttgtctcttcggtcccgtggacagtgagcagttgcgccgtgattgcgatgcgctcatggcgggctgtctccaggaggcccgagaacggtggaactttgacttcgtcacggagacgccgctggagggcaacttcgtctgggagcgcgttcggagcctagggctgcccaaggtctacctgagccctgggtcccgcagccgtgacgacctgggaggggacaagaggcccagtacttcctctgccctgctgcaggggccagctccggaggaccacgtggccttgtcgctgtcttgcactctggtgtctgagcggcctgaagattccccgggtgggcccggaacatctcagggccgaaaacggaggcagaccagcctgacaggtaaggacaggagcagagaaggagaaagatcctgcaagaggcctggagaggagaggccaccatttgaggatggcctttacagagaacattccagcccttccccaccaccaagccattccataggcgtgggacctcgtggggctcagaggaacagttgatgttcatatgatccaggcatttttctctgcagtgaccgaaatgcccaggatagtgtggtgattggcagtagagctctaagaagggagccgggctgaagagatggctcagcagatgagggcacttactcttgctgagggcctgattcccagcaccggaaatgacaacttcctataactaactctgg

SEQ ID NO: 24642 - DNA, 1845 bp, Mus musculus
ctgttctctctccacagatttctatcactccaagcgcagattggtcttctgcaagagaaaaccctgaagtgcccacgggagccccgccctcttctgctgtgggtcaggaggcctcttccccatcttcggccttagccctcactctgtgtgtcttaattattatttgtgttttaatttaaacgtctcctgtatatacgctgcctgccctctcccagtctccaaacttaaagttatttaaaaaaagaacaaaacaaaacaaaaaaaaccaaaacaaaacaaacctaaattagtaggacggtagggcccttagtgtgggggatttctattatgtagattattattatttaagcccctcccaacccaagctctgtgtttcctataccggaggaacagtcctactgatatcaacccatctgcatccgtttcacccaacccccctccccccattccctgcctggttccttgccacttcttacctgggggtgatcctcagacctgaatagcactttggaaaaatgagtaggactttggggtctccttgtcacctctaaggccagctaggatgacagtgaagcagtcacagcctagaacagggatggcagttaggactcaaccgtaatatcccgactcttgacattgctcagacctgtgaagacaggaatggtccccactctggatcccctttgccactcctggggagcccacctctcctgtgggtctctgccagctgcccctctattttggagggttaatctggtgatctgctgctcttttcccccaccccatacttccccttctgcaggtcggcaggaggcatatctaggcacttgccccacagctcagtggactggaagggaatgtatatgcagggtacactaagtgggattccctggtcttaccttaggcagctccagtggcaaccccctgcattgtgggtctagggtgggtccttggtggtgagacaggcctcccagagcattctatggtgtgtggtggtgggggtgggcttatctgggatggggaccccagttggggttctcagtgacttctcccatttcttagtagcagttgtacaaggagccaggccaagatggtgtcttgggggctaagggagctcacaggacactgagcaatggctgatcctttctcagtgttgaataccgtgggtgtcaaagcacttagtgggtctgactccagccccaaacatccctgtttctgtaacatcctggtctggactgtctacccttagcccgcaccccaagaacatgtattgtggctccctccctgtctccactcagattgtaagcgtctcacgagaagggacagcaccctgcattgtcccgagtcctcacacccgaccccaaagctggtgctcaataaatacttctcgatgatttataatgtcttgtcattagagcaaatggtgtgtgtgtgtgtatgtatgtggtgtgtgtctgtgtgtgttgtatgtgtgtgtgcatgtggtgtggtatgtgtgtgtgtgatgtgtggtgtgtgtctgtgtgtgttgtgtgtgtgtgtttgggactggctacttgtgctgtttgcacccacccggggggtgtgtctgtctgtgtgtgtctacaagtgtacacgtgtgcaataattccccatcccactcccccagtgatggtacttgaacctaaagccttgagcaatataggcaagaaagccatcactgagttgtagaactccatcgctgagagagttgtagaactccatcgctgagagagttgtagagctccatcactgagagttgtagggctccatcgctgagagagttgtagggctccatcgctgagagttgtagggctccatccctga

SEQ ID NO: 24643 - DNA, 1524 bp, Mus musculus
gggctcttgagaaacgtgggtaaggtgggccagtggttagtcaggcacagcacaagagaagctggaggcagaggcattcagggctgctggggtggtgcaggaagagacctttctgcccctaggaagggctgctgtgggtgctggcagtggtgacagagcggggtgaagtcctctgtatctgtgacagtgctgcggctctgccagctggaggggctgcccttcatgctcttctctctccttatgtccccaggggctgggattctcgccatggccaacgcaggaccagacaccaatggcagccagttctttgtgaccctggcccccacgcaatggctggacggcaagcatactatttttggccgagtgtgccagggtatagggatggtgaatcgagtgggcatggtggaaacaaactcccaggaccgtcctgtggacgacgtgaagattcttaaggcgtacccctctggataggtgggatgctgtccccagcactcccaggcccccgggagctggtttccggatgacgtagggtgctgtgtgattctgcgtcatgcatacctactccgaagcagaggggtcgtctctggggacgtttgtattctggccgacagtcacagacttgaaaagcgggccgcgttgatgagcgcactagctgcgcaccccctgttcacagccccgttcagcctccagcgtgagttcttccaggaatatgcacagctcactcgctcttccctctgagcctgagcatcaatactgctgcttctgacactacacatcccacgcaaagccatattgaattgttgccaaatgaaaaatgcatccaacagtcaagtgctgagaaggtgtcaagtggggatgataatgtgtaatgattgggcaatgaatctctgagaggaagcaggaaggagccttggccatttttccccggggagggatgggagtctagtgagcacaaggccgtcacaggcttcccacaggaagtgacatgctttagggctttagagaaaataggtaagaggtttttgtgcatgatgtccttggttttttttttactatttggatttcaagggagtggggcaagaagggtgttaatacctatgtaatacatagaaacttacagaataaaccaccatggtggttgaaatcactgttgtggtctagtattgttctagattttcggccttttctctttttgagacagggtgtcactgtgtagcactggctggtcttaacttcctatgtagaccatgctggcctcaaactcgataagtgtgcatctacctcaagtgctgacactacaggcatgcgccaccacatgcactcgacccagcagagcggaggtggggggtgctgcagcattcctgccttcaagattcacactgcctggtcctggtggtcctgagtctctgttagcttcccccatgcaagaacagctcctgctggagagaggcagaaccaagggacttctcgagcaccaccgcctcccggtgctctgggggagggaggggtggctgagctgcagtg

SEQ ID NO: 24644 - DNA, 1193 bp, Mus musculus
ttacaaagtaaataagaggccagctgggatccatgagccctgtcccagaaagaccaaagtcagcgggtggagtgcttgctgctccagaggacttgatagttcctagcaccacagcagagctcctataaccctaactccaggggttaactccctctctgtcctctgtggccacgcacagacatgtggcacacacacacactttttttttttaaagacaaggctaaccatatagccctgactatcctggaatttactgtctaaaccaggctggcctcaaactcatatagacctgcctctgcctcccaagtgcagggattaaaggcatgtgctaccatgtccaactacatcaataaaagaaaaatttaaataattgtttaaaaaagtgagagtgaaagcagagtccagcttttcccctctgcacccgctgagttgcccacccccactctgccctcctgctgtgggccggactgacctgccgctgacttgtttctgtttcacacctttccaggagaagacctctaaacagatcacagattttacgggaacttttccctgtttttacccaacttccatttccaaaagactcctccttaaacaaatgtttcctgatccagccggaacctgtggtgggtagcaaggtaaggcatgtggggaggacctggctgtgtatgtagagctccccgccttgggatagggactgatatgacggaggccttctctgcatacagacttagagggtgacttgaaggtctccccattgctgctgtcctctggtttgaaggcacatggtcagaaagtctgtctacagatctgtgtcttgctgcttctcctctttaaaggagtgtgaagttggtctggcatccctacctcaaatcggaaggtagacaggctgttggtgtgtagtgtgccatcacagtcccagtcttttctttttgtaaattgagaaatgtaacccgagtgaaaaaccttttacccaaattcaggagaactttgaaaaccccacccacaaacagcattaaggcagagactaggaatggtcagcacgtgagaccctggacttctgaatggcacagaaggcaagcagccggcctgcttctcccaccctctcccagtggtcagggccaggattgggagaagcccttgtccgtgggtctgtctacttttgtctgaggtttttgtacttgtttttcttg

SEQ ID NO: 24645 - DNA, 1185 bp, Mus musculus
gaatgggaagcagtggtggcaaaggcatttgtcaccaaccctgaagatggctatcctttgatatccacaagaacacagtggcacacctttaatcccagacaggcagagctctgtgagttcaaatccagtctggtctacatagtatgagttgcagaaacagctagagattcatagtgagaccgaacacataagctaaaaatgtacttaagcaaatctatttggaggaattttaaatctatttgcaagctgcaagctggtaatccgggtatttaggagcctgaggcaggaagattgtaaactggatgccagtccaaacaaataaaaagcagcaacaacaactgccaggcagtggtggcgcacacctttgaccccagtacttgggaggcagaggcaggcggatttctgagtttgaggccagcctggtctacaaagtgagttccaggacagccagggctacacagagaaaccctgtctcagaaaaccaaaaaaaaaaaaaaaagcaacaacaacaacaaaaacgcaagcagatggttgacatcctccctgtctttctcagtttctgatgctgtgggtctggaatggcccaaatttgcatttctgatcggcttgcaggtgctggggctcgggaggaccacacactttcagaagcttccccttgcgaacccgtgactggggcgaagccgaacggacaggtgcgcaaagcagagaaaggccattttccatatctgttctgagagaggactggaaagtccccacacacctgaaaattccccagaaaaagttctggttatcatagtgggccaacttgtaaacaggttaccggaaagtgcctacattgcctggaccatcagcttgcccccttgccaagtagagcctgtccttactagtagtggtgtctccgtgagcactgaagcagcctgggtacgtcctagctgccatagaattttgacacgtcagccgtgtctctgtgacttggtgtcagtcgtctatagagcagagtgtgagtgtgtgtgtgtgttcctatgcgtgagtgtgagtatgtgtgtgtgcatccacaggcatcttcatgaaggcctgggtgtgaatgggccatggtgtgcttgtggaaatcagaggacaacttcagatgtggcctgggtgcttaccccccacccagagtgagggtctttcttttgtttgctctca

SEQ ID NO: 24646 - DNA, 1186 bp, Mus musculus
ggcaccggcgccgcaccgacaccctggaggtggggatgctcctgtccaagatcaactccctggcccacctgcgcgccgcgccctgcaacgacctgcacgccaccaagctggcgccgggtgagtgtccccaccccaccctgggcgcgcgggtcgttgggacgccgggagacccccgcgtgggtcgagcgcgctgagtgtcccgtgcctctttcctaggcaaagagaaggagcccctggagtcgcagtaccaggtgggcccgctgttgggcagcggtggcttcggctcggtctactctggcatccgcgtcgccgacaacttgccggtgagtgggcaacgccgcctcggggagggcgcgcggagggatgctttgagcaggagggtctgatggagactcgggggtcttcttccaggtggccattaagcacgtggagaaggaccggatttccgattggggagaactggtgagtgagccggagccagagaccctctcatgggtgggtgggtggcgacgggcgtgccggaaccggcgcgctaaccctcgccctcactctgcagcccaatggcacccgagtgcccatggaagtggtcctgttgaagaaggtgagctcggacttctcgggcgtcattagacttctggactggttcgagaggcccgatagtttcgtgctgatcctggagaggcccgaaccggtgcaagacctcttcgactttatcaccgaacgaggagccctacaggaggacctggcccgaggattcttctggcaggtgctggaggccgtgcggcattgccacaactgcggggttctccaccgcgacatcaaggacgagaacatcttaatcgacctgagccgcggcgaaatcaaactcatcgacttcgggtcgggggcgctgctcaaggacacagtctacacggactttgatggtgagccaggccccggggagggagctgcccaaggtgccggcctggaagcctctggcggcctcggctccggccctttgtaaaggtcattgggccgcctggctcagagctggcaggggtggggcagaggcgagcttcccggcatagtacagccggggatttcgagctggttgaacgaacctgcaacatttctggcgtgattggggttttgttgttgttgttgtttttgttgttgctgctggtgtttgcttgtttttcttttcagc

SEQ ID NO: 24647 - DNA, 1999 bp, Mus musculus
caagttttatatacatcccaccccaacccccagaccctgtaaaatctaagtaccagcagagacccagtctctaaacaaagtttaaaaaaaaaaaaaaaaaaatgaaggttccggatagtgtcagtggaaggcgtgaggtaggtaggtgaattgaatcacctcatcttgctcactggtggctcatcaaaacccttgtcatccttcctatttctagtgagtgggtgtcatgggaaaggcccgagctattgaagtctgaaaccacaggtttaagaggggaggcacttttttaactgaaagctgattgctggaggctttcggtatccgttctttcccaccgggcagtgtttggtataaaaagtaccgtgcctctttaaaaaccccagacttgtaggtctggggaagaagacctttgcattacaaaaacaagttgagtcatctttaacctctgtctgccccgccttctgcagagtgtcagcaccttattaaatggtgcctgtccctgagaccatcagatcggccctcctttgaagaaatccggaaccatccatggatgcagggtgacctcctgccccaggcagcttctgagatccatctgcacagtctgtcaccggggtccagcaagtagcagcctttctgctgctgtctgtcagaccctccagggagggagagcttgtcttctggcctcccaacaggaccctgcgtgacgatgcagggacagcaatgacaactcattccagactccaggtccctggaggagcctcccacaagggaaagagactacttcactggtcctgggcccctctttgcgcgccccgcccccagactcagcgtctagtgttgctgggctcccctgaatccatccctggttgggggtgggagtggatcagagccctgtcgatggaactttagtcaccatggagactgggtcaccaagatgggccgggggggggggggggggggggagaggaaaacagtctggggggtgggataaaaactagcaccatatttaagtccctgtcacctcttccaactcctgagtgccttctgtggggactccgcctgtgctgggagaaatacttgaactttacctcttacctgctgcttctcaaactctgcctgggttttgcttccttcctctcctctcctttcccatcccccacttcctatgaaaggtgccatgggagaggctacagggccaactgctgagccacctgccccttttctgtctcctttagtaaaattcccaagcaaactggtcttcctctttggtttcgacttaactgtttcaaaaccaagacctcacacagaacgcacaaccaatgcaaaacaaaaaacaaaaaaaacaaaaaaaaaaccagacaagctgtaaatgtgtgtatagttccggcatggtagcctgcaaaaggactgtagatgataacaattttaaagaagaaaaaaaaaaatgcctttaagttattttatgtgttgggggtttggtttggttttttgttttttttttttttttttttcttttttattcttttttgcttgtttttgaaagatggcacgttctagcccggaagttttaatgtatttatttatttatttatttggttgccttcctgtccaagcttccactgactgttgcccccggtttattgtcatgttctgccttttttttttctttccttcctcctgacttggggaccttttaggggagggctgtgacgcttgctggggtgttggggctccggtgggacagctgctgtagcccccttctccaggggcccccttggctgcttgctggagtgggtctagggtctgctgactgtacataaaacagttccggtgtggtgtgccttccggatcctctctggggctgtgctttgagcagcgtgcagcccgctggttttatctgagtaaagtatactgtacaggggaataaaagagatcttattttttttttttatacttggcattttttgaataaaaaccttttgtcttaaacctttgagtt

SEQ ID NO: 24648 - DNA, 1491 bp, Mus musculus
gtgagcgtgtgtgcgtggtgtgtgtgtgtgtgtgtgtgtgtgtgtgtgtacaagcccatcagcattttgtcacatgtctgaatttgtgtccagactaacccatcagaaccggttgggaaggaccccagggaccaagcatctgatggtccctcaagagggaccagggccggggagggagaaagagggttatttagttctgttttaaccacctcttggaaccctatttccagggtgaagcactccaagatattatgtataaattgtgttattatgtatatgggtaaaggtgtacaaatctatgtcctctttgtagcagataggattttatatttatagcgtgcatcgacacgtgaaagcgagctaggtcatcagcacagatgaagatgcttaggggaggggcctggggcctggaggaggtggctggagggtgtggccaacaatcagtgtctccaccttcccccctctcccctttcttccatccttccgtggcctctgtctttcccttctcctcaccccaggaaggactgtagaggcagaagggctccctcaggtttgccggcccagcctttgtcttctcagtgtaagtcagcactgtggtcaggacggagctggtgacaagtcagtgccaagagaaggtccctgtgtgtccccaagaccgggagctcttcctggaaagtggcattaagtgtcccctactgccaccatcacaccccgaggctcaggggacaaggacacacgctagagttctggcatttggtagtggagaaaggatggaggccagtggttgtcgtccccttggggtgccaggcagagttcccaggtgtgacaccgtgaagctcacttcctgtgtcactcacctcaggccacacctcacccctgtgagttagctccctcagccaggctgtttctcaggcgttcttcccatcccccaccctcccctcctgcacctcagtagcctccttcactctctgaccctccctccgacacactgagtaaagacagagacttgtgttcccaagtggtggttttatttttttagtttatgtctgtctgggaaattgtggataaagtgaatggactgtaaataaatggtgtttcctcctccgtcggggctttggtttcctggtgtggtttggtttgttcgatggtgcttgtaagtattgggggtgggggggtcatcagggctagagcaatggcttagtggtgtagagtgcccactgtgcttcccagcacccacaacagctgattcatgcctgcctgggaacctctgcaaacactgtactcatgtgacatatattcatagacagacagacaggcagacagacagacacacacacacgcatagatagatagatagacaggcagacagacagacacacacgcatagatagatagatagatagatagacagacagacagacagacagacagacagatagacaaaatctgcagaaagaaatgggttaagcctcatataggacagcggcattc

SEQ ID NO: 24649 - DNA, 1102 bp, Mus musculus
gtgtgtgccaccactactgcctggcttttccccccttttggttactgttaactcttttgttttgttttgtttttcgagacagggtttctctgtatagctctggctgtcctagaactcactctgtagaccaggctggccttgaactcagaaatctgcctgcctctgcctcccaagtgctgggattaaaggcgtgcgccaccatgcccagctactgttaactcttaagtggtctcttatcacaacatctagcttttttctatgtggctgcggcggcggaggagaggaggaggaggaagaggagagcagatgaacagtttagggtccacagatgtctggtttcctaagtcaggacttgtgtttgcagctggttggtaagcctgcaaagaacctcccctgttagcatagtgacggattgtgtcttaactgtctttgtctttcaggtgaccataggacggggacttagtgtcacataccagctgatatcaaaggtttgccctctgatgatttcccgaagccactgtgttctgaagcagaatcctgagggacagtggaccattatggacaataaggtataagagctcatacagcctaaggcttctcttgagttgtatggatttttaacaattgtatattattttaacttatgtgtgctttggggagggacagtatgtgaatgtccgtgcatgtgccagcccagcccagcgttgccagattcctctggaactggagttgaagccgtgggccactctgtgcattctgggaactgagcaggagacatgtgatgctcttaaccactgagccatctctccagcccaggattttctgctttaaacatctttttttgattttttatttatttttttatttttgtattatttgcacgtgtcttttatgtacatttgtatgcagaggcttgaggctagaagacaggtttgggttcaccagagctggagtttcaggcagttgggagatgccccgtgtaggcattggaagtttccagaggatctagggttctctggaaaaggagcaagccatcgcttcagttccctttaaatagaacttacagtcactggtttggtaggacacttacagaaccctggac

SEQ ID NO: 24650 - DNA, 1256 bp, Mus musculus
gagctgacttagtgacctgtagtgagagctctttgccatgtcatcagaagctgccatctgtttggaagcacccaggagagctttcccagctgagaagactggccttcccaagtgatgtcagtcctcttctgtccaaagagagaaccgggtgttcaagaacaggcagtgggatgaccttgaatgtaggcccacctcacatttaaatatgcctggtgcatggtctagtgtggagagtgggggctcctgagccctcctgtgtgaaggggaagacctgctggctcaagcgggatcctcttgttgctggaggctgcctgagcatcatcattagcccgcagcccacagtgcagcgcagccaccaggggcaagcgtcctttctccctttacactagtggctgtggagaacaggcaaagaaggcagagatggacggggctgtgagccagtggaacacgggctcctccttcacatttctctttctcttcaaagcaaagagactgtcatgaaggtcacgctgcaaggacatgtgagagactctagggcgatggcggcttggcttgttctagaggattccctggattccctgaggctgctctggacgtcttctggaagccatgcgctgcagagactgagttaggaagtctgtgccactggccttccgtcatgcaggccctgctgctaccaccccccaacgtgtgctgggaccctgctcggactgcctgactgtgcattaaatgagttgagttctgtgtttcttaatttgttgattgtttttgatacctcatgcaccctcttgacatcattgtggacagctgggtgtgagtcctgtggctgtgtggaaggtggcctgcattttgagagcctggtttacctttttatgaaaacatgatgtcatttcttgggaataaaatgtataaaactctcagttgctcagctgggcttcggtgtgtttactttcctttgtctcccactccctcacagtctcccaggtaaacactggcagctcagccgggcatggtggcgcacgcctttaatcccagcactcgggaggcagaggcaggccgatttctgagttcgaggctagcctggtctacaaagtgagttccaggacagccagggctatacagagaaaccctgtctcaaaaaaaacaaaacaaaacaaaacaaaaaacactggcagctcagagcctgccgtcaggagagtcactgtccctgatagactgccagcagccctcagcctgagagctcaagttcagggccg

SEQ ID NO: 24651 - DNA, 1096 bp, Mus musculus
agccaccagacgggctgcttagggagagccgtctatgctcaggcctcctagactccgaccccgctctgtgccagctgctgtggacacttgctgtgtgtctcagtatttcattctgtctgcagtgttccgcttaccagggtataagcaagggccagtgtggtgagggaacgaccctgagacatggagacagcacttagatagccacagaggtgcttgtctgaggagtcttgagtcggcctggctggggaaaaggtgctaaggatgttttgggtgaggaagctccagtgggcagtggtgacagtggtgaccgagggggtgtctgggtgtggggagtgctggatcatgcttgctgataagtacttctattcttttgcctcctcttcctggagttctcctttcttttcctcactgagccacctgtttcccgatctccttttcttctacctctctctgcagaagccactgctgaaggagtcggacattgaccttctctactttgctgatgtgtgtgcaggcccgggaggcttctccgagtacgtgctgtggaggaagaagtggcacgcaaagggctttgggatgacgctcaagggccccaacgacttcaagctggaggacttctactcggcctccagcgagctcttcgagccctactatggtagggacactgagcagggcggggactaggaaataggaggccgctcctctcccatgtggggacttcaaggcccaagctgttgctacctgtgctcttcctgttctgctagccagaattcacagatcctggtgtgagggtcttaactcccatcaagcatctgtcttggtttttgttttttcaaccacaggcctgcactccctaggtaaactcatcaaagccgtacagttctccttgcaggatggtggttcttgtgtggtgacgggggtaatgaaactgcctgattcctagctggaaactggcagttattaacaaagctgggtcataagcccagctgcagccctgtgtgttgtatgcactgcactcactagcagctcggcagttacagcagtccctctgccctgacagacggactgtgctgtgtcagcagatcctgaattcttt

SEQ ID NO: 24652 - DNA, 1112 bp, Mus musculus
ttatgtaaccctggctagcctggaattcagctgtgtagaccaggctggccttagtcttccacctgctttagtctcccaagtgctagggtttgatgttttgagattggggggggggggtctcacattctaagccaatgtaaaactccctgtgtagcccagactggccttaaatttatgggcagtgtttctgcttcagcctcatgaatacctgtaggcctgagcccccatgcctggctaatactgggttttaaacataagtgctttgaaaagcaagatcctctgcttcagttgataactttaggttggtcagttccctatgaactgtggcttctgagagcaggagttggctgttgcaggcttatcagcatagtcaggatgggtcctgcttctcagagctcctggcctggctgctggaagcagataaactcacagttttttgtgtcccatcaggtgagggtggggtcgatggagatggagatatcacccgcccagagaacatcaatgcatttcggaattttgtcctggacaacacagatcgcaagggcgtccactttgtgatggcagatggggtaggtgactgcctctggaaatatactttatgggtgtgttctgaatttagaggtttgttttgtttgttgtgcttgaagttgaacccttggccttgggcatccagagtaagtgctatgctgaagaccccacccccaccccagtcgcccttgaaaaatgctttagttttgctcttgagctgacccaataaatggtaactcaatgttcatatcatagggatgcacatttttatttattttatacattttcctacaatttttataaagattctcctattgtaaaaaacatttgcttgagctcactgctgacggaaaggcctctagttgctgagggactggtggagcgtgggccccagctggggtcagctaggcagaactgaatgggaggcaccctgccggcacttgtcagccaggttgttgctgttggaagctgtctccaggtggctcctgagcctcatgtgcactgacagacacttgagcagtagcagcagcagcagcagcagcagcagcagcagcagcagcagcagcacagagtctacggaggcc

SEQ ID NO: 24653 - DNA, 1204 bp, Mus musculus
gacagctcagaacttatagactgaaatcacttcccttcccacagactgtagccagcaccaccaggaggccagcatcccctatacacgcccttccctccacccaccagcacattctgatttctcctttgttctcaaagaagtgtcactatgctgatattccacaaggcaaaaggaacccacaagagtggctttaaatcactgttaaagaaacaggagttgactgtcaccaggcagtggtggcacatgcctttaatgccagtgctcaggtggcagaggcaggcagaggatctctgagtatgaggacagtcagggctacacagaaatctgtctcaaaaacctgaagggagggagggagagagggagggaaggaagaaaggaaagagaaagagccggtgggcatgcagcactcacgtgtcctgcacaaaggcgtggatcttggccagagctttgatctgtaggctgcagtagctaggaaaaaagaagacacacatcgacatcagcacagtagccagagcagaagccaccggagtcgcggtgaggtaagcgggcccactcagcagttccgtggggcccaaagacagcagaagagaactgagtggaactcgggagacactcagacacaagtcctgctgagaaggctcttccccttcccttaaagaactgactaaggaacaacaaagcccatccccaggacctgaataaacgctggacgagcacgggaactcacctggaatctcagcactctggaggtggctgcccacctccccaagcaagctggcttgctagactaggtgagtttggtgaactctagggtcaagtgagagatcctcccttaatacataaggtgaagagcaactgacaacctgatgtcaacctctggcctcttgaaaacaaccagaggaaacgacacatgatacacaagaagacaatgacaaggccaatggtgggagctggagtggctctgtggttaagggcacccacatcaaatggctcacaaccaccgggaactacagctggtggtggggggagggctttccaatgcctctgacttctatgggcaatggcactcatgtgcacagacacaaaacaaaaaggaaagaaaataaatatttttaaaacccaagggtgagcttcccatcagaagaaagggaaggaggaagtgtggaatggtctaatttaaagtggtcaaagaaaaattccatat

SEQ ID NO: 24654 - DNA, 2108 bp, Mus musculus
ttctgggagtggggagatggcttccacatgcgtgactcccagaagccccaggatccagacaagctgtccaaggaggacgtcctttccttcatccagagtcacaatcctctaggcccttagggtttccacctgatgaatgtcctgtcattcttaaggcagggcccagtgtctggtttcttctgcctcttggaaaggaactgggactgttctccctggtcgtaagggagatgggctcctccccattcccaaggagctctttcggggccttaggacacagctgtgaaactctgctgtctgagaactggagtcaacctgaaaagcagctgctcaagggcaggtcagcgcttaggacttgtcagagtcattccctctggaatttgtcgactcagtgttctgagttccatttactgccctcgagagcaatcaggccattgttttgccccatttctactaggccacccaaatatgaaggccctccatcacatgctggccaggagcagctgtcataccaatcaaagttgtttcttgtggtcttttcttcaccccaatcctggagtttgtcctggcaggtcgggaaggagtgtggacccagtacctttcaaacatcagcgctttgggtactgggtataattgctccttgagtttccacctctggtaagcactgggcagctccaggggaagagcagcctaaaaacctgccctttgacttcctgtctcagcagtaacagaaagttactctagcagtccaggccacctgaagctcttggcagagttctgagctagcagtggctctagctgctccttcctctccactaggaggtacatagcgatctgctttgatttgtctatagtcagtcactccatttcctgtctctgtaagagggaggaatggcaacagctttgggttggggagggcatctgtggttgtttctaatgggaaatctctttcaagagatgttcatgcaggctccctagggccccatgccagtgccagactggtttccatggagatagggcactgaggcacctgtgaggttggaattgattccaccatgggaggtcccttccaccagcccccaaccccaatcctagcagcaagtgctgggatgccatatttgcacctaattctgggtctatcagtgtgtcttacagaatcttggatcattaaacatatttttactgctcatgtggctctgtgctgggctgctgttgtccacagtgctgtgtaactgaggaaggggagtgtttgtggaagccaagcttctccagctcctgagactgccatctgctagacagggagcccaaaggcttatcaaagtacagttccggtataaagcagaacttgggggtgaatgagctcaccacacaactcactgcatggcatggcagcactgtggcagtccaggatcagtctgtgtgactaacatagcagaggcttcagaccaattactgtcactagacgagacaggagaaaggatcttctgctgactctggctagccgcctccacaagaggccacattctgcatgagccccaggtgagaattccttcacctgaacatcgcacatgttggtgagctgcctccagccgattcttcatgtttcacagcctggctttacttggcaggctcctgaatggagcagtgagcattctttctcccttagggccctctactgtgagtggagctaggggagaatcctaggggctgctcctgactgaccacctcctccttctcacccccaccctactcactggctcttgtcaccatgtcagtctggtcattgccagacttgctggccatgggcacctgcaggcctccctggccctgcctgtctctggaagaggagatgattccgcatacccctggaacctccacttcaagcccaggccaccttttcccgtgcatgctgcattttcttcagtggtaataatcacaggccagggcaggctggagctgcgggtggcaggcacagagcttgccctcccagctgcacatctcccttcctcctgaattgtacataagaattttggaacatcccttcatctttgaaataagagtgcctcccttgctcaccctcaccttgtcagcaggaaatagttgccagacag

SEQ ID NO: 24655 - DNA, 1208 bp, Mus musculus
atctccagccactagaaggacgtggtagtgcttccttctgcttagtagaggggcaataaagagccccaggctctgctgtctggcaactatttcctgctgacaaggtgagggtgagcaagggaggcactcttatttcaaagatgaagggatgttccaaaattcttatgtacaattcaggaggaagggagatgtgcagctgggagggcaagctctgtgcctgccacccgcagctccagcctgccctggcctgtgattattaccactgaagaaaatgcagcatgcacgggaaaaggtggcctgggcttgaagtggaggttccaggggtatgcggaatcatctcctcttccagagacaggcagggccagggaggcctgcaggtgcccatggccagcaagtctggcaatgaccagactgacatggtgacaagagccagtgagtagggtgggggtgagaaggaggaggtggtcagtcaggagcagcccctaggattctcccctagctccactcacagtagagggccctaagggagaaagaatgctcactgctccattcaggagcctgccaagtaaagccaggctgtgaaacatgaagaatcggctggaggcagctcaccaacatgtgcgatgttcaggtgaaggaattctcacctggggctcatgcagaatgtggcctcttgtggaggcggctagccagagtcagcagaagatcctttctcctgtctcgtctagtgacagtaattggtctgaagcctctgctatgttagtcacacagactgatcctggactgccacagtgctgccatgccatgcagtgagttgtgtggtgagctcattcacccccaagttctgctttataccggaactgtactttgataagcctttgggctccctgtctagcagatggcagtctcaggagctggagaagcttggcttccacaaacactccccttcctcagttacacagcactgtggacaacagcagcccagcacagagccacatgagcagtaaaaatatgtttaatgatccaagattctgtaagacacactgatagacccagaattaggtgcaaatatggcatcccagcacttgctgctaggattggggttgggggctggtggaagggacctcccatggtggaatcaattccaacctcacaggtgcctcagtgccctatctccatggaaaccagtctggcactggcatggggcc

SEQ ID NO: 24656 - DNA, 1179 bp, Mus musculus
tgcctggagataatgaatggctcgacctgctgatagatcaagttgcctcccgccaccttgctcaccctgtgctcaccctgtgtgactgggcatggcagcggtggttgctgctcttctgctacccacaagggggagctcgcgttcgggacccggtcagagatggtttccgtgacggtaggaccacgtgatcctcctctcctccctcccattcctcaggttcataaatggtcctgattgaaaactgctccccatggaagggcaagagaaaggcttcacggtaagttgcttggcctaggtatctgagccattccctgtcgctcccctgcgatgtcccatgtcttctggccatgctttaaatccttcccttttctctaccttcctcttcctactccctagacgccagttcctccctcaaatagccagtcaagttattgttcttggaaatgcagagtctgattccaagaagagtggggctgaagttgggtgagctgatgagctcttccttcgagctgagcccagcatgaaggttcaagcctgctccagcagccccaacaccagcgggtagagagagcaggatctgtgatggacagccttgtgaggaacctttcctgggattcaactatggtacaagggataagacaggagaggacctgggagtggggttaaagagaatactgggattctgtgagaagagttgtcaagagttgaagcccaagtttcttggtagctcctggaagggccaacagtcatgcagaggagacaaagtcactgactgaaagaaatgcattcccagggacctgcagaacattctgcagggaaagcccagaaaagttcagcggctagttgagcaacctactgcctggcagcgacagctctgtggctaccatcaaactcagggaggaaggttataagagaagactcttagcaggggtagctagcagtggggagggatttcccttcctctatgtcacagccctcttatatgtcttgagagcgaagcaaaccaactggcacacctgctcctacctgaaggaaatgccagcaaagtagctttaagccacaagcaagacaccaggcatggtggcacctgccaatctctatgagcttgaagccagcctggtctacatagtgaaagcctgtctaaagaaagagagaaagacagaaagagggagagagaga

SEQ ID NO: 24657 - DNA, 1099 bp, Mus musculus
tttaaaaaggatgaggctggaaaatgccagggaaatgagcagttgctcccgaagatggttgggtgatgacagagctcccgcccacaccctcacactcggcctcgtgctctgcacaggtctgtgggggtgtttcagttctccttgctcatgtgaaggatgtggtaatgaactggtagctagaaccgaatcatgacatgtatggtctgctgacactagtttagtctgaattctgttcatgggccttttctttttgtgcaacagttttagccaacatgatacccagtgcccagtgcagcacagccctccttgtgttctgtgatgctcacagagtgctgacttcccggaaatgcattcagtaccggttcattaagtgtggatgttagcatgggaaatgtatagatgctcccaagttcaagaatcttgttctgttatgtatgctgttaaaaaaattagcacttcatatagtttctgttggctggagttttctctgtgtgttactgaatcagcttgaacagtttggatggatattatggatagaagcatggtttcatagaatgtcaaatatataattataaaatacacttagtaaatgtgaatactcatgggctgtattaaatcagagaactaacatttgtttctttgcttcatatattaaaaacattcctaaacactttctactgctgtgtccttcttgtattcatattttgaaagatttttgttttttcactaaatttggacaactttaatcttccagatccagaattaaattgagactaaccctccaatttgaacttaagtgattttcttcttgagaacacttaaacttgagctccaagctttagaatgagtatcataagaaaatctcaagtttgtcaaagttaattttccaaaatgtctgctgtgtttcttgcctttcattaagcagcgtggggagaggcaatctgtcgtcttcactcatggaaccttgatgactgggaggggagagcggctgctcactgccttggaaatttgctggagatgtgtcttacttccaaaggattcttagagttaattgagatctgtgttaaataaaggccataaatgctctctaaactgtttt

SEQ ID NO: 24658 - DNA, 1144 bp, Mus musculus
gggtaacagtctgtagtctaagggtctaagggtaacagtctgtagtctaagggtctaagggtaacagtctgtagtctaagggtctaagggtaacagtctgtagtctaagggtctaagggtaacagtctgtagtctaagggtctaagggtaacagtctgtagtctaagggtctaagggtaacagcctgtagtctaagggtctaagggtaacagtctgtagtctaagggtctaagggtaacagtctgtagtctaagggtctaagggtaacagtctgtagtctaagggtctaagggtaacagtctgtagtctaagggtctaagggtaacagtctgtagtctaagggtctaagggtaacagtctgtagtctaagggtctaagggtaacagtctgtagtctaagggtctaagggtaacagtctgtaggtgttaccagaggcagaaataaggataagaaggcaggctcggcgtttgccattttagctcctgcaccagaatgtacaggagagcagctggaatctgagcagtccttgctcctgtgagttcctctggggtttgaggttaggctgtagccattgtactttctggcagggttcacaagtcgtgtgacctcccacttggaataaggcattgctgcccctgatgcagcttcagtagcttttaagtcagctcctccacgtgtctgcagcgtccagtgctgcatatgtatgcctgatggcagtaaatgcctggcacccaccccagaaaaacccatcagttgctacctaagaaaaaaatgaagagctctcagggtggcagtttttataggcaccaggaagttgttagtcatcaccagtgtctcccatgtactagtaatactgtctttggatacatggaggcgtcttagcctgattttagttggtaaaagtaagtgtctctcactgagtaaaacgaaaccatatagaccagagctctgtctcctcaagagttttggatagtgtgctggtggggccgttttttccaatcatttattttcttaccctctgtcaaaattaattattagagaaatgggaaaaatcgctgaagaaagcagacatactgcactgttgagctgtctgccctttcctgaggagagcattctccagctgtggtcggcttctctcagtgta

SEQ ID NO: 24659 - DNA, 1190 bp, Mus musculus
aagcaggcgggcagggggcagcagggaaggtacgctgacccaggggcacaagcatttccagtttcttgtgcctgagtaaagttggtatctgtctgtctcaaggagttgaggactctactaggttccatttcaatgtgtactagattctatttcatgtcgttttggcctcgtaacatttccttttgtgtggaatatggttgtgggaagacactaacctttgatataggtgtactaataagatggtataaaagtttttatatatattgggtttttcaagacagagtttctttgtacggccctggctgtcctgaaactcactctgtagaccaggttggcctcgaactcagaaatccacttgcctctgcctcccgagtgctgggattaaaggcgtgcaccaccacgcctggcaaagttttatattttatcttataacatgcaaagggcattattttatcgtatttatatagcattttcttgataattgacaaataataatactgaaataaatcatttttaatttgtcaaaacactgaataagaaagtgtctccatcatactgaacacacgttcgtgtagaacttggtgctaaaccattcgtagaggaccttcttctgggtcgaggtttcatacatagcagagcagctccctcactgtgatctattaaaagtcagccctcaacacaagggtttgcaaaaagtggggggaaaaaaaaagaaaaaaaattgtctaggagatatatacaggaaagaaacagcacaggactgggtgggcttgacctgctggcccctccctgagtcctggggtgggggctcttcctatccatgcctgctctgtgcctgagggcaggagctgtgttgtcagcttgaattgaacactaattagaaaaccaacctccttgtgtttttatgtctgttgtaaactaaatgcagcccatttcttttcgctgttgtggtcatttcttttacatctatcctcattactgataatatatgtgcacccactgatttctgccatttttaatgtgttttttgtttagggagctatttttttgtgctgctattttccttctgacctctcaccgataggtctcaatctccccctcccctttctactgattactcttaagaacatctttgtgtattcaaagttcagtattaaaatcaatgtctatccttatctgaaccacagagg

SEQ ID NO: 24660 - DNA, 1254 bp, Mus musculus
ggcagcatccagcctggagttgccagtgtctctagcaagcaatactccctgccagcgcattaggaaccccagtcctgtggatgatggagtttgtcgcttttggaagataagtgtgagagcttgttagttttgttggtcatttgcttaaggtagatcctcctcctatagcccaggttagtcacactcatggcagtcctcctatgttaccaccccgagttctgagcttatgggtatgagatagcacacgctgccacaaaacatttttgtaaagacagaagacaagatgcaggcccaggtctggagtccagcagcttcctggggcagtgggtctgagttggcaagaagtccctggtgtctaccccaaaacgtcaccacacacgtgtcatgctaggtgctgggcactcagtcctctctgcagtctcatttcccatctggctagcccagaccatcatcagagacccacaccttgtggcttcctttctgccttcagacccccagtgactgtgcattcaggttgtaagacgttagagctggttaccttcaatgtgcatgctgccatggtgccctcagatacttgggaggggagatgtgacagcaaagtcaccgtggccggaagtggggaatgggggtccattcagagaagcatggcaagcccttggtcacctgggctgattccaaggctatccttgggacaaagcctttcttggattgacacctgctcaggatgcaggaggacgcttatctcccactagacacaggagtgtaccttccgttggctgctgggcatgggatgtgcctagatgtcacagccaagggtgtccttgcaacatctaaggtgaggtccatgtttccaggggacagcgatgagctagagcctgccttgtcccctgcaggattatcctgagccaacagactgcaagtgactcttgagtgctgagctgagcagaagcgctaacagtcatgcagggttgaactgggggaccccatgcaccatacagggtgattttgactctaaggaccctttgggtgccaggaagggccacagtcaaactatgggaggctgaagcagtgtgaactgttgttcccccagccctgcccttgctcctaaaggcaactgtggatgtgaccattgtgggctcagcttggagagtgtggctcccacctgaagcctcatgccacctgtggaatggtacctgcttctaggtacagagcctcctgccctttgatcatgttctctaggatggcagatgtcat

SEQ ID NO: 24661 - DNA, 1183 bp, Mus musculus
ggtagaccgctcactcagcacagacgttgttagtcttctctctagacttgtgccggtcataacaggaaggtgaaatggtgaacgtggttctgcatcttaaattctctgccacacttcaagtccagttttgcctcaggttctcaacggaaatccccagcatccctgggagtgactctttccagccaaatagctggtctctgttgttctcatgctgtgctctcggccttcgctgcagctctctgtatccgtaaggctataaactgttataactaacacacttctttcccactaggcttgaagtcctatgaaagtggaggtcacagtttgtttatatttaccttcttagctcctccataatgtctggtcgataggaatatcatccagttactaagggaatggcccccgagaaggacatctgtaaagtgtaaggccagagcatcttattctcatggctttttaccaggcgcccaagccttcacccttaggttctgtgcctggctttcttgctgtcacctggccattccattctgcctcttcaggggaacctcagagaccctaggacatggtatccagcaggaggtggcagcacctgccgatacctccccccttcacttactcatggtgtggtagaagaagggacaggtggggtcagagaccggcatgtgacacaacagatcacctctgccattaaaaatgctgctgtaaagagaaaggctgccccacccgggaaagtcacttctgctggtgataatgttcttctctcacaagagagcatcatccactgtgagcagcggcagttccactggagagtgactccttgacactccaggtgcctttccaacctgcatctgtgagtttgcccagttagatcgtagaattgcagttgtgttctgaggatcaagtcctgtgaacagtgcggggcgcactgacacactgacactcggacttaagcttgcactttgcggagagtagtgtttggataaacgattgagtgcatgagcatggaaagccaaagtggggccctaggtctctgcttaaaacatctccctgctgctctttggtgcactgtgggcctggtctgtctcttgaagctcttgggcttaggctagctgttccctttacacttcacctttcaagttctgcattaccttgtcctgaatgactttccagaagacagcatctt

SEQ ID NO: 24662 - DNA, 1160 bp, Mus musculus
tggctacctccacactgtaacttctaacatgcactttgaggtttcatctgcatctgtatggatatggtcatggaataagcagttatcctggacagtgcaatggctttgttcacacttggttggttctttcttcccgtctgaggcagccttcagggcccatggcttggttttccctagctatggctcccatgagttcttagcacatgctcagtgtatgagaccaaggcctggcagtggtagccatcactaccactcacactgtagtggtgagaacttagctgatcagtgtacacactggccatggaggctgggaaatgtcttaagtttggtagttccatagcaggtaaagtccactaaagggaaaagtgaaaacatgaagatctgtttctgtgtcatgttatccagtgtttatgtatgatagaattcagtgtcgtgttgccagtgtgtgagagccagtatacaaagtgttcttcctaactctacccaatccctatctctcaaaaacagaggaaggactggctaccttggtattttataccttctgaatcagcagaagtagacagacttgccctgggccctgtggatatttacatattcactaggatcctggccagggctctttgtagaggatggtaagaggatttccaccttaagtgagggagagtaccaggaggcctttacaggggctcatttgcactgtcagaagcatcacatcggtttccatgagtcacatgaccgtcttttaaggaataaaattcatcttgattctcgtacaattctctatatacagaaaatgcaccaatcataaatctgtaaatattctgatttatgtgcaagttatttcttacaatgaaaaataagtgattgggaattgtagtgatccctaggggaataattcctgattgtggttttggtttgtgttacaatggtttaactgttgaggatccactgtgctgatgctgtcggcatgtgtactgtttttataccttgttataaaacaactgtaaactaatagatcccttcagtgcctgtgtcagtattaagtgaggacatcaccaaagctgtgtcacttcttactgagactgagcagacacccacatctagtcgcctgacttccctttgtttgacactgccaatcagctcagagatattgaaccagg

SEQ ID NO: 24663 - DNA, 1207 bp, Mus musculus
cactgtccatctgagcagagcagtcgttaagagggtctgagtggtggcagactccctgagctggcaaacagctctacttttttagggcttgttttctgtaggaaactgaaatttgaggttcatgttgaaggtttttaatgctttgtatggatggcagatttcatctgttaaattgaaaaaagtggtattttatcaatcaaggcatgggagatttgacctacacctctttctgagacttaggtcagtcagtcggcattgtggaacctgtgctgtgctgcagatggcgctcaccccaaccctggcttcagttcacacccttgctgtggtgaatctgtgcctcactgagcatgctgccctcaccaaaaaggagcaggagccgtactctgtgagctcgatagttactgaacgggagaaccgcaccctgtgagcttgatagttattgagcaggaaggctgcttgttttctacagagcagacttttttttttttaatcaccctttgagaatctgagctgttgtttgatcttcagagaaggttggcatctttggcacattggcttttattaagatgccactgtgccttttcctagcagccaagcctgtgagtgcttccctgtactgtcctgagcctgccacaaacagtatcttaataactaataactaatggcttgctcatttttgaatgtttacagcaggttttgtatatttttggttctgagaaaacacataacataacactaggtctgccatgcctctgcctgtgcggggtaaccctggcagcgtccgcctggcatggtggtggttgcgtctcctggcagtaaggaagcgccagcctcacaccacagttatcacttcagtgatgatgagtggaaggaagtgactgacctttctgaacccttgccaggagtggtgtgtgtgtggtgctgttctatgtgcaccaaagttttactaacaccagctcctcctaccttaaccctcagctggagctgaagaaaagcgacttgcagtttatctgtgtgcatctttatcctcagaccaaacctcactgtgtcacttgtaagaactttgcattgataacgacttctctctctctctttctctctctctctctcccccccgtgtgtgtttgtgtgtgttatgtgaattgatactgcagttaagtgttatattgatgctttatgaaaataaaattttaatttttaaatatca

SEQ ID NO: 24664 - DNA, 1149 bp, Mus musculus
cagcaggtgttaagttgaacctgctagcaggatgagttcagcagagggtacatttgtcccgctgcttgtgtttctagtattctctgaattttttttttttttttttggtttttcgagacagggtttctctgtatacccctggctgtcctggaactcactctgtagaccaggctggcctcgaactcagaaatccgcctgcctctgcctcccgagtgctgggattaaaggcatgcaccaccacgcccggctctagtattaattctcagtaatgtttagtgtttggctcactgtggtagtgacatttagctgtggtagtgacattctgtttcgaatgctgaacgctatcttaatcttagtagacagtgtatattttcatttccatagacttgcctatgcagcttaaaatcagatacaggtactggaatcagctagaatgctagaagctctcctttccctcgttacctagttaccaaacacttgctttttctattccaactgtagtacctgaagaaaacattgcaactatgaagtatggggctcaggttgtgaaaggagagctgaagtcggccttgctggatggtgacactcaaaactatgacttggatcatggattttcccggcaccccattgatgatgactgccgctctggcattgagatcaagcttggccagccgtccattataaaccacatacgtctactcctgtgggaccgtgacagccggtgagtccttcctgtcttggagaagctcatgttgtatttgctggagaggacctaactttttcgtcatctgctttggttcctcttcctttttctctcttcactagcagaaggaggacgtttatcaagagaggtcctctgtcttagggttactattgctatgatgaacaccatgccagagcaacttggtgaggaaagggttcgtttggcttacacttccacatggcagtttgtaaccagtgaattactagatgggaactaaagcaggccaggaacctggaagcaggagctggtgcagaggccatgggggagtgctgcttactggcttgctcagcctgcttcttacagaacccaagaccaccaacccaggaatggccctacccacagtagactgggtgctcccccatcaatcactaagaaaacaccctaca

SEQ ID NO: 24665 - DNA, 1101 bp, Mus musculus
tgattgaagggtgctgttctttttctttttaaaattgaatagcctgtgtttcctagaactcactctgtatgtagcccaggctgacctcagatccacagtaattcccctgtttcagctttcccaatgctgtattacacagtggagaagggaagagctaggaagactgaaacccaaggaaaggcttgctttctgtggtccggtcaggctgactggctgtgcatgtgggcgtgctccacgctgactttttatggtccttttttaccctttgcagacagcactcctgaatatcgtcttaagagattcgtttgctgctcctgagaaagatattttcttagccttgttaaactggtgtaagcacaatgcaaaagagaatcatgctgaaatcatgcaggctgtgcgcttacctctaatgagcctcactgagcttctgaacgtcgtgaggccatcaggactcttgtctccggatgctattcttgatgccatcaaagtgcggtcggagagccgggatatggacctcaactacagaggcatgctcagtaagtacctgctcccctcctcacctaggacttttgttggcatcatatgctagttctagctgcagagctgtggtgcaggtctgcaaagcatatgttgggccgagagcacagagctctgcttcctgtgggtgtctgtctctgccatctgtcccaacaggatgagctgccaccaacccagcacagctatttcctgtcattctggacacattcttttatatgctcctcagaatgttgtagacactttcctgaaaggttgcttgtcatttcctccttccttgaccaagccctgtatctaattctttaggtagcacacatagaggttctaagtaatgggtgatgttaataacagtattttgatttttcttgcaaatgaaataatagtaattgacaattacaaaatgctttctttttaaaagatttgtttattttatgtacatgagtgcttagtcttcatacaccaggaggagggcatcggatcccattacagatggacctctgaaagagcagccagtgctcttaaccactgagccatctctccagccctataaaatgctttttgtgtcat

SEQ ID NO: 24666 - DNA, 1143 bp, Mus musculus
caaaatggtttttaaaaacaacttacctattttatttacatgagtacactgaagctgtcttcagacacgctagaagagagtatcagatcccattacagatggttgtgagccactgtgtggttgctgggaattgaactcaggacctctagaagagcagagccatctctccaaacctcaaaatggttttaaaatacttttcttgtttcctttaaagaatcatttaaaagcacttgcatatctggacctggatctttgtatcttttagcagatttatatctgtcagtgttggtaaccgttgtttcatatattttgcagcaaatcatgtttgagatttttccaactgtgtttcttgtttggtgtgcagagcattactgtatggcgggatgcgagagtcgcagcccgaagcagagatccctctccaagacaccacggccgaggctttcacgatgctcctcagatatatctacacggggcgggcgacgctcactgatgagaaggaggaggtgctgctggacttcctgagcctggctcacaaatacggatttccagagctggaggactctacttctgagtatctctgcaccatactgaacattcagaatgtctgtatgacctttgatgttgccagtctctactcgcttcccaagttaacttgtatgtgctgcatgttcatggacagaaatgctcaggaggtgctggccagcgacggcttcctctccctgtccaaggtgtgttctgctctacgctcagtttctcggcatgccttcttgtccttaaatgaccataccacagtggtccaagaatcaaaaccctcgctcaaagcagtcatctggtctagcttgtgtccctggctgctggagcttcagatcttacagggctttggttccgtttttctttgttttcaaggtttctctgggctgggcgtggtggtgtatacctttaatcccagcactcgggaggcagaggcaggcagatttctgagtttgaggccagcctggtctacaaagtgagttccaggacagccagggctatacagagagaccctgtctcaaccccccgcccccccccccccaaattcttttttctcaaggtttctctggtaagttttatgtgcagaagagactggtctgctcagttggattt

SEQ ID NO: 24667 - DNA, 1362 bp, Mus musculus
tttttttggtttttcaagacagggtttctctgtatagccctggctgtcctggaactcactttgtagaccaggctggcctcgaactcagaaatcagcctgcctctgcctcttgagtgctgggattaaaggtgtgcgccaataccgcccggcaggctgcaacttcttatgaagcagcagcctttgcagtgtctggcaagggtcctcttgacttgtggacaggcactttgccttgtggacaggtactgtgccttctcggggcagaagtttactgcaacatgcatcccattccaggaggctccacctaagtaatttgccttgtaggagctcatttccaagtaccattttggggagtgggcctagtcagaggaatttcgaaggaccccagagttgtcccatagcatagtacacagaccttgacaacttggttgtggagggacctttgttctcaagatgctgttagaagcatgggaaggcccaagggcatgcactgcagagttggcctgcaagaagtcctgatacctacagcttgttcatcccgtcacttgacacatatatgatcaaagatggctaaggccagtcagtgctgtgtgtccactaaaaacggccattgaaaggaagtaacctgggattcctcacttgtctaagggctgaaagtgttttccaaggctctgcagccaaattgatctccttacgttctggaagaccaacagttttatgtgatgttacttatttaccatttcccagtggggggggggctctgactttgtgtggtgacatgctgaaatgaggttttgtttctttaagtgggagttgaaatgcaggtgaaatgctctcatcccgaggccactgtatccagcaagatcactaacataactcatagcctactgaggttatgcttgtcaacttctctcctgtaaacttaatctccggccacctccttttctacactgttctcttcagaggaaaataaactatgtgaaactccaaactgaggagtcatgaggctggccatgagcacgtggagagagggggaaggggaatgagaagagaggggaaggggaagggagcaagagaggagggggtgtgagtcaggcacacctggctgttgccaggtaactgtgggcggagcctagactaaatgccaacttgaatgacatcacaccaaccaacatcctcctccactaaataccacttgtcaaaccaactgaaaacgggcccccacacatttccagaatgacccctaggggtcagtactgctccgctgaaaccactggtctttcttaagatttctgattctagtttcttcaaagaggaatgggtcctgatagcgtttccaagggaatgaatgggcagagtcttcac

SEQ ID NO: 24668 - DNA, 1623 bp, Mus musculus
tgggtctctctgctccagttcaaatcctcctgaaacccttttcattgtcctgattcagtgggtttttaaaaatctcccctctgttttgccaacctaattttcaagtagcaatttatcttatgaccttgacaaagttgtgtgactttacatttaagataataattagaacagctccctttagagatcacagttgctactgcctgtctcttaaagactgctcaagtctgtttctgattcatcatttagaattttgtttcaaatgtttctttttggggtctgttaccttctggggtttcagttcctcagaaataactttccataatgggaagtacagagcagtgaacagaaatgagatttttttgtgtgtacttcaaacagcatagtgtttatcttacaaaagagaaggtactcctgagagcaattcggaatcatgctgacaaggacacagatagaaatactaattttctttttttcttttttctttttttttgtatgtataaagtactttcagaattcaaggactaactttacttttctgggaatacggaggaggaagggattagacaatgggccatgctgtagcatcctttatgtaaataatgagtactgtggttacgacagacaaagccacctgattggtctgaaggcttgggcggtcagtgtttctagtagctgggttatgcctatgcctcatggtacctcctgccctactgaggaacctgccgggagtctggcctatgctctctgctcacacttgggcttgaataccacagagaaagaagcacagaggtcaatagtacaaggctgctctaggggacacctgtgagtgagccccacattggagggagtcttccccaccccatggtcttcatgatgcttgtaatcacgtagcatgttatgttcagtgctgagtcagatgtcgggcattagctctgtggtcttccctgctgacaggattaatggattctcagaggtgatttgaagactcaacaactggaggacaaaacccaatttgaggtcagactgcagcgaagtttcctgcctgctgcagtggaagacgggcgtgggcaatgccaagcgctacacagctatgggcacttggtgatctatgtgagcagtttaaacacatcataggctgaaataaagctaacactgtttagtacataaaggtctgggcagcaagtccctttgtgtaaaaggctggtcttgaggcctgaaaggattcaaaagaagtttgcgctgaaccagggatacacatgagtctgtacagactaagccaggtagcttctatggttgaaaaagcatgggaaagaaaatgtcaaatcaaaagatttgggggaatgaagtacattcaggagaaagaccagatatcaaaaggtgggtcacaggaatctaggagggccagtttcaaatgtccaatgctggaatcaccaaatgggattctaatactggacctacccaatttaacaatgtgaaccatatttctaggggtgggaagtacttgctaggtgagtcttgccaggacataatccttattccttaagtgtgcttctgtatgcattgaaaagcatgtatgtggccaggccttggcaggagttgggacagtgcacttgcaaatacact

SEQ ID NO: 24669 - DNA, 1197 bp, Mus musculus
tcaaaagtcaactcacaacttttttttttcttttttcttttgagacagggtctcatgtagcccaggtcagttttgaatgccctctgtaccccaggatggccttcaactctttttttttttttttccagagacagggtttctctgtgtagccctggctgtcctggagcttactttgtagaccaggctggcctcgaactcagaaatctgcctgcctctgcctcccgagtgctgggattaagggtgtgcgccaccactgcccgtagccttcaactgttgatcttcatgcccctaccttcacaagtgctaggatgaaacctctatgcctggtttatgttagaggaccaagcaccctagcaactgcattccatatttacatgtagaattatacctttataaagcacgggatctttctcttttctgtagacattacagcccagaaacacaccttgtcactgaacacactgggcacttcttcataatgtctcattttcttctctaagatgctaccataagcatcgaggggacagtgatgttgaagaaggtggacaatatcgacttctccaagctgcacacctttgaagaggtcacagctgcagcaagcagctcggagatggtgcatcagctggaggaggtgctgatggtgtggtacaagcagatcgagcaggtgggacccctccctttccccttgggctggagtcttgtgggtcctagctatgacattttgtccctgatggttgggggcagttgtaaagcgattatgaatattctgtatatattaatgaatgctggaaattaatatggtggaaattattccttaaccagctagttaaccacacagagaggcctttttagtatttcagagctgaggccttagctgggcagactctcatcagctcatctaagttaacctgtctacctagctcatccagccatgtggctagctataccatccaggcccgtagtcatgtctgtctcctctcacgtctcttggcaaaatcacttgctctttctttttcccagagctcctttctccctcccaggaagtcctgccttctacttcctgcccagctaactggtcatcagatttttattaatgccaatcagagaatgccttgggtaggtgaggaaggacagagacaggactttacacagtgtaccccatcaggcagtggagggagctaatttgttgaagtcctt

SEQ ID NO: 24670 - DNA, 1215 bp, Mus musculus
tactccaatgaaatggagggtggttaggggtttattaggtatatactgatgccaatgttaagagtaaatgatcacctgaaaaaccttcacattagagcctgccagtctaccctcctgtctttcagctgcacttacaggttttggtgagttagatgtcttgtcccaattttttaattcaatgcttcttacaaaggctattttgagttaaaaatttaagatagtactgcagttttcctttcccatatcttaaatcattatttcttgtttatgcatgtgtgtgcagaggctgtagtacaacttccaggggttggttctctccttagcacaaaggctgtggcaccgttatctgccgagccatcccacctgtctgccttttctacattgttaattggttctgatgtgagcctacagcgtgggggcaccttggctttcacagctctaagtcaaagcgcccagcaaggtgacttctggtcccttccgtgctaatggtgctgtggtttttatagcacacagaatgtgcgattgagattccatgacccgttctcttacctttcctgaaaggatatctgcatatctgccattaaggagaaggacatcgaagccaagctgacacaggtgattgagaactggacctaccaaaacctgagttttgcagcgtttaagggcaaaggcgagctcctgctcaaaggaacagagtctggagagattatcaccttaatggaggatagcttgatggtcctaggctccttgctaagcaacaggtaattttattgtctacgggtatgatttaaatttggtgtttatagcatcacaaatgactaggtacagcctagttttgtagctaggacatttaatcagattctgctccactgttcaagcttttgtgcatacctgtacccagtgtgtattcttcctgagaatgtgaccactccatcactcttcagagctaacatctcctgtatgttcccaggatggaggctcttgtacatgttagccccaggctgggcaatcaaccagcactatgctccctacaaagagaggagccacccagtgagagcatttggggttacatttgtaaccccagccctcacagctgatctcaggtttttttttttttttaattacatgtatgtgtctatcagtctgtgtgtatgccacatgtatacaggtgcccatagtggactcctgaagggggcattagatcccctggaaccg

SEQ ID NO: 24671 - DNA, 1749 bp, Mus musculus
gtgtgtgtgtgtgtgtgtgtgtgtgtgtgtgtgtgtgtgtgttttattccatcttaaacaattcgtggcctatcttttatcttaagcttgctcctatgccttgttttattaatctgcctatttaccagttgggagtgcagagtggttggatgaattttgtttgctgtaagtagacaggttcttacattgctggttcccatggccacccaccttcctttgatgttttgttagaaggtcaccagcactcgtgtctgaagaatgacagtgaaattgtcctctggcttccacatgcatgtgcatgcacatcagtaaacataatgtgcattccccccacacatgcacacacatagagatatagagattagatagatagatagatagataaatagatagatagatagatagatagatagatagatagatggatggatcacaggtagcctttaggaaccaatgtccaagtgtcctgtgctttcactgaggggccatctacagtatgctttccattcaggaagaggtgctgacatgtgtacaccaagttgtttacatgatgttcctactcagggaagcctgtgtgggatttggagccagacgatcatgttagagctgtccacaactgtccagactcccagaagaaaaacaggccttcaccatgtatcggcagtttaagctgggggtggagggatcttattaattagtaatggaggagatagccccaaagccaagttcctagataccaaccaatgggaagctccccaaacatgcccttctccaggtcaggcccactgctcttgactctggccagcagagcagcgattgctgctgcctgacaggaggggccagcacagcagcgattgctcctgcctgacagaaggaaccagagctaagcaaactgtcttgagagtcaagttgggaagactagccaatcactggacacttgaaagtattggttggaggggtggagggggccattcttaggctggcagcttcttcttcagggggaccatgaattgctcttgattaccatgctcaaaagaattgcgctcttgataatgtctggcaaacttggaaagtggttgaggagcagagaagagagtactgatggtggtggtgtgtgtgtatgagagggagagacagagacagacagacaaagaaaaaaagggagacagagagagacagagagacagagacagagacagacagagagacagagagacaggggggagagggagaggatttacaggagcacagtagtaaattcacagtgacaattacttaaagcacacaccatgctctttctttcttgtatgctcctcaaagatctccaatttatttgcccgagacgagatggatgaaatcacccaaggcctgatatcggtgatgaagagggagctgcctcgacaccctcccacctttgacaacctgtatgaatacttcatcaccagatccaggaagaatttacatgttgttctctgcttctccccggtgagtctccattgctcatgtggcaggatcatgcacctgataggttaccttcttggacgacatacttgaccagaaacaaaccattctttcatgagactaaaatgacttttttcctagtacaatggatccgtggacccatatcgcttcaccagtgtggccacttaggaatatatgagttatttaaggttgctgcatagtttaccagttcatgaatcatcaagagacattattatttgaattgtgaagactttggtagccgggcgg

SEQ ID NO: 24672 - DNA, 1149 bp, Mus musculus
acatatatgtgtatatatatatgtatatatatgtatatatatgtgtgtatatatatatatatatatatatatatatatatatatatatatatatacacacatacacacacacacaatcagcctaagaggacaaacccagatttatctattagtaaggacacatattacattcttagtacccacatcaggtagctatcagcccctgtacctccagatccaggtgggggggaataactctctcttctggtctctgcaagtagtaccctcatgtgtatagaaccatccacccacacatacatgggcaaataaaaaatatagatgctaaatattgaaatttgctttctaattctgaacttaattaacattacttggctcgtatttgcaggttggtttggttctttttccccactagataccccaaatggcaacacatgcttaagtgctttccattgaaggttataagctctcagtgaccaaccaccacattcctgttctttgagcgggcatcccccccatttcctcctcctcagattggcgagtggggcctgcagggactccctggagatgacttgtcaattcagaatggcatcattgtgacaaaggccaccagataccctctgctcattgatccccagactcagggaaaaacgtggatcaaatcgaaggaaaaagaaaacgacttgcaggtatgtctgacttggtgtgtatgtgtataagtcagtcagtctgacttggtgtgtatgtgtgtcagtcagtctgacttggtgtgtgtgcgtgtgtgtgtgtgtgtgtgtgtgtgtaagtcagaatgtgctctcagagtctcagtagactctaaaagccacccaggaagctgtctgtgcacctcggcttgctgttcctgtaacaaatactcgttttgctagaatttccaaccctaataagcccatataaaagataaacaatctggatattataattataagccacatgcttagactggacagatctaaccttgtactaagttacaccccccccccccagctgttagaccccttgttacttgtggtttctcccagccatgtggttctggtccatcatggcttccacctcctcttcctccatcccctcttgagtcccacctttccctcccactgcccaatcacaggc

SEQ ID NO: 24673 - DNA, 1197 bp, Mus musculus
ctgagtgttacttcctctgcgttactgacgtgggcttcatcaagagtctctctctctctctctctctctctctctctctctctctctctctctaggcttcctcacagcaatgaggcaagaagtgacccgagctcacaaaggctgggcgctggacactgtgaccatccacaatgaagtcctgcggcagaccaaggaagagatcatcacgcccccagcggtaggtgctgtgggcggggctgagggtgaaaccttctctttgagggccagggatgtaagtgcagtaagcagtcaaacaggtgccccgtgggcaaggccctgggttcagtccccagtgccacaaaaacaaaacaaatcaaaacaaacaaaattaaaaactggccttggctctctcagtgaagcctgcctgctcttcagagagctttttctctgttgtaactggacagtcacaaggccaaagcctcccctagctgctgagtgggaggttagtgacaaggggtaatgagcccagggactccatgagtgatatagatagatgcatagatacatagacacacacacacacacacacacacacacacacacacacatacatacacaagttcggtacatgtttgcttagcttagaaggatctccgtgggtctccagctcctgctctgggctcacagattcccttgtagcagctacaggctgctgaaatccactgaactgttgggagctcagttcctacaccgtcccatccctctgtgtattttgagacttctgcgtgcagagagtctgccatgctacggaggtagcaggcccaaagccctctgcttcttcgacccaggcatgggcaagttcttcagtgacttgaaacctatgtgacagttcagcctctctgcaggaagtcacagggctgcaaacgccatctccgaagcttggcgccagatgtgacacagcagctcaacaaacttagtctttctttctccttttcttctgtccattccctcaacaccgaggagacttgaacacacgaatttttgagctctggacagttttctgccactttgtaactgggaatcttccctccggttactagaaagttgcttatgactctccacacaccccgacagtgtatatttcttccatctccccctttaaggtaatctagggtctctctgttatgcattccaaggttcttgtatcttctacctgtt

SEQ ID NO: 24674 - DNA, 1148 bp, Mus musculus
cccagacccgagtagaacaaaggaaaagcctcctcagggagtttagaccgctgggggggggggggtcctcatcagggttaggggtggggtgtgcctttccctttcaattgtccaagccacacagggagagccttttataaagcgagactccatcttctctggctcaacctcgctctcactctccacctcactctttctcttccgttgaataaaactgtgatggattgtaaaaggtacttagctgaatcactgaatttagagatagaaagggccaattaggtcatcaagcccatctctctccagaggagaggcagaaaataggagacaacaataaacaattttattgggatattaatttaggcgcctgaagaccttggctcgtgtcttgtaatataatccagtggattttttccccttctctgctaatgtaataacagggccattttgtgggcagttggtttgcctgatggcttttttttttcttctctctcttctttcccacggaaggtccagatggagtttcggaaatgctgggagcgctggaggctggagcacttgaatatccagagagactgcagcatgaagcccctcaagtgtcccaccagcagcgtcagcagtggggccacagtgggcagcagcgtgtacgcagccacctgccagagttcctacagctgagccccagtgccggtcctcctgtggtccttgcttctggctgggtggccatcccaggtgggagagatcctggggatagggaatgtgaaggacacaggcacaccacacacacacacacacacacacacacacacacacacacacacacaccatgctttctttctctaaacctatgaagcaggcaagtgggcagtgcctcctgggacctaaacacatgtcctccaaggagaacagcctgctaatttaatcaccgtggcaggaagagaggaagaaacaattgctgctaagatgaagaggacttcttcctgtttaaagccgcaagacccttggggttccattggacagaacagcaaatcaacccggactcacactcaagggcaattgctgatgggtggaattggggcttccgagaagaggccatgagagacctgcccttggaacctcagccagtccagagctcagcaaggtgagccggc

SEQ ID NO: 24675 - DNA, 1189 bp, Mus musculus
gagaaggtcaaatgcaggctccgggtgagggagacaccacaccagctgcgctggggcagcagggactaacgcaacgcaatgcaacgcaatgcagacagtgctggggtacttggcaggctcctcccagacttcctttctcatgtgcttcttagcttaaaactcttcctagttttccagccactttcattttgcccaagaaatactcgatccaccttgtggatgtttaaagacccatttcccctttcttcatgaatcacattaactacctccaccgagcctgggaagccggcctggggacatatcgggtgtatccctccaacttgaggggagccgtggggtgtcaaggatgggcaggccggctgagtggaaggggaggtgccatggatgtccccgttaagaaaatgcagctgctcgcctcttccagagcaccaccatctaaggtcagcctcctacaaaagtctctatttttgagggtaggtcagtttaacccctgtgagcctcagtttccccacctgtaagtaattgcactagatcatgtcttgacaggtcctgagattcctcggctgtggccttgatgctttcgtatcttatctgtagagaatgataagggtccgaattttacttaccgcatggataatgtgctttggaactctttagagattctttttattttttacactcctagatcttttttatagagaacacacaattgaaatgcatattatgatgtaattttcggtttgcttgttctatacaaacacggccttgccttctagactcagcttttaaccagggacacgattcgcctttataaaaaaaaaaagtcttcattaaaaaagaaaacaccaaaaaggtcttcatttaatttcaagataattaggcatggcgtccagagaggaactggctgctattagctgtgaagtctgagctgaaaagaatgggtgttgggtggacaaacctcagtccggcacttgatggggttggtgccaaagaacccattccatccatgtccgcacgcatgtcttgacatggtgggtcatgcccggcaggctctgtctcctcggagagctgtgtgctgtcagtcacaggcagggtggtccatgtttcactctggaagggttcctcagcctctggagggattctttcctgtccaggtttctcctagaccctgagacctgcttgtcactca

SEQ ID NO: 24676 - DNA, 1138 bp, Mus musculus
cctgggaagttgataaaggatgttgaccagaacaggcgaggggtcagaggtcacccagcattgctcaagctctgcagactcgaggaaggctgacagccatcctaggggactctgcacccttgtcccttatccactgtccataggggccatggtgtgtggttctacctttccccatacatagcccgaatcccagagatgctgcctggatttctagaccattcccttttcttcttcttcttcccattggtcttagtcatggtaggagataccgggaagtgtgcgcctacctgccacggacgttaaagtcagacttcccttgcagttgggttccctagaaggtgagttccttcagttgaaaggaaggattgcattgggtttaaggctacaccacctcctcctgttggctgataaaataaaagtcctcacgtaaaaaacaacagcccaaggacagaatttacagggctttgtcagagagaggcctgtggggccgtgtcagattgaggctcagaaaaggctgagcataagggtggggctgctagcctctgtctacccctttctttgtccaccccccacccccacccccaccccagtctctcctgcctcctcttctaccctttgtccagagagagttaaactctctggtgttacttctagggagtaggggatgaatcagcgaatgttgcacacagtaggggcaagaatctttcttcttcacctggaggtggagagaggcacccattagaaccagaaaatggaacatgaagcttagaatttctgagaaacccaaacccaaggcagggggcagacaatatctgcaaagcagaaaatacccaagtgtgcccctgacaacagaaaaacagactgaaggcaaacaccttcccttgggaagtgtctgggcacagtgcaatcccttctggcttctccatctagtagtcacccatcaaaccttcattgatctgattttccccctgttccaggccccgaggccagggaagacaccttccttttgggcttactttcatgggcagctactctctctttctctaggtagcattggggcgggaaggggctggcaagatactgagggccatcagagcccctgtcagacatctgagtccctgctttctggcttttccag

SEQ ID NO: 24677 - DNA, 1337 bp, Mus musculus
ttgggtgcagttcctggtccgcctcatacacaaggagttgagctgtccaggcccagccgcagggatccaggctccgtaagtccactgaggcctctctggagagaactcgactctccaggcagcccgacaagaaggaaagaacttagcagtcatccccgatcttggcacaccgcagtctgagtgcctccgtgtgggtgccattctgcaatcgctcctcagactcccagggaggggaatgtgaggaaaacgccttgtttgtggagtttgtgagctgcggcttcccagccaagacagtctcactagcagctgtcttcctgtccttccgtgccactgagaagcaatggggagggcacagggctgtgtatgggtttgtgtgttttgtgtatgttcagcatctgccatgtggcccatctgtcaccgtgtcctttgctttttaggctgaaggaacactgaccatggagtcctctggagtgcctgggcccatcttacacacacagtttttggaaaagatgaagtgaaggatcctgtcccacaaaggaaggctcgccttaccacgtgcacctgggagcaactcggacttgccgtatagacagacgcggagctcaggctgacagtggggagtctgtctgtctgtgtcccactgccttaatgggccaagacccagtggtccagccagccccagcctgacagatgctcactgccctttagctctgaactctagcctgcacagtgacaggtaggactgtcctgaagcacccaggtagcccacccctctcaggtatcaagtgcagaatgttatatagcctgtgagccccagccatcccgccccgctgtttcctgaatgttcacagtgaaaggatgggacatgtcacagatgtctcagcaaccaaccaacagcctctgaatagcatgtgaaagcctggtcacagtcagagactgagctggagtccacacccagccatcatgaaggcccatgctcaggaccagccacgtcaagatgtgaatgtctgtgaagcaataagtccccagcaaggcaggggcactaggaaggccagttccaaagcaccggcgtgtgccgcggtccccagaagaatggagagagcgtggtggctggggaggggactctgttggttaccgagagcaatgggtctcacccagccatcccactcatcccagactggggttgtttctagacccacagggatttatttattttaaatgtatgatgtgttatatagattttaaagagacataaatggcattttgttatttattaaggcaaaccatgattgttccgtggccatctgttgtcttgattgtatctgctctttgaaata

SEQ ID NO: 24678 - DNA, 1397 bp, Mus musculus
aacaaaaaaaaacaaaaaaacaaaaaaattcccaaggccatccagtgagaggaggtagtgctgggccatgttccaagtcactcacctggcatctcttcttgtccttgtcataggttctgttggtacagatgacagcttccgcagcctgtacaaggccacctttgacaacatgacctcttacctgaagaaaaaggaagagagactgcagcagcagctgaagaagaagcggcaaaggagccccttcccagggtccccggaacagaccaaaaaggcgtgcccgggccagtcagcccttagttgctgaccttggacatggccacagctctcattcctgaggccctgtgggcagctctctccctcctcctccctggttcatccctagggagggagatcacggcagctcagtccctaccactagctcaacagtccctgatctccagagtctgcctttgtcactgagaacaggctcctgccgggttgcagggaaggcaggtggtgttagcttagctaagagtctagagctgtgtggaagcaccttcacattgaaggatacactggcccacagcaccacgcatgtctgtcggggcccacagtgtcgtccctggggagctctagggagacctgcaggacaggacctgccttcacatcattgccgggggctctccaggtggagctctgtatggctctgtagctgcttgctgttttgaggcagattcagttggtgctgttcgcactcctgggctgggctgagcagactgagcaagctttggggctctgagggtgtgaccttgccaggccagccttgttttacagggaatgatggtgacctcgtggttctgttgctctgaactctgcatacactgcagaacagaaggaaatgaacagaaatcacagcatcaataaagacaaactttgcatagctttctggaatgttcagcagcagcctccatagctgatcttaagacattcaatgtgtgtatgctcttcaaatgacatggctcttggtggttagagaggggtgttgtccagctctgtctattctcgtgctatttcccagacgagctgcagcagagaccgtcttgggttggggagatgagacccgagtttaggtaccacccaaacatacagaacaaaggaaggccatagcctagcataactgtaaccctaatactggagctgcagactgaggcagcctagcctaaacagtgacattttgggctctgtgagatcctgtctcaagatgaacagtcgaggaagatgcccagtgtcatcgtctggcctccacacgcagtagaaatagtcttgtggccacaagcagctatcagtcgaatgggtggtgttcacggagcagggtgctcacctctgtctaggagctaatgtcacgtgttctggatgct

SEQ ID NO: 24679 - DNA, 1100 bp, Mus musculus
actatttcttagatggcataatttatgaaaactgacagtctagaatcaccacgcataaccttggaggatatccacgcatgtagctcatgaacttgcccaatactcagctgagtggaaagcagcacaaatcttgtggtgctctcaaaagtcaggagcagcagtcacacggcagtgatagccctcgggtggactgaactagacccgtaccttagtgaactgaaggagtgttaacaggcaggcaaccaggctggagagatggctcagtggttaaaagcactgactgatcttccagagttcaattcccagcaaccacatggtagttcacaaccatctgcaatggggtctgataccttcttctggtgtgtctgaagagagcaatggtgtactcatatacataaatcttttttaaaaacaacaataacaaaccagacaggtaaccatggacagcatctgcgggcttttcccagcacaatgggctgtataatcgtctactgtgagtttccaatgaggggcttttcaaggggtactatactcctatcgtactaagtggttttgcacatgtgtgacacctctctgagcagctccctaaagaacagcaattctcgccgggcggtggtggcgcacacctttaatcccagcacttgggaggcagaggcaggtggatttctgagttcgagactagcctgatctacagagcgagttccaggacagccagggctatatagagaaaccctgtctcaaaaaagaaaaagaaaaagaaaaaagaaaagaaaaagaaagcaggaattctttgatttaaaatccgaagttcccgagtcctccttaagatggcagcatcgccgctaacgaggccttcctgcacctgcgagtcattcccagccacgccccctcctcacctaatttgcatcaccatggtgtgctaactatcgctcttccgggatgtttacagcatttatgttttcttcctttaacatttctcctccttcactagttaaccatgtaccagtgcacgcctgacttctaagacctcgggacctgcctttccgaccccgttccagttttcagacctgatctcaactagagatcttaaacctagcacg

SEQ ID NO: 24680 - DNA, 1155 bp, Mus musculus
ctcctgtgtccatctgtaattccagatccttccaaatgcacagtgtgaacccagggcttaaaaatacaaaaaggacgggcaaggtgctccgatcctgtataagaaacgaagcagccttgtcctgtcccctatctgagaggttagactctgccatcttattaacaacaacaacaaaaagcagagagtctcctggcaggcctgtgccacaatctcgggaaaggttagcgtttttacaatggcactgcctccgtgtgctttgtgattctgctcagccataaggttcggcatgcacttcaggtgactcttttacattgcccttgaagatgcagggctctcaaggtctcctgtctgctagttagaaagctcacacactataaactggtagtgtggagacttctgcttcctaagcgccccagacagatttgtgtgtctgacagctgtcttgtcacctttctccacagagcccgagccgactgacaccaccacctacaagaacctgcagcaccatgactacaacacatacaccttcctggacctgaacctggacctctccaaattcaggctgccacagccgtcttcaggacgagagtcacctcggcactgagctcagctcagggtagaccccgatgttggttcccatgaatccttgcctgtgagaataaaaggcagagtcacaaagctcactatgtggttatttcccctcgcacctcccagagaatgacttagcgacaccctgattactcgtatagtctacgtggttctgtggcatcccccagtggccacagtgaagtggtcacagattcttccaggttagagtccgtagctccgggagatgtttaacctcatcatccctaacaaggccagagggaacgttctatttcagagcacacttagggacggctgtgtaccacacccctcttaacttgccagtctacagccagccagagggatccgtaaaaagagaaacaaagcaaagtcgggctcactcagcctcatactggtcggcagcagtttctgccaggtctgagccacagccccagtgagccggggaaggcgttacactgatttaaacatgacacaaaaattgcaggatatttgatcacactgtggaccctgagatttactgggaaaacctgcttttagttgtgctgtggc

SEQ ID NO: 24681 - DNA, 1132 bp, Mus musculus
atgatggtgcacgcctttaatcccagcactcgggaggcagaggtaggcagatttctgagttcaaggccagcctggtctacagagtgagttccaggacagccagggctacacagagaaaccctgtctcgaaaaaccaaaccaaaccaaaccaaaccaaaccgaaacaggtactgacctagcatttgtgaagacctgggttgatctcacccctgagaaataaaaaagacagaaaacccagatgggtatttgtggctttgcaatgctagtaatggagtttagggtgtcacgcttggcaaacacttaagtgctggccccctttatctgggtgttctggaagttttggtgttgagacagtctttctgcatagcctcgactggccttgaactcccaatccacctgccttgtcctaagtgctagggcataggtgtgcaccgtgtgccttgctctggtttgtttttaatgtttgcttgttgcatacagatgcacatgtcccaaaggatacatgtgtagaggtcaggggacaagtggcaagagtcaggtctccttccactggtcgggtaccaggctctgaagtcagcttgtcagtcttggcagcaagtgcctttatctactgcaccatctggctagcccctatatgttgtttggtgagacagggtctcctgctcttggccttaaacttgtggcagtactgcctcagccttctgagtatgagaaagagattacaagtagggaatcctgggtctggagagatggcacagaattaagattgtatattcttgtgctagagagatggctcagtgggtaagagcactgactgctcttaacagaggtcctgagttcaattctcagcaaccacatggtagcttacagtcatctgtaatgggctctgatgccctcttctggtgtgtctgaagacagcaacagcaacagtatacccacatacatgaaataaataaataaatcttttttaaaaaattgtatattctcttacaaaaaattctatattctcttacagagcatctgagttcagttcccagaatccctggcagcttacaactgcccgtaactccagctcatatatatgtaaatcaaaataaaataaaataaaatgggaatcgtatggctttatctc

SEQ ID NO: 24682 - DNA, 1197 bp, Mus musculus
gttggcatttgtgacccattgcctgagagcaagtctcctcaatgcttgatgatgtcacattaaacaggagagaaataattcaagaacaacttgggcatctaaactaggtgaagctttcttagacttgacagcagatgcgtgatccaggaaaggcagagctaggggttgaacttcgaaccccctataggatgggtgaggatgtggagatggagtcaggtgaggccgcagcccggtcatcggcaagcactgagccacactcccagcacagccatgctgaaggaggaactctgctctgtatggcacaggcgcagccagagctgagacagaggccctagagtgccgggacacaatgctgttcatcttctgtcaccagcactgccactgttgccatctaaagagcggtgtgtgccgatggcgacatagggtacggatggacagcacactgtttcccacttaaaagtctttattttctctacctctagatggtgaaagcaatccaggtcctgcgcattcatcttcttgaactggagaaggttaatgagctctgtaaagatttctgtagtcggtacattgcttgtctgaagacaaaaatgaacagcgagaccttgttgagtggggagcctggaagtccgtactcccctgtgcaatcccaggtacttgccttctggcccagcgtgcttcttggtctctgtggtattggtcactcagcgttaaccctcgagaccgccagctcctacacaattgctggcttccttgatgacggagactcttagctctttttcttcactgtaagcatttcagggaatgtagccctagatattaagtgtattcttgctgctgtgtgaccatcgccacctctgggaatccaggactctcccatcttcccaaaggaagtcctcactcattaaatataactcatcctgctctccctggccctgtcattctctcttccatctctgaattgactgactaggtttctcacagaagtaggctcctacagtatctggctaagtgctcttctcagagcacccagaaatctagtcagttttaaccatcctggtgtgtggtggtatttcatcatgaactttatttgtattttatttgtttattccctgatagcaagtgatattttcatgtgctcacctgccctggccttgtctttgttaaaagtctgcctatgtcttttgatcattcttt

SEQ ID NO: 24683 - DNA, 1803 bp, Mus musculus
gggtgcccaccacacacttcagttctctcaggcagcatttgcctgtttcatttgctatatagaaaaagaaactcctatttttaccttgctgggattattggataaaaagctatttttataaatcagttattaattggattatgactatattgaggataaatttctagagaagcaacagcacatgcttgtctttcgattcggaatgttctgaaaggcggccacctgctcatggtctcctgctctctggggaggagagggctcgcctcagctgctaaaaggaaacaactgtcaagtgagcttttgacatctccagtttctgctcatgtgtgatgcagactgctacattttacactcgctagagcatcttacacagtgtactcagtaggacgtacggtaagtgagggctctgccacgcctagtctgactgcagttccatggctgcctggctatgttaactgggtggtaattttagattttttttttttagttaaaacctgttatatagagaatgtttattataaactaatataaagtgtgttctgccccactggctcagagctggtgtaaacagcaaacacctaaactgtctttcttactggcagacacctagaagttagaaccatggctgtaacgtggcggtggggcccactggtggctctcactgtcactcactctccaggctcctccccctctctgttaccactacagactcaggacagtttgaggacctcatttctgagtgtcaaggctgagatttggtttggtttgtttgggtctacttgggaagctttttcttaggaaacaggcatctgtcttcacagtggtacctaggccacctgcagatagggaacagctgtctaggggtccctgccttgggccccacggttaccccacggttacctctttagctaattcaggaatagttcaccatcaccccaaatgtcttgattctcttcagccattgagcacacctgaacagccaagtagtcagcaaaaagaatgggggctccgtttgaaccacttaaggtgcgtccaagacagcaaaataaaacccccagaacttgccagcaactcctttgaggagagaatactatttcaagcagtctttcccttacctatttacaaactgttttaacagtttaagtccggcatacaaaagcctgcacgatcagctggctctattaggtttagagcagaagtacatctctcttgtgagccctgcagagctctgccagtccccaaaatggaagcacagcccctgctgcaccagctggtggcgctctagctgggattcgaacaccatgctctaccgtgtcctttccagttgaaatcatctttcctaagcacagaactctagcctgctaaatcaaaggaatatcatgaagatcgtaagagaaccccaggcacggtgacacactcctgtaatcccaacactcaggaacctgagacaggaggcaagcctgggctacttgaccctgtcttaaaaaaaaaaagctagtaaaagagctggcacagggtcatatcctttcacctccccgtgcacagagatgcttttaagtgctccccatgaggcgagccatgctggttcatagagtccctgcccagcagatttggtgtctgccagttgcacctttgagacacctgcttgctgggcacaatggcatattcctgtaaacaagcacttaggaggctgaagcaggaggattgctgcaaggtcgagttggcctctggtgtgtagtgaaacccagtttcaaaaaaaaaaaaaaaaaatcgagcaaaactcctgctcgcctttccttggcc

SEQ ID NO: 24684 - DNA, 1108 bp, Mus musculus
agtgagttcactgattctagatggttttctcgcaccccaaaaaaatggcccaatggactctgcctagcaagtcctgaagtaggtcaggttggagaagggctaagcatggcaagccagtgggtatcttctgggtgggcgtccagagcccactgctgcccagaccagcatttgttttgtgattgcccacagcatttgggttggttctgaaagctatatcatactgaatatacacacctgttcattttagaggtgcatctaaagttggggtgcacatcttaccttcatgtgtcatctatgcagtcagggctgtcatcttctgcttctgatacattttcttcttcttggttcaggcatagatccaggtcccgatccagggaacggcgttcccgatccagagaccgtggacgcggtggtggaggtggaggtggaggtggcggaggacgggagcgtgacaggaggcggtcaagagaccgggagagatctggacgattctgagccgagccctttttaccgtgtgtctgctagacagtgttgtagttggttgacaagccagttcataatgggatttttttttttaaaaaacaacaaagatgggtttctgaataaactttgtagtgatacagtattggtgtgacttcttgtaacgtctttgcctgcaattgcttttctaaaagtgctagcccggtatccttgaacacaaatctaaatttgggtcataaaatcagagcaggtgagagagggtaaggaactgccgtagtacctttaatgaccaggagtttccctcaaggcttgtggggtctctgcctctctctgctgacacagccaatgagccaatgtcctgctataacctgatcactcagccttgggccaccaaccatacttgcaagagagcatgtcctggggtgaggtgctgcagggtcacatgacttgtgtcttctagctgggacttcagtagctatgcagtgcacgtgccctggtagactggatggctggcgtgcctttctttacatgcccaggaaatgtcccatcagcactcaacgctgtctgaggtctttctgtgtggtgtctcctgtcctaaagcacctgtgctgggagatagggtacagct

SEQ ID NO: 24685 - DNA, 2836 bp, Mus musculus
tccttagggacctttatgtcagggatagagcaaggagggacactgggtaggttcagtaaccttgagagcaatggtgaccaagactctcctgttgagcctgacatctctgagttgccacaacagccaggatgtggggcaggatggctcagggatgtgtcacgtcacacacagagctatgtgaaatcccatctgcagctttgaggtgggtggggcccacctgggcagtgtggaaactgggcagagccaacaagggtgaccgacctcctccctctccgcctctctgttcttcaggctgctccagttacagcaccactcttctaccgccgccgcctcatctggctgccagcagggcccccagctgtccccggtcccctatgtgcttgctccctgtgacagcctcctcgtgtctggaattccactgctgccaacaccccttctccaggctggcatgtcccctgtggcgtctgctgcgcatctcctggatacccacttgcacatcagtgctggcccagtggccctccccactgggcccctgccacagtgcctcaccaggctgtccccaggctgtgatccagctgggctgccacagggggactgtgagatggaggacctgacctctggccagcgggggacattcgtcctggtacagtgagggtggctctggcccacatccccccaacctcgccaccttcaccacccccccccaaccgtggccgattgactcttccaagcaataatttcggagtatgtgaagatggtttccggactcaaaagccaagaactttctagacgtgaaacaagcaatacgtttggtgtatgggctttttaggatttttgttgttgttgttttttgttttgttttctccttgcactgagtgacctcaatgataagtagggaaactttctgaagaaaaataataattgagagtatgtcacgtgggcgggcggacgggagggaagggcagtggggggagagcggcctccgaggcgtgatgagctggggcatccctgaagtgggggcagctcgtactgttgctcatgcctgtgtagtggttggcgttgtttcaggcttgggttcacagctctccacttctgaaacgcgcatgctttagacagaaactgtgaactcgctgctttctgtgtgggtttcagagtagccaaggctcagcccaggggaagacaaacggcatgcattctcggggtctcccgtcagccagaagaccgccttgtcgtggttcagcttgggggtttttgtagctgctcaagtcagtgcgccaggcttattcagaggcctggaagggaggaagttccttccggccttgtacctcgactctgctgctaattatcagatttttatgcatttcattatcagggtcccgctagaacacctgacttgggggaattgtgcaataccaaggggctgtcggcatcttggttatgactaccttgcccttggcctgggacctttcctggtaaaagcctggccccccccccaaggcctgggctctgtctggcttgctttccaggaggatcataagtataggtcagtgtttgtaaagtttctttttaaagcaaatactgtatgtgtatataaataggaaacagacactacttatttttttctattttgtatacatttttgtgtttctggcttaaaaaaacctcccttggtcacattaggaagttgtccccatgtttgtggtgaaaggcctgtaggctacccacctcctgtacagagtagaggtgtcagggaagaagtggccccacctgacaggtctacctgggcagggaaggcccaggcaacagccgtgccatccaaacacctctggaaggaaccagggatgtcaacccttctgactcgcgtctgtctctctgcctcccgggcgacttccaccaccaaatctcaccgcagcagtattaacctgaggtcattaagggagaggaaaggagacacttcaaaagccaaagattgaccgagttacctgaggccaggaagaggcagcgccgaaacctgatgtcccagcgtggtcctccgtgggccccgtggcccatcctataccgcttactctccagacaggcgaaggaccgaccagtcttctgggttggaactggtgccctccacagaacaaaccaaaaagtgtccctcctgccgactcacctgatgtgtgcatcagggaagcaagcactcagtatcctaaggcagccagccctcatctcccatagttcctgtctggataccacagatcaaaggcctgtgcactgctgtgtgtcagaatcgacaagcactttactttctggcagtttttgtgtcttctagttgctatcaaccctctgggggacagtaacatcatggtttttagttcttgggttttggggttttgttttttgggttttgtttttttttttttttttttttttttggtgtgtgtgctatgtttttgtagatcctcacggccctggactggactgtaatggaatcgcctatttaaagacactacgtgatctcagatgtatataatggttttgttttgttttcgttttttttttttttttttttactatgatggaatcgtttcatttctcatgttaatgtgagagacgtatgccaaatgattagttgatgtattttttttaatttaatatttaaataaaatatttggggggaaatcttgacttacccttggttcacctgtgagagcccattcctttgagacactgttgggaggctctacccaggcctgccacagtggcctgtggccccaaatcaacaacaggcatttcctgccttccctccttccaaatgtgctctgaattcctttacaagttctagaagaat

SEQ ID NO: 24686 - DNA, 1117 bp, Mus musculus
tgctcagctgtttagcaaatctgcagtcgagttgggactgggtgatcaggcggcaacagaaacccaagccacaggtgctttccagtggcctacttacaactcagacaggaacctctccctgcagtccgtctccttcctataagcctgcctctgcagtccccccaccagccattgccccttcatctttgcaactcccccattgtcgattgcaaagctaagatgccagcccctcttacacacaaggctttctgtttcataactatgcctagcctcacgtgtaccacaacaggaggtacttagagagatagagcgtctttctctgcgtctggtccccaacatggtggctttcctctgtagcaggggaatctaaaatggcagcttcagacttcttgactgtcatgtgggtggtttttgcctgtgtgaccagctctactgtgggtgtaggaatgagcccccaggcccagttccgcatcctcagtgtgagcccttcccgtccacagactgtgagacgctgatcagacgcatgctggtcgtggaccccgctaagcgcatcaccatagcccagatccgccagcaccggtggatgcaggccgaccccactctcctgcagcaggatgaccctgccttcgacatgcaaggctacacctccaacctgggcgactacaacgaacaggtgctagggatcatgcaggccctcggcatcgaccggcagcggactatagaggtgagcaagctgtgtggtggccggctggctgtgcctagccctcatatcctgagatgctggtgggatcgggttacttgggaaaagcagggcccttgctgtggagttaaaacagagctacagtctagtttaagcgccagcttgtctaaggatattcttgactgcccgggagtcacctggaggagtctcacagggaagcctagtggttagtgaggccgagcgggctcgtcctgaccctaccatccctgctccctagtctctgcagaacagcagctacaaccactttgccgccatttactacctcctactcgagcgcctcaaggagcatcgaagcgcccagccctcatcccggcccacccctgcacccaccagacagccccagctccgaagctcaga

SEQ ID NO: 24687 - DNA, 1232 bp, Mus musculus
ccggaggcgggtctgcgagcgcccggttgtggagcctgtcctgaggagccgagcgttggcactggtggacgggagcgcggtgaaaacccgggaccgtagggtgtccaggagctggcttggggtcgactgcgggtggactgctggcgcgcgcgcccggccgggaccggaggtcggggggcgcgtgcgtgggggctcgcactgagggaacctgggatcgagggggcgcgcgcgtgggggcgcaggctgggggttcgggatagaggagtgtgtgcgtggggactttagccgaggagatactgtatcaaggaatgagcgagtgggggtgtgagctgcgaacctgggtcggggccacactaggagcctggggctggaggaacagagggttgaggacgcacgcgtggtggcctggcggacacagtttcagtggccgggtttggcggggaatgggatcgggaccgagccggagtcggtcggtgctgagcgcactcctcgctgacccgcaggtgcggcccgaagccatggtgatcatgtcggagttcagtgcggtcccctcaggcactggccagggccagcagaagcccctccgggtgggcttttacgacgtggaacggaccctgggcaaaggcaattttgcagtggttaagctggcgcggcaccgagtcaccaaaacgcaggtgcgcgcgcgtgttgtgtgtgtgtgtgggggggggactaaaccagggggtggatccagccagggggtggccccctgtgctgattcagtcctgtggagttgattgtcacaattgtaaacgatgacattgtttagtctggtaaagggggaaaaaagctttgtattatgcttctacataatttgtacaattactagggaagagcaaagataataatgaccagcaaccgcccccttccgagagagagagagagagagagagagagagagagagagagagagagagagagagagagagagagggagagagagagagaaatagagaggggggaacacaacagaagtgagcagctccttgtaataaagctagctgaaaaatacagaggctttaatttaacttctatccctttaaaaaatgttagtggcttcttttaattttttcccccaacttcttgtgacctcttgaagacatcaaatgtttgagaaattcatttgtccaaaaaaaaagtacaaatgaagtaatgaggttacttgaagtttttccccccctttttttcttttt

SEQ ID NO: 24688 - DNA, 1191 bp, Mus musculus
tgcggctcatccagtctgtggttctagaaccagacgtcttctccaaggtggcctctgagctccagagctccttacccttgcagcgcatcctggccatgtccaagagccgcaactcccacctgcagtctgctgcccaggagctcctggaagacctccgcgccctggactgtaatgtttagatgtgctctaccaccaggagcccggtgaaaatgccagtggtccatcccctcccaggcttctaactccatgttcaaaactagatgtcactgtatgtcatgtgttagagattgcaggccttgagggactagagatggacatgatgggtcagcatcctacctcttcctcctgggagtgcacacttgttaggcagctggttaatcttgccagagcagtgaccaaaaaaatgtcacctttgaatgcatggaaactctcaaagtgttttctcagagtagcttcttgctgccccggaggctgcctgcagcatgggagtttagatcactaaacaccatggtcagtgtttcccagaagcatttctgtgatggcctgtgctcttcccctggtaactggaacccctccgcacaggcttaccaacctagccttttgtcgcttactatttcacatgcatcggacagtcgatctctgtcttggtgctgcttttatttttgaataaagctgagtcagtatcacattctcaatataatcttgggtttaggaagtggtgtcctttgtacattaactatgttatttgtctaggaaaacactttccttattttgttctggccccttcactatgaacttaaagcaaatgtgggaaggtagcttgaagatgaacactatgagattaaattccattaaatggtcatccatctgcctgcactcatgtgcctgtgcatgtgtgggctgctgttcatgcagccatgacactacgtagcttctgcttaaagatactggcagaggacaaaagacaacatgctgccctgtcacaaatagggagatgtgcggcaggagatgtccatttaagtcagcatacaccatcccttctctggcaggacaagttgctgcagggcattgagcttagacatcctgtgagggaggaagtgtccctttgcagtggcagcctcggcacacatgttgagctgcttctctgtgtgtggtgttgtagagtgagttcgttttcttgtaagaggatgt

SEQ ID NO: 24689 - DNA, 1195 bp, Mus musculus
tcaggaagtagacagcacactgggaatggcacaagtcctttgagacctcaaagcctactcccagtgaggcacctcctccaaggccatcactcctaattcttcccagatagttctaccacctggggaccaggtattcaaacatgaacctatgaaccattcccattcaggccaccatgcactccggataaaacctatgattagattttagatggcttcattgaacctcaaggacacagtgcacttataaactgagggctgcctgagtaaatgcgggcttgctattacaagggctaagacattgagttgtgaggtttctctgcctgtggtttgatacacagaagatgatgtcacagtgctactgctaaagcttccttcccattatctacggctttctgtagatgaaaacattaaacttgtcttccactttgtaaatgttctacctagatatctgagatgtaaaaatgtctagatccttgagagtaggcaatgaactcaaggtgaaatataatgtggatagcccagcatatcaacactgtattcttttgcatttcagtctaatgctgatgtccctgtataatgtgagcatcaattcaaaaggcttgaaatacatcactgagagtcctggatttatccctttgctgtggtggcttttgagtggtaaggagccctttgctatgttcttgtgtggtcatatgctctccctccacagctggaggagatatcagtgtgttaaaaagcaggagctattatcttagatgtttactctttgaaaatgacttaccagagcagcttggccagctacagtttctctgtgctggagtggcttctggggatggaagaggaatactctttcatagtggcaatgttaaaatctgggcactctcagataattggcttctccatgcctgtctctgctcctcccccaaatgacttccaattttagaaagccatctggtatgtcagtggttttatagttttttcttaaatattgtttttagtttagttgtgacctttgacacaaagatcattttatgaaacagcactgacatgcgccttctctgaaagcagaatagtagctaggtggtggatatggaagaactccagagtctagacaaagtggtgtaggagacacgagaagttccatatggatgtaacttcagagctgtaaataaataaaacttaaccttactgctgc

SEQ ID NO: 24690 - DNA, 1099 bp, Mus musculus
tggcagtaactgatctgagctcgatcctttaatattatgaatgcctttagaaaggaggtagggactcgacccaatgaataaagaatgaaggttagagtttagatcctcagtacgaatggaagtggctggcaggtgtggagtctcatgtctaatcccagcacccatgaagttccaggcatcaaggcagctcacttggttgggaggcagagatgggactcctagagcaagataactagactagccaaattgataaattctgagttcaaatgagagacccaggggagagtggctgaggaagatacctggtatcaacctctgactctacatgcacgtgtgctcacctgcaaatgtgtggacacaccaaaaatggctcttaaagaattccccagtagatggcatccataagttctcgtgctttatagctggacctccaaaggcatgccaggggcttcagtgtgggtactagggctgacctgcctgccccagcgacccatcccagccctatgtacatccctcatagcctcagctttggttatttggtctgatgcataaagagaaccctagtgggcaaacctcccctgaacatagcagagcgttaagttgtctgccttcagaaacaagcgagacagacatgggatctcttggtattgtgtgccactgtgtcctatgcagagctggtggaatggaaagcacctttgtcctaggcttcttccttcctgactcaccgcatccctaggtggggctgtcccctagcctccctgtggaggagagagtgagcactgagtatccggattcccgttttatgttcaaaacctgagctgtgaactctgaacttccatgtgcttttttgttttttgtttttttacaggttccaggacctctgtgaaggtaagaagagttgttctcacccagtacacaccccaccaagggcagcccggccaaatccaagacttcgggtcatagggaaattaatccgtgggtggccaccctcattgcgttcacctaagcaagtaccctgggaaatgcctccatgcaagaccctttgcacatactttccatccatccggtgcctgcagtgtgtgggtaacacccatgtggt

SEQ ID NO: 24691 - DNA, 1826 bp, Mus musculus
agctagagagctggaggtgaagacagggctccgacagcttgcgccactgccaagcatgtgcatggacacaccgagtggaacttgctccctttgatgtatcttaggtgtctcctgcatttcaggggccttgggaatataagccaagagccctgtgtacctggaaaggacaggcatgacacccaactaaataaactgagtaaatagcctcactttcttttgggacagaatttaagaagacagacaagagtatcctggtcagccccacaggcctctccagagtggcctttaaccctgagcagaggccactccacggagtgctgaagaccgccacgagctccccggccagcactcctctgtcgcccatgaggctaccagccaccaccccaaagagaaggccaagggctgcggacttcttctgagagccagaagccctttctgaagcctgcttttataccggatgttctataaattataacttttaaagttgggctttttaattactttacaaatacccatgagtgggacagatgttctgaacctggaccacaggccttcctgctaggcttgcagcccacggtgcacatctgcgcacaccctcactgaggactgagtgctgttggtacacggagccccctcctccatacccattgctgcaccaccactgtggattgcacgcctttctgggtggctgcagtctctgtcccttgtgaaagcatggcagcttcaggcccatctgcgggcatgtggctgtttttcctgggattgactcctgaaatggaatgagcaatagtgtagcttttctacgggtgaccagcaggaggctagacaggtgggggggtaggggaaagccacttttcccggaggcttctcctcctctgcctggcctgttcctgtccctgtcttcctacctctatagcaagcccaaagtgtcttttcaggagggccagtagcccccaggctgctgcccacattagcacagttttcccagggcctccctgactgcaccagtagggtctggaccccagctcttgcctgacctggaagttggctgcccaggagtagaagcctgttagctgcctccatgggttttatacagctcttcttgcttagtgcggaacccagggagctgctcagacttccaccaaagcaaatctggctccttctttagagagaagcctacgtggcgactgctcttatttaaggaaaccaccttgggtctgagaggtggagaggccgtgggattaagcacaataggaggcgcagctcctgcttctaccgttaggcgctgcaggcttgaagtggcaaggccctgcatctcaagcactcagagctctgtgagcttgcctactgtgcgcaggatctccccaagtatgtcctactctgtgcaccctgtgctggagccctacttttcaccccgctgcccctcgggaggactgcagctcgctcctgttgggatcgcaaagctcgggtacctgccccggctttgctccacacagtcacggggtccatttccaagtcgtcttttttgtttgtttgtttgtttgtttgtttgtttgtttgttttttccagacaggatttctctgtgtagccctggccgtcctggaactcactttgtagatcaggctggcctcgaactcagaaatcggcctgcctctgcctcccgagtgctgggattaaaggcgtgcgccaccacgtctggctccatttctaagtcttgaaccaactgactcccgaatgccattcccggaaggaaccaagtggtgactttgtcctctgcctgctcagtcacaaagtatatcactaggccataaaaatggagatgatg

SEQ ID NO: 24692 - DNA, 1509 bp, Mus musculus
ttctttcttcctcctttttaatcttactctcatccctttctctctgtcccagccttcctgcacctctctgtcttgtagtgtgaccaagttggtcaccagcccagacccccagtcttcctttatttataatgggtaggggctgaccttccaccaccttggccccctaagggatctgggacctccttttgatccctctccctgcctcaacttcctcccccccctctttctgcttctcattgtctcacactctgacaagagtgagttattatttttttcttttttacattttgtatagagacaaattcatttaaacaaacttattattattattattttttacaaaatatatatatggagttgctcccttccccccgctgcaaattcctccagcgcccccgtggggctgagtctgtgggcccgtttggccaatccggactctgtgtactgagtacacagatatgactagggctccacgtactgagtatgtggccctcgtatgtaccaagtagccagccttgggcacaccctcccctggggtcaggggacatttgggagcctccttcccctccccattccccttcctcacttcactgcattccagataagacgtgtagactcactgggaaaggggtcttgtctgctcaaagcctcaactccaggctcacctcccagagcctggctcaccttttagggcctggggtgggggggcacgtcaggggagatgtattttgtatgcattccacttctaattgtaaatacagggcagaaggtgggagtggctctccctcttcctgttgttctcttggctcagcctgcctaatagaaatgtttttaggctgtttttgtaatatggcacctggtcacagtcctttgtagctgaattcccaggtcctgcactgtacaaccctcaccttctcagttcccttaccacctaataaaggaatagttaatacccaagtgtctggtttctgtgcaaggtccaaagtgggggtttctgggcctcttcctccacagggctaacttgaactcccatcttggggcagagccatgtgctttgtcagtccacctttgactcctttttggtcaggtatctagcttcatttctgttgctttaagcaaatacctaacagaaaagaaacttaagggacagagggactttttcctaactaaatattccaggttacagtccaacattgtgaagaagaggcaggaacttaaaatagttcaccacatcacaccacagtcaagagcagagagaaagaagtgagtggatgcatgcttgcttccttgtgtcgggctgaatcattacactcttaaacagtttagaaacccttgtttggggaatgatgccacccacagtaggcagtgtcttcccacattaatttgacttaattacgacaatctcctaaagacattctttcaggtcaactcgatgtagacaacttctgttcccaggtgatttgtaagttctgtcattgtgacaaaactgatcatcatatcaggtggttt

SEQ ID NO: 24693 - DNA, 1152 bp, Mus musculus
cagggtgcataatggtggctccaatgtgctgcctgcctgatggatgtcctgcaagtagctgctttgagggagaggctcctaggaagggaaaatacaatatgtcattaaggggataattagtccttccctgtcaatagcatgtctttaggtgactcagagtttttggcgggacaaaggcagactcttggacagataattgacagactctattgggatacctttaaaaatagtctatttatgtttactttatgtgtagggtgtttcgcctgcatgtatgtctgtgcaccccgtgcatgcagtgcccacacaggccagaagaggagagggcatcagatcctctggaactggagttacagaccgttgtgaactgttatgtgggtgctgggaactgaacctgggtcttctagaagatcagccagtactcttaaccactgaaccatctcccagctccccgaattaactcttaaaaggagacagtcataagtagcatgttgggttccaccaaggattggaactagaactcagattctatttaagaagcagctttgcattaagtgggcctcaacaaactcagacactcccagctttttatggcaagttgatgtctctcctaagtagtcttagtcctgtaagactactgtaacaggcaaatgacctgggggtgggggtggggggagggcagtcattcatggttgatattagctaacttttaaaaggcaacaatagaggggccaaaggtagagagaaaaagacttgattgtggatgccaaaatgcctacaggggaagatgggatgtgcctcttataagggaggactcctgtagtccacaaggaaagctgggaagtgtagtccttcagcaggaaactcggtcccaattctgagaggatattaaaaagacgcagggcaggatgtcatagctttttcttttctttccccggaggagagtctttatcagaggggttagttctgggtccagtaaagggaaactctctggccatgttgtatgctagagtcttgattagctgtgatggatcaggccattgtcattccgcattcctgaggagagctgggaaaatatttattagaaggccacaagcagatgatttggttatagagtagagctgagagattttctgggaaggttgagggagg

SEQ ID NO: 24694 - DNA, 1186 bp, Mus musculus
tatttatagaaagatatctcattgcatttatttgcatatataatatttaagcatatgtgtaaatattctaaaactataatttgaactctgaaatagttttagtcccaattatttcaaattaggaacacagaacttgtgcttatgcagccaacgactgcatttgcagaaagcatatgcaagaacatttcccaccaccaccatccccaaccccataccagcactgtccactactgctattctctgtgtgtgcatttaggtgacccgaagaatctctgagtttgtgttctctgtccccagccctgtttatgagaagtactgcgccgaccactttgcagatggccgttgtgaccagggctgcaacactgaggaatgcggctgggatgggctggactgtgccagcgaggtcccggcccttttggcccgaggggttctggtcctcacagttcttctgcctcctgaagagttgctgcgctccagtgccgactttctgcagcgactcagcgctattctgcgcacctcactgcgcttccgcttggacgcacgtggccaggccatggtcttcccctatcaccggccaagccctggctctgaatcccgggtccgtcgtgagctgggtcctgaggtgatcgggtgagtgactgtggctcagggctgggtacagcggttagggcacccgtggtccagaccgtctgtttcacgcttcttagttgagagctctcttggcaaggcgtcttccacaggtttttccgtgtctgtcgggttgacatctttgctatggggggggggggggttcatcctctgtacactacagggagcctcgctgcagcgctgagattttactcttcaaatgcaggtgacagcaccttcttgtgtgcatgatgtgtgtgtgtaggtccccaagtgccatgacgacgcatgcctgtagaggttagaggacaacagtgtgaagtcagttctctcttctcatcaggatgtcaggcttgcatgatgagcatgttgcctgtgagccatttcgctggcttgtttgttgttttcttctcgttgtttgctttgtttgtgttttataggcactaacctgaaattcaatctgtagcccaggttggctttgaactcatggttctcctactcagcccttccaagtactaggattgcaggcatacaatatcgcccccgacactcactctct

SEQ ID NO: 24695 - DNA, 1203 bp, Mus musculus
tttggagtgtaacttagtgaaattgtgacttggctttgttgcctcctggggaggtatggcttatcttcaaaatgaggtcagtagaggaaaggttgctggaattggaggggtgggggtggggtgtcagcatttctcaagtcttgacctccattcttttctctcttttccactctcctgtttcttctcactaccaattttttctctttctgtctcctcacttcaccattagccattctggggtctgcgttgtgagcgggtggcacgctcttgccgagagctgcagtgcccagtgggtatcccatgccagcagacagcccgtggaccacgctgcgcttgtcctccggggctgtccgggccctcctgccgggtttctagggcgtcaccctcaggagctactaacgccagctgcgcctctgccccttgtctgcatgggggctcatgcctacctgtacagagtgtccctttcttccgctgtgtgtgcgctccgggctggggcggcccgcgttgtgagaccccttccgcagcccctgaggtccccgaggagccacggtgcccgcgagcggcttgccaggccaagcgaggggaccagaactgcgatcgtgagtgcaacaccccaggctgtggctgggatggcggtgactgctcactgaacgtggacgacccctggaggcagtgtgaggcactgcagtgctggcgtctcttcaacaacagccggtgtgacccggcctgcagctctccagcctgcctctatgacaactttgactgctactctggtggccgcgaccgcacctgcaagtgagccccctgactctgtccttctgtctatctatatgttgcactgtcagtgagccacatctgtcccagtttgtctgtcagtctgtttttggctcgtctgatgggctgtcccttccagctgctaccaccagggcactggtggtttcatccgcctgtttccacccatgtgcctcatctctgcctatttatatttttacctatatatcttgcccatttgcttctgtctgcctgcagttacacatcccatctgtccacacttaggacttgttcatttgtctttcttaaaattttaaaaattaaactgggtctagttgctcacacattttaatgccagcatttcagaggcatagacagcaggtctctgtagggattcaaggccagcatgatctacatagtgagttctaggcc

SEQ ID NO: 24696 - DNA, 2272 bp, Mus musculus
ggagcagcagcagcagcagcagcaggcagctgctgtggccgctgcctctgccccccaggcccagagctcccagccccagtctatgctggaccagcagagggagttggcccggaaacgagagcaggagcggaggcgcagggaggcagtgagtagggggacctggtgggaacttttgggcgggagtctaccgtggagattctgggaataaaggtcctaggacccagggagagagagagagaggcagtgagcccaggatgggtgtaagggaacagcactggagctatgcacatgcagtatggggagcaggtggagcagggtaccccaaactcagttcttcctccttcttcccctccagatggcagctacaattgacatgaatttccagagtgatcttttgtcaatatttgaagaaaatcttttttgagagcacccaggtgacttctgactttttctggcaaaaatgttgactctccatccatagtgttaggggcagccgtggaagcagcagcagccagggatgtctctgggcctggctctcctgcatgctgtgcccggggcaggcctgacgggcgggcagctgaggatcgcagagcccatctgccttacagccagccggacagacgtcctactacatgccaccccctcagaggacgtcagttcagggcacgtctcaatatgagtcaagtgccagctggacctgaggcctgcttccccgcgtgcggggcagaggcccttctctgcgccaaatgtctgactacacagtatacacaggacattgttgctgccgccaccgagactggttttctgtccctgagaacatgacgtttgtgacgtcctacccattgggagtccttcacaccccagccatcgctgcccactcccaggaggccagggcaagcctgtgtggactggagcagcaaggcactggcccaccccttgctggcactgactttgccttgaacagaccctctcccctcccccacaagcctttaattgagagccgctctttataagtgttcgcttgtgcaaaagggaatagtgccgtggaagtgtgtgtccatggcagtttggacaggggtgactgttcacacgtatggacaggcctcgcctggggagtaaggccaccaaccaaagtcagttccttcccacctgtgtttctgattttgttttgttttatttttttcctatatatatatttttttttgttgttgttgaattctattttatttttaactctcttctcctcagacacagtggcactgcttatctccaaatggtgtgatcgtctcctcagtgagcggcggctcccactgcgctgtgggtagtgtgtgactgtggctgtactgtatagtgaacatagttggcatatctttgtttgaagtttgttggtgattccaccaaactggtgtaaaaaacaaaaacaaaaaaacccacaaaccacccaaaactcacaaaaaaaatcctgcttgtattcagtttcaaactttattagtctcacttttaattataaaaccagaaagctgcaatttcttttccctctaccccttatttgttggcttctttgtttttttaatgtcaaatctgtttgtttttaccaagaaagggagagcctgaggaggtctgcaggctttggtgggctgcgaaccgaggcggaggcccccacccagtacctggtgagaccagtgtgctgcgccttccttcctattagtatttttgtttcgttttgtttttaaattggagcccctggtgaggttacatgtgccatgagaacccactctacaccatagtgctggtgcctcagtgttggccaaactctggagtcactgactggtttgactttcatgtggtaaatatgcatttggtctgtactgatcatggaataaacacatctctcttttttaatgctgctgtctccctgaaatttctttgtgaagcaactaggtattctggcttgcttaggccaggcccaggttcccatgcacctttgtgtaagatttaccaacagttgatgcagagccactctccagtggccagtcctgcctttcctgggcaggagctgcttgggctcagagttcccccacgctgaagttgtaatagggagccagataacctgtaactccctggcctgggtggtgatgaggcagtgagaccacatcctcactgaaggccctactccatcctagtcccttcttcacacaaggctgggggccgcttttcccaccgtgcttgcctctacctaactcctagtttgatttaagctcagggttaacca

SEQ ID NO: 24697 - DNA, 1876 bp, Mus musculus
ttcaaggttgctggggagggacatgcagccccactgccaaaccaggtcaggatctgggaagtgggcaagaaaaattacatggctacttgtgaactgcctacagtgcctcaacaagttccgttgccatcacggccatcctcatctttagcttccaataatgacagcagctgttgaggcaagaatagaccatatcatccaaacctttccagaaacaaaccaaagtaggttggggcgtttgtttgtttgtttggggtttgttttgtttttcttccctgaaatctggccctggcccttttttttttttttttttttttttttttaatcacagatctagcaccccaccagaaaactgcctgacataaaaagccccatttagtgggttctttctgtcttttttctttttttccttaatgtacttctgagagaactgtctcagacaccttggagcttgtcttcccctggggctaaaatgagactgtggtggtgccaagtaccttcccagattccagagtttccatattcaagggttgcttgctgccctctatctgatatgacctttgggtctcagactccctagaacatccagtgaccccccccccccaagatgctgctgctgagttcttaggccattccaagtcctctgtgtgtgtctctatcttcaagatagctccttttgccaaatgtactattttgagctgccctttggcctgtgcctgacgtattcccaatgaacttggcttggctggaattggggggaaaggagacttcttgcccagagattcccacaggacagttgggaaaactgttggcattatctttctgggaagcttttgctatcttggaccaaatggtggcctatattcccaccgtatcttggctatgtgcctcccttgcccctcccaacaccctgtctacacacgtgcatacatacagggcaactttccctgtagagtactctttgctatcatgaatcccatccctggctatgtgtgcctactgtgataggaacactcaggacctgttgaacttgaaagatctttaggcttaaaggttgtacttggtaccctggaaacacaggcagaaaggacagtgtcccacctgttcttccttgttggtagttttctgttcccgggcaatgggaggtccccttggaaagccttagtataccagctgggatcctgttggggagccagcaaggatagtggagggcttctctccttaattgccctgcccttaaacctgtctccttcattcaagtggggccgggctggggttgaaatcagtgttttaatccaagtttacaaaaatcattttactttgtacaataccatcctatgtaaagatgaaatttgtgttggagtctaagattgttatggaataaagatgacacagtgtttgaggccatctccatggaaccctttctagagagttttgtgtggggtgtctgggctggtgtgtcatgaagcacttactgtcctgtcttcttactggtaacccaacccaaggattgggctataggagctacatagggctgcctcacaacacatttcagctccactagtctcacctgggcccagagggcgcatccatttctactctgaagatgagtcccagaagactcctgcgacctttgcagttccgctgagatttcctagaacccctttgtccgctgctcttggtcctacgcctagtcttgtagaccgtaacttgaggcaggtggtgagaggcaggaagtatttttccctctgtgtaagtaagaaaacaatgttcaatgttattagacactaggaaggaagcaagcctcgctcctacccagacatctccccactcagttcagcctctggtgccacctccaaagcttcacatgtgatagagc

SEQ ID NO: 24698 - DNA, 1180 bp, Mus musculus
cttgtggcatttcctctttctcagcagcatgttattcctacagatagatatgctgtgtgttttgagtaaaggtgagatacagacattttctgtgagaatagactttaggatcctggggctgtttgtttgtctacaataatcttacctttgagttagtcaccaagccctagtgtttcagtttactctttacctaacccttagaaaccttcctccgtccttcctccctcttctctgcccttctacccacttcactgctcctctacctctgcacaataaacctctcccacgtggaaccaccaaaaaaaaaaaaagaagcctttatcccggaaacatcctgggactaagatagccaggagatttagcatctgtcaggctattcaacttctctgttgtggaggacggtagcagtccttggagatcaaggagtgggtaagcacaccttagggatctcattaatgtggcaggaagccagcgtgccctctgcttctaccatacccacaactcaacactcaggtatacagttttacatgatacagagctatcctccagggtttaggtagtgagaagaacatttagtcctggtagtgggtgtgttagtttgcatctgaggcaggttcccactaaaagtttggctagtaactcaaagagatccacctacctctgcctctcagatgtaggaagggattgattgtagacctgtaccatcatgcccagcctggttgtaattaattaattagttaatttctctctttctcctcttttctctccctctccctctcttcctctctcctccgctcttttccacagctcaaggccgtgcatgagcagcttgcagccctctcacagccccagcagaacaaaccaaagaaaaaggagaaggacaagaaggaaaagaaaaaggaaaagcacaaaaagaaagaagaagtggaggaaaataaaaaaagcaaaaccaaggaacttcctcccaaaaagacaaagaaaaataacagcagcaacagcaatgtgaggtctgtgtttcccagtttttccatctttgggagtggtgatcccaaaaaatgatttgtagggaggaagacaaccctgttggcttcagtcaccagtctgggttggtgccctatcatacgcacttagctgttccttccccctcagtttttttcccttaacgtgctttggtaactca

SEQ ID NO: 24699 - DNA, 1099 bp, Mus musculus
aattgtatagaaaaagtttaaaacaggatgagctgatgtcagaaccccaactagtatttcaaacctttccgtagctgtggttggtcagcctgtacagagattactgcagcagcagtcacttgaagcaccaccaaagcactccaaagcttgaaagactctctcctcgggagcaagtgcacacaggctctggggcttgaaggggactgctactgtcccctggggatctcccctccaatatacttgctcatcttctcgctttcttggggactgtcccatttgtacatatccctagcagacagctctacaatctgaaccccagtgaatggttaggacaagtgcttttatagttcccttcaaaagccaaggcttagtttctaagttactctctggtatgtattaagttccatgcccttttggcaaatgtgttatgtggtggtagccgttatccaggtttggtctgtgagggctagaactctttcgtgtgtacttagttggtggcctagcttctaataggtgttcatgttcttcaaaatgtgataacccactctggcctgtcttgaaaattattgaccactaaatatatgtcttttggtcttagaagaagagacaagacatctaggtcgtgaacttgatagaaaaagatgtgtgtgtgagggtagtgcccactattaactaagataagcaatataagcagctgccagtgggggcctgcaggtcacttgggaggcctgcttgagattaatggcaatagtctatagcatctaattctacagatgaaaaggtaactttttttttctttttgctatgaagagacaccatggccaaggcagcttataaaataaagtatttaattgggggacttgcttacagtttcggagtattgtgttagtccatgcacatcctaacgggggcaggggggtatgttggcaagcaggtatggcgttggaacagtggctaagagtttatattctgatcaacagagagaatgaaactccccaggcctggtgtatatacttttgaaacctcaaagcccttccctattgacactttttctaacaaggccacactttctaatccttcctaaacagtctaccaacta

SEQ ID NO: 24700 - DNA, 1180 bp, Mus musculus
cttaacttgattttttttttcctgtactacttccatcttctctcttactagtgggtccttgatttttgtgggttactatgtggaaggtaggtagtattagtattaagtagcaacattatttctagcagtcatagctcttagtaaagtgatttttgtttgctactgttttctgcttttaacagttgtcatttaaaatggtatagggtttatttcaacccttactcatgcaggaagttaccaagaaggtatcagtttaagtccaagcaccccctcccccccaactgacttgattagattgtctgcacagtaaaaacaggcattggctgaggactccctgaaggtgcttgactgggtggcttttggctttttttttttttttttggatttttgagattgggtttttctgtgtagctctagctgtcctggaactcactttgtagaccaggctgacctcgaactcagaaatctgccaacctctgctgggattaaaggtgtgtaccaccacgcccggctagctgggtggcttttaagtggtgtctggaagccaagactctactgaggagcttcattgacttgaaaggcatctgtgaaggactggccctctgtgtttgtgttgaatgtgagcatttcattctagacactatcagctgttactgacggctcttctggctctggattactagtcacacccacctttgtaaactgagacctatagtctttgtaagtctgacattaattttgtgttacttccctctccatcctgtatagttggagttcatgatgagaagtaaggcaaggagaggagagagattgcctttcttggagtcacttaagagaccaggggcaggaggctaagctggtcaaggttcagttcccagcacccacattgggattcacagccatttatggctctagtttcagaggatctgatgcccttgttggggcctttgaaggtaccaggcacacatgtgatacctagatgcagacaaaaatattcatatacataaatgaaatatttttaagagcctaaaaattaacccatataacatgttctaaaattcagcttcacactgcctttaatctcagcacttgtgagggagaggcaaatatctctgagtttggggccagcctagtctacatagtctcattatagatagatagtcagagctacataatgaga

SEQ ID NO: 24701 - DNA, 1183 bp, Mus musculus
cccacttggcaagccttaggctagtgagagatcatgtcaaaaaagcccaaccaaaaggtgggttgatcccaaagaaagacataacagttatcctctggccaccatgctgtgtgtgcgcgcgcgcacacacacacacacacacacacagacagacagagactataaatatatggtaaccgtttcctgtattcctgcttgggtcacaaagctgtgttcaaggcctacttattccccacataactgtgataggaagctggcagcattgagcctgagctaagccttctggtgcaaaaatggttgtttagaaactgttgaggaccacatgtgcccaaacacactctgtgttcctgtgggcaaacagacagcaggggatctggtggcttttggcatttgtgctacaacatacttctctgaatgatttttaaagagataaaatggattggaattgtggtaggtttaaagatgtgggcagggaggaaggtagggaagccaccccccccttttgttttttgtttgtttgttttttgatttcaagacagagtttcttggtgtaacagccttgactgtcctggaatttgatttgtagaccaggctggcctcgagctcatggcgatccacctgcctctgtctccctagtgttggtattaaaggcatgcatgcaccaccattgcctggccagtggacattttttttttaaagatttatttatttattatatgtaagtacactgtagttgtcttcagacactccagaagagggcgtcagatctcgttacggatggttgtgagccaccatgtggttgctgggatttgaactctggacctttgaaagagcagtcgggtgctcttacccactgagccatctcaccagcacccatttttttttttaagttgttctctttaagtagtcagatgtcagaatgagggcatcagacattgagaggtcattgaatctctctgcctggcttgctaaggggtctcttgtgtttgattgttttggagggcagagtcctgttatattgcccaagttggtcttaaaatgatagttctacctcagccttctgaatagtgagaactataggtgcctaccactctatgcatggccttgttgcacgttgattagggccttttgtcctgtgtctttcacagggtacagtataataattagccattggatgcttatt

SEQ ID NO: 24702 - DNA, 1146 bp, Mus musculus
gccagcctggtctacaaagtgagttccaggacagccagggctacatagaaaaatcctgtctcagaaaaaaagaaaaaaaaaaaaaaaagaatttggaaagtttaggatgtattttaaagttgcaggttcttttgctgggtggtggtagtgcactcacggccttagtcttagtacttgggaggcagagttaggcggacctctgagtttcagcacagggctatacagctttgaaaaaaactaaaaccagccactctgccccctccatttttcttttaatcttatttttatttcttttttcttttttcctttttttttttttcttttggtttttcgagacagggtttctctgtgtagccctggctgtcctggaactcactctgtagaccaggctggcctcgaactcagaaatccgcctgcctctgccttccaagtgctgggatttaaaggtgtgtgccaccacgcccggctgttatttttatttcttttcagttttctccctatactttcatagcaaaattgaattggaccctcaattaagggtgggttttaagagccttgcacatactaggcaggtactctaccatatatccctcactatatggagtttttatttataattgtgagagaatatgtgactgttggtgcacaagtggaagtcagaggactacttttttagacttggttcttcattctcttttatgtaggctctggcaatctcttgtctagtctaaagctctttgatctgctgaacactggctctggttgcatttttgtttttgagacaaatgacctgagtaaccctggatgcttttgaaatccctggtcagccctgcttttgcctcccaattattgggattactgttgtgcaccagcctggctagtttcttttgttttgccaaattactatacaggtgaacctttggtaaagttaagtacttaaagcaccgtgtaagtctaccataatttctagttgtggatgtggttttcagatttttctctttcatctctaggaataagaccactagatcaaaaagtgtgtatttgaaatccttccattgttactcttctagaaagactacatacatttccatttttgtctgaatttagcagtgtcttatttatactagtgaggttttaacattttct

SEQ ID NO: 24703 - DNA, 1748 bp, Mus musculus
aatgatttttttcttccctgtttcaagggatatgttatatatcatgtgttctttttattttataagatgtactagggtgtgtattatttggtggaaagattgggccatttccttcccaatgtacctcaaggattgatgctatacagtagatggcttcctacctctgttagaatacaaaaagaggtaaaccattttcccaagtggcctttgatggctatctgtgcactgcagttagaataataaaagtagatcttcctggtaattgttaagtcctaaaacggacagaatgtgaggatttttttgtgtgtgtgttatgtttttgtttggttggtctttgtttcgttttatttgctttttctcctggaaagcaatttgttacaaatataacttgtttgagggggaaaaaattaattatttaggggaattcccttattcacatatgaatttattcataaattatgcatggttgatgtgggacacacacgattcaaccatccatgtgtgcgagagctcagattgtgccccctaccaataacagtcctgcctgtttcaataaacatcagaccaattttttgtttgttttgtttttggttggttggtttttcgagacagggtttctctctgtagccctgactgtcctggaactcactctgtagaccaggcaggcctcaaactcagaaatctacctgcctctgcctcccaagtgctgggattaaaggcatgcgccaccatgcccggctcatcagacctttttttaaggcctttattttagctttggcattgagatagcatcttgcttggaccaagcttgcctttgaattcaatcctcctatctcagtctctggagtactaggaccatgtgtgtacagccaagctcagctgggctttggttttataatacactgtattctatgttcctcacctgatgtggcagcatcctgttaactaaaggcataacaagatggtgaccttggcctgtgtataagattgtcagagctgttccataggaagcatgcctacctgggcctctagagtgaagacactgccgaaggcattcgttctctctgttcagtgcttgctaatcagtttgatgtttgtgttccacctctatttgtgcaggattatgggtttttgttttgttttctcttaattttgttatttccacctaaaagtacttaggaaaaaaacctgaaattactcattgatgaaaaacaaatgtaaacttccgtagatgggatctatctgtaaaaagctcacacagttacgtaaagatgtttcattttaagcaaatagtattcctttggcagttctgagtctgagaaagggaggctcagcatgtctgtaaagtagcatgtactaggttttatagggtcagtatgatgggttttcctcccttttgaagttacaatactgtgtccattaactgtacacagatcacatcttggaaatatcaaccagtgaagaattataaaagaggcaataaaatattgcagggattaaatcagcactctgtgaaggagcattactagggggtaggagatgcactttgggaatatcctcgaaacaagcaataaactgatgccacgaagacatttgtgttcattaattactgctgtttagagtgtgtgtgtgtgtgtgtgtgtgtgtgtgtgtgtgtgtgtgtgtgtgtgtgtgtgtgtgtttgatctgagaaacccagggcctcctggcaagcaactcttacatttacatgaatatgccacccagaa

SEQ ID NO: 24704 - DNA, 1205 bp, Mus musculus
agtcaaaccatgtaaaccgttaaactctgtagtccaggtaggccttccactttaatgtcctggagttacatggcctgtgccactaagtccagtacttactatagtttctatgtaagcagatcaggtttcaaacagcaaataaggtgtgggtgatcagatcgaatcctagttccttgcatgcctgtccagactgactggaattacgcccaaggtcacttacagacactaggactagttattggtgaatctgaacctcagctgggtttgttggattcctagagcagcctcaccagccctgtctgccctgcccatagcttatgatggagcagtccaagaagtcctcgcttatggtggcccgcagtattctcaacaacaagctcattagcaagaagctggagcgatatctgaaggtgaggcaaaggcgaaagcactgtcctagtcctgacctttgtgtgagcctggtccccattctatcccagtgattcctacctcccattaaagtctctatccatctctacagggcgagaatcctttcactgacaacccagaggaggaaaaggaacaagacgaggtggaggctggcgctctggatgaaggggcaccaagcgaagcgacagagctcacagagggcgtgccggcacagccccccgtgcccctggagcccgccccagggactacaacaccgccacctccgccaccaccagaagaggaggagagccctgtacccttgctgggcggagcgctgcagtgtcagatccgcgggatcccgggcctcgacatggaagacgacgaggagggcggtgggggtccataacccttacccggcagggctcccgtggccgaggctggaagtccagcctaataaagtgctttcccatctgaggtcttcgtttgtgctgtggtgagggcgggcccctagaagtgcgcctgcgcgcgggtaaacgcgctagaaccgctcacgcgtgcgcggacctggacgctcttgcgcactagcttacccttgaggcacaactcccgagatgctgtagatttgcaacccggaaggctgggcggatcggcgggggcgggcccatttgagcaaccaatggtagcgcccagaaagagacgtacgctcttcgtcttccagtagcagacagcacgttgaacgcatgcgttctgagcgaatctaagacaaggatctgctggcgggtcgcgtcgcagacatg

SEQ ID NO: 24705 - DNA, 1205 bp, Mus musculus; identical to SEQ ID NO: 24704

SEQ ID NO: 24706 - DNA, 1170 bp, Mus musculus
caactacctgtagccctcttttggcttccaggaacacctgcattcacatgtacacacacacacacacacacacacacacacacacacacacacacacacactttaaatatttgaaaacaacattaacaaatccttttgtgaagtaaaagatacatcaagaaggtgaaaaaaaaaaaaaaagccaggcatagtggtgtatgcctttaaatctagtacttggtaacatgaggcaggtgggtttgggcagacttgtctacatggcaaattcaggaatagccagagctatataatgagaccctctctggaaaaaaatgaagtggaaaactccacagagtaggaaaaatacttgcaaatctgagacctgtgtctcaaatctaaaagaattataagatgggagatatagcttagtagagtgctagcttagcatggacaaggtcctaagttcagccctcagcaatgtaaattgagggttgaagttaagaccctcagtttaaaaatattaaaaagcaatatgaaaaactttaataattttagaagacaacacaattttttaaatactccaggaatctgaatagactttcccccaagaatagcactttttactcagtaggacagctagactaagcgttcgatagttaaacatagctaaagggctggggtagagctaggctggcgtgcttgcagagcacgcagaaggccgtgactctgtctctaacataaactgggcaggaagagcaggggttcaggtgcacagagaagtcatcaggctggagaaatggctcagccattgaaggctaggctcatagccatatatagtatatgtagtgtgtgtatgtttgtatacttgactgtgaatgtgcacatatgcataagagctaagattttggtatctgtcctcatcattccccacctattattttgacccaggatctctcactgaaactgaagctcatcaatttagctagaatggctcatcaaagaggtttaggaatctacctgtctctgtgtccctgagacccgagatggttataggtgtaagaaacaaagactggctgtttccacagtgttatgcaatgtgactagctgtctcaaactcttactaccatggttcttcaccatgatggactgtacctttgaattgtaacctaaaataaaatgtaccttctttaa

SEQ ID NO: 24707 - DNA, 1356 bp, Mus musculus
aaaccggcgcctcttggaggccgggcacactacaacctgggcactgggagccagctagccacccttcccccagcttaaggactctggggccacaagggtatccttgagcctacctggttggtctcataggggcagtagccgggcccttggtggtgaccaatctgattgcaggggagaacagcacttccctgtgtctagcaaccaggcagggctacatctgccatccgtggccatttgcaaagaccccaaagaccccctgttccctcttgccccatcaatatctattttcacgcacaggcaaacacacacacacatgcacctcgtgagacctgggatctgccctagccccctcagttcccaagtcaaacgaccacaacatgccacggtgcttgctcaggggaatccatgctccctctgctatcttcctagggcttgggagctcccactgagcccacaatgccacggaaattcttgttggctgccccctcccccccaaaagggtccttcctagcttggaagagctcaaagctgacagctgcctcctgccttgtcagagcctcaggggctccagggctgggagggtagagtgaggggtgggactctcctcccccacccctgctgccctcccccttttcactgttgctttctatgtatagctccctagatctttcacttttttaaaaaatgcgttttgtgtagagaataaggaacgtggatctttttattttgcaatcctgggccagctagataccgggagctaattgaccttttaaccttttcagtggccaccttttggttatcaatgtacctagaaatatgtaaattagattaaatttctcttctggaaatatcccagggcaaacagccagtgtgtttttttctgtgaagtggacaggctggcactggttagcagctggagctcggagctggggatcagggttgtgcctggcagaaggccctggttttcctctgttagccaccaaagagaccggacacagttggggataggtccaagttctcagctgttggccggtggtactgtggctcgtgaagggttctggttggctggcctgggaagggagccaagacagaaaggctggttgggtttaaccagccacaataacatgcctacaggagtgattcttgccttggtgcttttacaaacccttgaagggattgggtagaagcacacatctgctgggagcttgggtgggaatgaggttcagaaatgagactcggctgtcttaagataggactttaaatgtaatactggggacctcttcccaggccttgaacataccaggcaggtgctctgccattgagctgtaccttgctagctctgagataaatgtcaga

SEQ ID NO: 24708 - DNA, 1183 bp, Mus musculus
cagaccctcctgccttcatcccttagggccgaccaaggtggcggccgtgaaccccctccccctgtgttttgtctccgcagctttagatagtgacgggggcagagagctggactgccagctgtgtggtgcctggtttgagacccgcaagggcctgtccagccacgcccgtgcccatctgcgccacctgggcgtcagcgacccggatgccaagggatcccccatagacgtgctccacgggctcatcaggagggacggcatccagatccgcctcccacccgggcggggagccctggcccagctggggcggcctccttccgcctccacagccctctccttgctccctcccccaccgccggccaagaaggccaagctgaaggcctcgggtatggccagtccctgggggaagcaggatctctcggccgccggcattttctgggcctctgatgtggagccgtctcctctcaacctctgtaggttctcacttcagctgcccttcctccctgtgggccctggagcccctccctggggggtcatggccccctccctactccctccctgttgtagtagggagtagacaggggcccttggcagtgggctggctcaacccagagattttgttggcggtgggctgctggtacctctctcttggccttgacctttatcaccatgaccctgcctgagaataaaggccaaggggaaggtcctgccttttggtgtggaaggtgtcctgggtctagacagtatgtggcacctaggctggcttcgtcctgtctcctgccctgttttattgggacccacaaagctgtggatttgtattggtactgctctgccagggcagaggtcctgttagctctctggccccacccctcagctcccttacttacactgccatcaactatcgccctagcttatggacacactgctgcccatacctagctggccaggatactccaacaggtgactatccagatgatgtccataattctaactgaccctttttcttcctgctgcagcttcaggcccagagccaacaagagatatccgctgtgagttctgtggtgagttctttgagaacagaaagggcttgtctagccatgcacgctcccacctgcgccagatgggtgtaactgagtggtatgtgaacggctcacccatcgacacacttcgggagatcctgaagaga

SEQ ID NO: 24709 - DNA, 1195 bp, Mus musculus
gtgtgctgtagatggtgttttaaaatactgaacaatcaaaccttaatttgtatattaatagtcaatgccatatctctgagctcgcaattgcttaaattgttcatccctcagatactattaattctcaaatttacaattgcttatgcatatttctagttaataaataaattatgcacatgtaactcttaataactttgcaagccttctagttacaactgctccttaagaaaattgattaaaagtgcaattagtcactgcccctttacagccaagtatttaaaatgttttgtcaactagttattaattcaaaagtttaggtattgtaaaattttaaaactttaacttcttaaaagacaaaaaagagagaaattgtatccccgtgcatactatttagtgcattcccattcacactatctaagtcttacctttattttcaaaatctaatattttaatgtcaaagagtttaataaaggctttatagtatcttaaagggatctacttattggcttatagattgatcctaaaacagctaccttattagaaaagggaaaaacaggttttctccacagaacgcttcagaaacatattaattcgtgtgatgagctggtaggtaagttgactcatgtcctgattaaattgactaaaaaactaaattaaattcatgttttagatccatccttacttgtcatttttccagtttagactagcttctagccttttaactttatgacaatagtacatcagagactgtatattcagacttagtaaaattagtcatttaatagagtcataatgatttttctcctttcttcagtgtgaccagccattctaactcaatcttagactggtcctaatattcagtccaatgttagagattcctatattctaaattacctagcaagttaattcagagcacatcctccacttcccctagatccctaacctcagaaggattactggccttacagctagtggaaaaggctattgaagaacagtttgtcacttacatagattactccctgccgctgcacctgttaatttttaatacgactcatgtgcctacgggattgctatggcaaaaatttcctataatgtggatacattcgaggatttctcccaaacgtaatatcttgccatatcatgaagcagtggctcagatgattatcactggaaaaaggcaggcattgacttattt

SEQ ID NO: 24710 - DNA, 1149 bp, Mus musculus
aggatcaaaaacatttccagggaagagcggacgtttctgggacgcattactcctgagaaaaggtgccggacttgggacacacggaaggcccctactgaacagtggaagctctgttacagctggggtggctctgcaggcaggcctgatttcccagttactacgctacatacctgtgcttcagtctaggccaacgcagactataaacagatcctatctgcctctctcctgcctgattctctgtctctccgtagccctgggtgtcccttttccttcctgtgttctagtcctctaagtcaccatctctgtccagtgaccatggagggccacctctgtctcctgggcctcaggatctcacttctggcctatctttcttgcaggatgctacagctgggcctgtcctggctgggactggggcctggagctgccttcccatggcaacttctgcagttggttggggcctccttgttcctggctcgaattctgacctggatttgtgccttctatgacaactactgccgtctccgctgcttccccgagcccccttcgcggcactggttttggggtcacatgagcatggtgagtgtggcagcaggtaggtctggtgtgtcaggaaaggctcttaggaacctgggagtcgtgagagggtggagaggtgagggagggaggctgagtgagtctctatctagtcacatacccggcatatctactcctggcctctgtctacaccacgttttgaggcttttttcttttttgccctttctcgttcccagctaacttcggatcacattctgataagaactcatgttttaagatctctttctgttgcttgttcagtcctgttctgtgttgttagtgccccccaccccaccccaccccaggataggttgagggagcagagctctccccctcaatgtgctatttcacttaacgttgttggagttgagcctttctagtggaataaattgggtatgctcctttcttagcccatctctgctggccagagtctcttgagggacagcgatgctgaatggcagaagttgacatccctcctctccaatttttaaaattctttctctctctctctctctctctctctctttctttctttcctttcttccttccttcttcttctttctttttttaaatgag

SEQ ID NO: 24711 - DNA, 1154 bp, Mus musculus
atcatttatctattatgtatccctgtgccatttatttatctattaagtatcacatttataaatcatttgtgtattcatatttgtccagttatctatttatccatccattccatccatccacccatccaggaaatagaggttggagagatggctcaatggttaagagcatttcctgctggcttcagtgcctagcattcacatcagacaactgacaacgacctggaactgtacttccaggggatgcaacaccttctcctggcttccataaacctctgcataaaatatgtaggcacacacgtacacaaataataaatcaataaatcttaaaaagcagagataagggaataggcttcggagagatatgaaaatagatacatggatataaaaagtgatgtgcacagtttaacccacgttgattcagcaagagccataagtgaacgagacggaagagttggagtggtatgggactagattggtaagagagtgggaccctctgagacatcctctcaggatgaaactcaaccttctccatctccaggtcaagaacaacgaggaaggcctgcagttgttgactgaaaggagccaccaattccatgatgtccacctctgttggattgggcccttctaccccatcctgaggcttatccaccccaagtttattggccccatactccaggcctcaggtatttatttctccaaggatcactgtctgttctcttacttttgtcccagctcttcctatccctgcacaggtcaggctgggcaggggaggatggagccaatctaatagaatccactgccactaacctgactgaccctggacaaagtttcaagtttctctagaagagaggtctgttcaattgtgaatcatggaaactcaaccaggtgtggtcttagcaaagaaagaaaatcttctggtgtggggtgtatctttgtggtaaggcatttgtctgccacatataaggccttaggctgcatttctctctagttcttgttctctctctctctgtctctgtctctctgtctctccctccctccctccctccctccctccctccctccctccctctttctttctttctttctttctttctttctttctttctttctttctttctttctttctttctctctctctctctgcctctctctct

SEQ ID NO: 24712 - DNA, 1133 bp, Mus musculus
gcattcaaacatgtgggtggtctgcacatacacggtgtgaatcgagggtcttgttttgtcttcaggatgaacatggaaaggagctgtcagatgaggacatccgggcagaggctgacacctttatgtttggaggtgagagtccctgtgtagggctacagaggaggtagaggtgtgccagtctcaagtaagtattttggagagacctagactccctcccttctttctttccattcattcctttttgtagtcattctgtctggatacaagtgccccattttgctgaaacaggccagggacacaaccctgcttgtctctctacccttcaggccatgacaccacagccagtgcactctcctggatcctgtacaacctggcgaggcaccccgaataccaggagcgctgccggcaggaggttcaggagctgctgagggaccgagagcctgaggagattgaatggtgagcatgatagtctctgctcttggagcttctggtcaccacattcgttgctgcatttcttacagggtgtgtctgtgtagctcaggctggattacagagtcttaaccccatgcttttagggattatatacccagtttggaaatcttcctttagataattatgtctcacatagctagttaggttttgttatggagttttcaaaccgaatttgattcttgattctcctccttccatcttgtgaatttccttctggcttttgcttgattttcttttttatagtttatagacacatcttttttaatcctttgtaatcccaccttatagtcttttctactttttagcaacattttgtacatttcaagataccagggctgctcttccagaggtcctgatatcaattctgagaaaccacatggtggctcacaaccctctgtagtgagatctgccttcttctggtgtgtcagcaacagcatcttcatatacattaaacaaacaaacaaacaaaaaaataaataagtaagtaaataagtaaatatatctatcttaaaacaaagtaccaaggggaaagaaaatattttgacagtctcacaatgaagaaatgaatagataatttcattaacttatagtttcagtgtttctgatatattgagaaaatctaccttatatttggagtggcc

SEQ ID NO: 24713 - DNA, 1171 bp, Mus musculus
tatatacatgggtgcagtgccatcttctttggcatgactagcctctcccttacccagcaggcatcagttgccaatagctactcaggagtgggcctttctgcacacctcccacctccatgctgtcatttttgtctcgcttgtatttccagtcacagctgttgtcagttagtaggtgcaactgtcctgttgtatctagcacacactgtttggctgtaataattcactctggctctcacattctttcggctccctcatctgtaatgatccctggtcctctgagagaagaaatgtgatgtgtgtagatgctccatttagaactgagccctccagaatcacttattttctacatgttgaccagttgtgaatctattcattataatctactgcaaaaacagtaataaaacccatcttctgtgatgaagatacatttttctatgggtataaagataccctttaacagaataatagtaggttagtagaaagttctccacattaatgctgccagacttgggttttatcttgtgggttgtgtgaaataggcctgaaatccagtcacagtggttggttattcttgccgtactcatggctgtgtcttgtcagactgatctgtaattgtagctcagaggcttctcagctgggtaaacacagcatcatctagcactatgaaagctagccagtaggctgaactctctaggtcagtataagctatgatttcttaatactctgtgactcaatgtgtggtgtcttcagtaataaggtcttactgtcaagttctgtgtggtaaccaaggacaatcgcaatagcctataatatttggagggggaggtctatgaaacctccaacttttggcctaattttgatatttcatatatgtcttgaaattctccttgatttcttagtttattgtaatataagttttcaaagtgtcctcaaatcattctctggatttcattttctgtgtattgtaatctctcttttcagctctaactttattcatatgaataaatgtataaaagaaagcataagataataaacaatgaagtacttaattaaagtttgtaactattatgactgcctgaaagttgtatatggagcagctacagggttgaagttttttgagtggtcaccccttctcagtgtactttttggtgatgcaactgactttgagtca

SEQ ID NO: 24714 - DNA, 2528 bp, Mus musculus
ccagttctctcacatcatttgagaactatgaaagtacttacactgtagagagaatctataaaactgagcgttgtgacgaagactatagatatggccaaaatgttgaaaagactttcactgaagaaaagccctttgagtgtaagcagtgtgggaagtgtttcagttcctccaggtattttcgaaggcacgaacgacgtcatcgggccaagaaatgctatatctgtaagcagtgtgggaaagcctttgcttttcccacttacctacaaacacacgaaagaattcacacgggggagaaaccgtacgtgtgcttgcagtgtgggaaaaccttcgctcattctcgttcccttaaaacacataaaagaactcactcggttagggacctctttgtgtgcaattactgtgggaaaaccttacgtcattacagctctcttcaaattcatacaagaattcacacgggagagaaaccttatgtgtgtaaaccgtgtggtaaagccttcattacttaccgctcctttcgaatacatgaaagaattcacactggagaaacaccttatgaatgtaagcagtgtggcaacaccttcatgcgttggattcagttgcgaaagcatgaaataattcacagtggggtgaagccctatgcttgtaagctgtgtggaaaaagcttcacttgttctgggtccttgagaacacatgaaaggattcacactggggagagaccctatgtgtgtgaccagtgtggatatagctttactcggttaaattcgcttttaaggcataaaataacccacaccggtgagaagccctacgtgtgtaatcattgtgggaagactttccctcgatctgcgtctcttcaaagacatgtcaaaattcacaccgaggagaaaccctatgtatgcaaacagtgtggcgttgccttccctagttctgctgacctcttagaacacgagcaaacccatattgacgagaaaccgtacatatgtgagcagtgcggcaacgccttcgtgctgtggagtcagtttcagaagcataaagcccttcacgccgtcccagtgtcctacgtgtgtaagcagtgtgggaagagcttcacttcctcgaggtccctgaaaacccacgagagaatccacacgggtgagaagccttacgagtgcaagcagtgtgggaagaccttcctgtggtcctactccctacagagacatgaaaagactcacacggacgggaaggtccacgtgtgtaagcagtgcggggaaactttcccttacgacagtcatctccaggtgcatgagaaactgcactttgacgatgagccttttaattgtaagtactgtgggaagcccttcttcactctgaaccatttgcatagacatgaattacttcacactaccctggattccagtgttttttagtcatgggaggatttttttcccccgctttgtggttttcatagaaataagagaaatcatactggaaaaagactggatttgtgctagcaatgtggaaaaccttttgatttgtttcattgaaacaaacgtgcgatgtcacaatgaggagaaacctttttttaaaacgaaaatcaatgtacaaatggttttctgagcttaaagctccttggaatgcatcaaagagaaacgggcctgtgactgcgagcagtgtggtcgagtcatctgcagtcctggatcttggaggagacaggagaaaactcaagctgtagagaaacttttatgtgtatatgtggtgttgtattaaaaaaaagccctttctgcttccccattccctctgaatatgtggaaggagtcactggagagaaacccttcatagctaggcaatcttggatagtcttgagttatcacatcctcttacagacatgaaagaacctactgtagagaaatcttaaaaacgggatttgtgaactcttcattatcagcttcatagaactaacaagaatgtacgtggggagaattcctattagtggaaacctctatgaacaccatttggttcaatgaacagacaaggaaagaacttgatccggagtgctaatcttctcaaaagagatgttcaaggtttcatttggcacagatggtaacacatatcggatgaaaacttttgctgttgaaaaacattggaaaatctagagcaaagtcctttgaaatttttttcatgtttaatctgataaatgtcagtattatgaaggactggacatattttattttattattttttttttgtagcatgctccaggaaatgcacactctggtgagaatgttatcagtacagtattttgtatttattgaaatgtttcaggggctgatagggatgagttagcctttaagagcatcttctgctccttccaaaggacattgagttggcctttaagagcatttgctttttagcaccacgtcacagggctcacaactgcatgtgactctagttacaggagacacacttgtacacataaaaataaagcttaaatatttttctagtctttttttttccaaaaaaaaaaaaacttttgttgtatatcatgtttaccc

SEQ ID NO: 24715 - DNA, 1099 bp, Mus musculus
atctgatgagcacttaaaacattccaagaattctgagagaaaagtgacattataaaagtagcatgtgattgacatcagttgttgggaaagctacttccttctttacagttgaggtgggggaggactccatctgaagagcagttgcagatgccaggagaattagaattgttttcttctacatctgtaagcctatgcagtgttaggacagctggtgttgactgtgttttggtgcgttcgataatcagaattagctgtaaatgctgcagtgaacgaatgtacaaggagagcttaacacaatacattggaacagagatggtcctatcctgctggtgctttaccagatggctccaatctgctgtgagaactattgtgtgaaagactcttagtgtgtgtgaaagctaagggtatgatggccaggacatgactgacacaaagagcattgtatcctattaacttcttaggagttaagattagatctccagttctgtgagactcacatttccttgtggaaatgtgtatgggctctttcaggagtcagtggcctttgaggatgtggctgtgaacttctccctggaggagtgggctatgttgaatccatcccagaagaacctctacaaagatgtgatgcaggaaaccttgaggaacctggcttctataggtaagtatgccatcatccctttaatcggtgaaagaaagcatgcttctagatgagtttaaatatggtaaagaggtttgaatgactacttgagatccaccttatactgcaaattttgctataatctattaatgtatttactatgatgtcataatttataatgattcgactttaattgtattttagggagcagtttggagcaccatatcattgaaaatatataccgaaactcctggaaaaaactaaggtaatacggacctcaagagacagccatactctttataaagtagtaaaaaacacaggcatatccagtttcaaactcaactaccctcagggaattttcttcaacactagaaacattaaacatcctgaaaatgttataaggattccaatactggaaataacgtgagcatcattgtgcccaaagtgatttttgtcatactt

SEQ ID NO: 24716 - DNA, 1172 bp, Mus musculus
tgccatgtaacccagactgtcctcgaaccaattataaatcgtcttgtttcaacctctagatggtgggggtgaaagctgtctgcttccacatccagcatcagtcgttcatactccctctacccctttgatttctgcagacatggtttctctgtgtcgtacgggccatcctagaactctagatcaggcaggtctcgaactcaagagattcacctgtctctgctaccctagtgattgggttaaaggtgtgtaccaccaccacccagcattttttaaagatttatttattttttatttatatgagtacattgcagctgtcttcaaacacacactagaagagggcatctgatcccattacagatggttgtgagccaccatgtggttgctgggaactgaactcaggacctctgacagagcagtcagtgctctttactgccatctctccagcccccgcccagtattcttacagaaacctttctggactccatgcttcacatttttgctttagaatattatctctattttagttaatttttaaaattgtgtgtagatgcgtgtgtctgtacggatctgtgcacatccatgtagttcctgaagagggtgtgtcagagcccctggggctggagttaatggctgtgagctgtcccataggtgtgctagaacccatgttcgctgccagacttctgttcaaggaatggcactacgccgtttctctcgcccctagaaaatgatcttgacactgtttgagatggaggattacgtaagtacaggagatggaaacaagaaaagaccttagaaggaattacaaacaaaaagtgtactatcattacagtgattttcatttttatctttttgtatcaaatcaggtagtttttttctttcactttaagttatatacattcactggtgagttgataattacttgttaaatgccaggaaacataaaaagtgagttgttttcaagcctttgagattaatgagtggaggaaaaatgactttttgtggatattgagatttttttcttgccattttctttttaagactgtcattctcttctatgaacaagaaacttttatacttttttgttaacttttctctctacctgatgtttttttctaacatttcttgtcgccatgccctttacacaactttcaaaacacttttaggttatcaaa

SEQ ID NO: 24717 - DNA, 1219 bp, Mus musculus
gtaccaattcatagtagagcagaaaaggatgctagtaaataacatgagaaactctgtggtagttctcactaagtcaaactgcatgaagtaggttattgctagcaatgtggggaagtgtcagacaaatttgagaagaccatatacttttgaattgatgtaggtattactactagaaattctcttctaatatatgggagcagacactggagaaatgctgcaagccacgtgatgaaatcctcagcgttcttttcattgtggagaagatgtgaaatagctcacactggagaaaaaccttatgcaggccatgtggaaagcccttagttctcagggggccctcgagacatggtagttgtcattcagagagaaatccttcatatataatgtggtgatttgaataaggatgctccaaatatgcttatatatttgaatgtttattaaccagggagtggaattgttttgaaaggcttataagaattaaaaggcatggccttttttagagtagatgtgaacttttcagaggtgtgaggtgtaagacttggcggtggacttggaggtttcaaaagcctgtgcaagatccagtttctcggtctttgtgtctgtttttgtggatcaggatgtagctctcagcgactgcgtaagttcccagacatgatgctaatggtctgcatctctgaaactgtaagcaagcccccaattaaatgccttctcttgtaagtgttcctttgtcatggtgtctcttcacagcaatagaacagtgtctaagacatagaatcttacacaactttcagtcatcttaaggagacatgaaataactcactgtggggtagcctaacctacaggatttgtaaagtctccattattactttgttagtacttcaaaaggatgcatcgagaaaacccctagcattggaaagcatgtggggagatttctggattcaactcaaaaattaagaaatagcaaagtttgagaaacaagtttgattaaaagagatacttgattttggtcagacagtctcatccaccaagtctgtgtgccccctctggtgaagttgtccccaggtgtggtggctcaggcatgtgtcctacttgggaagcttgtgagaaggattccaagtttcagagctgtctgggtgtattgaggtcctggtattcccagggaaactgggctcccctttgggggattgtatcctgataataataagtgagcccagaggaaatc

SEQ ID NO: 24718 - DNA, 1199 bp, Mus musculus
gctttttcatggagcaatattcaggagccatgaggttagaaaagtcagatcaacaacctctatcttttgtatatcaaagacaattttattaactattttaacctttttattagatttagataattttagcacagcctacatttttggctgttgaactatttatactttttttggaacagtagtagtgaatttttattttctattttcagtttttgatctgaaggaatttgaggtgaaatgctggacttggtgtgaaaagtcctgatagatagatagatagatagatagatagatagatagatagatagggatatgtctaaaagaaatataaacaacatacaaccaggagctgagcataaaagacatttagttggtaccgtgtaccatgtgcataaacaagttttttgtttgttttgtttttgagtttagaggtcctctcttatttttctccttgttatttgttatttgagaactttgtacaatatatttttatcatattcatcctcctctaattcctttccaatttaaccctcttccctacccacctaacactgtgtcctctctctttaagaaaagaaaacgtcatcaagtagtttgtgctgtccccatacatggactcttctttcttcctcctccacctcctctccctcctctgcctccacctccgcctccccttcctcctcctcctcctcctcctcctcctcctcctcctcctcctcctcttcctcctcctcctccccctcccccttcctcctccttcttcgtcttctttttgagacaggattcctctattgaagctctggctgtcctggagctactcagtgtgtaaaccagggtggcctcgaactcacaaagatacacctgcgtctcacccttatctgagaagctgtgggcacaatgtctcacccctatctgaggtaactgagagctgcttgggagagggggtctgtcttcttcttccttctccttctcctctccctcctcctctccctcctcctcctcctcctcctcctcctcctcctcctccttcttcaccttctacttgttaaattagatttgttgatgtcattttgtgtgttgttttgcctgcatacaagtatgtgtaccacatgcatgcttcctgcccacagaggccagaaagggcatcacgagagctggagctatgagttgttatgaactccatgcggatgttggaaatc

SEQ ID NO: 24719 - DNA, 1134 bp, Mus musculus
ccacagtatcaagtctgaatttggagttcccttctttttaggctcccctgattccttgctaaatggaggagtcttggtagagtaccctgatggcctgaacatagggaatctcaccgttttccttgtcttctacagaaaagatctagggaaaatataatattgtagtttgaggctgctactttggtagtatgtcttcgtgggccccagtttgtgctgggtctaggcagtgttaaaataaaatatgacacctttgtctgggtcagacttttgctagtgattaccagcacactgaggctttgggcaggtggaggaaatttggtaccacagacaaggtgtttcccatggtaacctgtaacaggaaggaggaaatggagaacactgacagcttcctctgaaatgggtgatttcccctcaaagagggaagatcagaatagagattctgggacattccccatgtagtctctgctttggatgctgagcatcttcaggtgtcatgcctggaataaatgccgtacttgttttgtgatatttccatatctctttgtgagttcctccatgatctgtccttttgtgactgcagtgttcctcttgcagacagtggcttttgcccaagctcccggtgaagcacataatcccacaacagatgtatcgtgaaaggcgctgtctcatggattgggtcattgcctgaatgagagttggtggaaaggttatatccatggttaggagtataggcttatagtcattgtaactatagggtaggggctagagggaggtggctcaggggttaagaggtcattttggagaggacccaagttctattcctagcacctacaaccctctgtaactccagtagcagggcatcagatgacctctcctgacctctagacactatattcatgtgtacatattcacatagacacagacatatcatctgtacacaattaaaagtaaagtaaactctaaaaaggggggggggtcctggtaggcaaggctgcccacctagtaagtcagtaaaatgctttgctcctagaatgctttttccctcagggtttcagtaggaagtcagagaatggagatttacaagatgtttatttttcactaatcaagtggtagaatatgctggcttatgataca

SEQ ID NO: 24720 - DNA, 1197 bp, Mus musculus
catactggagagaaaccatacgtatgtaaaaagtgtggcaaggcattcattcattccagtcatcttatcagccatgaaaagatccacactggagagaaaccgtatccatgcaagcattgtgggaaagccttcattcaacggaaggcgtgtcacaatcatgaaagaactcatactggagagaaaccctatgcatgtaaatattgtgaaaaagcatttaggtgttccacataccttcggaaccatgaaagaactcacactggagagaaaccttatatatgtaagcattgtggaaaagcctttacacatcagagtgcccgttaccgtcatgaacgaattcacactggagagaaaccctacgtgtgtaaaaaatgtgggaaagcattcagtgattgtagctaccttgtgaagcatgaaagaatccattggagagaaactttacacatgtaagaatcaagaagcttttatgtgttccacattcctttatacacacaaaagagctgacagagaagagctgagaactttacagcagtgtatctggtggacttgtctgtgcacaacttatatgcatgaaaaaaatgtgagaacagctcacaaagaggctcggcgggtaaaggtgcttgttactaagcttgagaatctgagttccgtcccagggacccatatggtagaaatagaaaattaatcccccaaatttacctctgaattccatgtatacatgtggacccccacacaaccccattatttaaagtgtatatacatatagagaacaattgaaattttcagaagttagttgtatccctgatatgcaagcatatataggataaaatcctatggcactgggcatggtaggatgtgccttttattctagcactgggcaaggtggggatagtaaagagtagagagttataatggatatagtggatttgaacactccatgggaagtttaggatgagctagttacaagcaagcagaattttctttgcaagaagaaaaaactagagagacagttcagctgttcagagcccatgctgctctgccagggggcctgagtttgtctcagcatcaacattgtgtggcttacaaccatctaagaactgtgatgccctcttctggcctctgtagggatagaacacatgggatgcatatacatataaataaaataagtctttttttttaaaaattatgtgtacaaagcaa

SEQ ID NO: 24721 - DNA, 1132 bp, Mus musculus
aaaagcatgaaagacgccatactcaagagaaacagtatacatgtgctcagtgtggcaaagcgtttagacggtcctcaaaccttcacaaacatgaaagaattcacagtgaaaagaaactttatgcatgtaaacattgtgggaaggcctttagcagtgcgggcaaccgttacaaccatgaacaaattcataatgcagaaaaaacctacatttgcaagcagtgtgggaaagggtttacactttcctcttaccttcgaaagcataaaagaattcacactggagagaagccctatacatgtaaatattgtgggaaagccttcacccattcgggtgctcatcacaagcatgaaaaaattcacactagagagaaaccatatgtgtgtgtatagagtgtgggcaggcattcaccttttccaaatcccttcaaatacatgaaagaactcatagtgctagagagaaattctacaaatgtaagcagtgtgggaaagtgtttgcatgcttcttacactttcaaaggcatgaaaaatctcggtcatggaaagaaacccattgggtagaacttgtacctatgtaagctatgtgtaactagtcaacttggttttgagactatttgtttatcatttgtctcatttgcatgaggtttggggcaagaatacactcatgcctcagtggacatgtggggagcagcagacagctttctggattcagttctcatattttcgttatgtgagtcccagtgatggagctcagatcctcagtctcagccacacgacccttctaagccatcccatcagcatttaacttgctttttttaatgaatgagatttcttttttttttaacgcgaaaatatctcaatctttatttttaaggataattgtcattaatacaggaagaactgatattataaaaatcagaaaacattagcattcaataaacaaaaattaactgaaggctgatcaggaacatatgcttggcattggaagaaggatgtatgctaatcttcttaaacaattgctagaaagtaaaaaaaaaaaaagttctaacagggctacagtgtgctgggcagtaacttgtagataaacatgttttagacaatgggtggtattcaaagctcagtctatgacatggtagttc

SEQ ID NO: 24722 - DNA, 1115 bp, Mus musculus
taatccagagttcccataacacttttacatatgtctgcttcaatggttgaggtaccctggaagggccctattaagagctgcataaaaagaatgacatttctacttttaatattttgatgaacttcctcacatagtacctggcatgtgccaacttaccaccacatatgccagcttactttaccaccaacacaagtgtaaactgtaagggttccttttttcacacatcattgttaacattttggtctaataatagccatgtgactagaataagatgaaattacggaatgtttgatttgcatttccctgttggttaaatattttgaacaattcctgagtatgcattagccatttatctctgtaattatgagcactctgctcagttccatagaatattttagtttcttgttttattcctaggtgttcagaaacttgtatattgcaggcactattctggcctattttgctggaaaagttttctgtcattttgtaggttgccttttcacttaacaagctttttttttgttgttgttttgtttatttgagaatatagaaaccattaaatgtgaaaccactcaatgtggtgactcatttataattccagcatgtaggaaactgaggcaagatgactgcctcaagttcaagtcaatccttgactagagtgagaccatatctttcaaaaagaagcaagccaagagtagtggtcaagctaagacatcatgcactaatttgaactgtacagaggagtcaattacctttctttgttcctaatcttttttttgggggggggggtgttgagacagggtttcctctgtgtagccctggctgtcctagaactcactttgtagatagagcaggctggcctagaactcagaaattcacctgcctctgcctctcagtgctgggattaaaggcgtgtgccaccaagcccggctttgttcctaatcttaatggaaatgctttgcgttctttttatctagcacaaaatcagtgataattttgtcatatagactttatccaattgtttctgtcctatcactttccaaggtttttgtcatgaaaagaaatttgaattttcttaaatggtgtgtgtgcagttattgctatgattttgtagt

SEQ ID NO: 24723 - DNA, 1107 bp, Mus musculus
ttcctggtgaattagaagccaccctgagctatataatatcttgtctcaaaaaccaataagcaggaatctgagaggtggctcagtcgtaaggagcgcttgttttttaattatgaggagctcagactccagcatctattattaggtggatcacaaataactgttagtcagagctccaagggcacttctgtgccctcacaggtacccacatacacatgtgtgctcatactcacatagacatacacacagttaaacacatggataaacataagtacaggaagacagtcaaggtcacacatcacgtacacatatgcaccaaaaaacaaaacaaaattaattgttatatagtctgagtgattacactctgcaatcaagctagtatcccgagacatgggttcctctcgatccccacttcctatctgaaatctgcatatagagtagcgatgatctatgacaaggatctcctacctgcccagtgtcagtttcagaagactggggtaggcaaattgggaggcttttgggttgtactggcctgccctgcatagtgctcagacccctccctccctccctccaccaccacagttgggttgtaggaaactggtcacgctgcagccgtagctgtgacgctggtgtgcgtagccgctcagtggtgtgccaacgccgggtgtctgctgcagaggaaaaagccttagacgacagtgcctgtccacagccacgcccacctgtgctggaggcctgccaaggcccaatgtgccctcctgagtgggcaaccctcgactggtctgaggtcagcttccacctttttccccacccaacccactctcagtacagaaagcacacaggaagtgagctgtccatttggaaaagctgttaagacaaccttgtcccaagtcctgctgttaccatactcagaaggagtacattatggttcccaaggcttctgaactctgggcttggtctggcctttagcatatgaaagagtacaaacctggggcacgtggtactttgtgggtgacaaagtagcagagactgggctggaggacagcatagggcccacctgtccactccttgtgacacagtcctagcaccctgaccatccattgaatataa

SEQ ID NO: 24724 - DNA, 1367 bp, Mus musculus
tttattatagacccatttcttttgtgcttgacacatacctgggtacataatcatcatataggtccataagctactcactaagtatacctgtcttacagaaccatcatattggtaatggccttgtgacaagatggttgtattcaatagtcaaccctctagaattctaatctaaagttggctccacagttccctctctctgtaacttgctggagcataaggacaaacatttgaagccatttggcaggttcttcacagcaggttaggctgttgtcatgcttggagaacaatggcaatgtagtggagggagctgtagttgctggcgctgccatacgtggtgttctaagcattcacttcatacgcaagggtctctcctttttgactatgtcaccgaaatccaacaggtgatctggactgagtggagcccagactgaggctgagctctgggtttgcctgatgcgtgtggtctcttcttccctccctgtgccaggccacgtgctgtacgccgacatcaagatggagaacggaaagtccaaggggtgcggtgtggttaagtttgagtctccagaggtggctgagagagcctgccggatgatgaatggcatgaagctgagtggccgagagattgatgttcgaattgatagaaatgcttaagcagttgccttttttaaacatcaataccagacctctgaatttgtattttttcttgttaaccattttaatttgttggctggatgtataaagatgtttaaaaaattcagttgcttttttggggtaatttgaattaattttttaatgattggggttccatttgactgtttgcattgagattgcaatgtgcgcaattttttttgtagttgtggcatcttgttgacatcgaatatgactttgataataaataccagttcctgaaagtggcttgccttttttgtttttgtatattttgtagaggtggccatttgagatctgcagagctgtcaacaccagggatctcaccctcattgttgcttgcgtgtgggccccaaggtttgaagagagaacctggttatacacttattagtaaagattctagaaggtcgtcattttcctaggtgtgataatagcaatcctgaaagtcgtcctgtagctttattctgtaagtcccagcttacttcactttggcttttctttgttcaagcccactgagaatgtcactgtttggggcttgttaggcaggagccccaccatagactcactctcttggcaacacaaatgtttgcagcctacaaggggtttttgggtgcagctactagtcatctaagttgtgtgtggatgtatcctctcatcagctcctttcagttgggagggtaactgattttttccccccacct

SEQ ID NO: 24725 - DNA, 1091 bp, Mus musculus
tttatcttttacatggctgtgtgattattttgtgccctagaagtgctaaaggaattgcagcaatagtggacatcagcagggcattttaagagggacaggttctctcaacttgaaggttgtaagtaactttgaattgtctcctgtcagttaccctgagtatgaagttttctgtgctttttaaagagcattcgtaatgtctgctgatggggacactacaaaggtttttagaaattgaagtatgacaactcatagccagtatggaggtgaagttttattccttctaaattttattgtgaaatttttacctgtgctatgtagtggaaaggatgattgtgtggatttcaatgtgaaaactttcaagaggtttttttttgtttttgttttaatagtaaattactttgagcatgacttcctgatttgagcttaggatctgaagtgcccagccaggcacacattagtatatgaacatctacataagtctctgacttctacttgtgctttttattcctgtttcaggtggagctggaggcagtgtccctgggatcgagaggatgggccctggcattgaccgcattagcggtgctggcatggagcgcatgggcgcaggcttaggccatggcatggatcgagtgggctctgagattgagcgcatgggcctggtcatggaccgcatgggctcagttgagcgcatgggctccagcattgagcgcatgggcccactaggccttgaccacatggcctccagtattgagcgcatgggccagaccatggagcgcattggttctggcgtggagcgcatgggtgccggcatgggcttcggcctggagcgcatggccgcacccattgaccgtgtgggccaaaccattgagcgcatgggctctggtgtagagcgcatgggtcctgccattgaacgcatgggcctaagcatggatcggatggtgcccacaggcatgggggccagcctggagcgcatgggtcctgtgatggatcggatggccaccggcctggagcgcatgggcgccaacaacctggagcgcatgggcctggagcgtatgggagccaacagtcttgagcgcatgggcctggagcga

SEQ ID NO: 24726 - DNA, 1161 bp, Mus musculus
tggacgctgaaggaaagtcaagggtaagtgtctgagagaatttcttctgtggatttactacatgacaaatgtaactgtatggtggcgtggactcgaatgaaatcaggaaggcagtgagtgctcatgttactgtagccatgtttgatttttgccaacattccagtagggtgggagggggcttgcaaacaggagtcccgcttttccaaatggctggccaaagagctttctggtattctgtttggatgcccaatttggataactggggaccaatagcagcattgtctctttgtttaacaggaattggctgtgtgtgaattatgcatggaattttagtggtggtataattaaagtaaaagtgtgttcttgtctagaaaatgttactcttggttgtttgctgatttgaaagttgtgtgaaccaaagattctgaaaagtagcctctgtgccagtaaattgtaaaccacaccttacaaacctgaatgttcaaacttggcctagtttaatgagaacataaactatgttctgttgtgtaatagaatggcttagaataatcaaaaggaggattttagtttatggaaaggatggatttatttagtaggagtatggtaaggattgattgagtataaagggaagcagatcaaaagtttgtgtgatttcttggagaacctgattaggtctgctcaggagctttagtgcagtgctggtaatgtgtaggaagaggagattaaggagcccagctttttacaaggaaggctaggtcatgcacttctgtcagcttccccttagaaggattaattttaaaaatcttcaacttttgttacgtacatcatatcttttaatttgttcctgccattgatatttactgtttgtgttttttgttttttctttccccccttgctcatctgactggtctgtggcgtctttcaaagggatgtgcgtaagtattacttacttatacttactggcatttgagtttttcaagttgtaggactggttttattcatttttttttgacttttttttatagtgttgttgaattcaagatggaggagagcatgaaaaaagctgctgaagttctaaacaagcatagtctgagtggaaggccactgaaagtcaaggaagtgagctcttttttttccttctttttccttggtggtagtaat

SEQ ID NO: 24727 - DNA, 1374 bp, Mus musculus
taggtttggcccatgacaaatgccagggctccctttcctccccagggtggaggcctgtctctacctccccacccactgcaggactgcccccgcaggtctctttccgataccattgccagctgtactcggaatggaggaagacaaatcagaaagtccgcctgaagattcgggaagcagatggctccgaggatccacatcactccttgctggctactggactcttaaaaaaggtggcagaggagacccctgtgtgaaggcctggctggcagggctcagaggtagtagacagaccagagtcagatggcaatgcagctggcatttggaaagatggaggctgcctgacttttcatgcacagctatgatgcttctcaggcccgtagccacagccagcagagcctgctctgtgatcccgtgtgaacatattttcaagggttttgttttgcacattgttgtatatgacaagcacagatggacagatttgagctttggatggagtaggcacctctgtctcattttgagatctgtttgacaccttttgcacagcagctttagcgctggtgtcaagggcgcccgttggactagaaggttccagcaagcttcttgcgttactctgcacctagctggcttgctttactggcactcttgacttataatcttataaagttgcactgcatttcaaaaacccacccctgaatgaataaaaggagcccttgctggctaatatggacgcatcagttatgtttctaagctgttccaagcgagtgattctgtgggggcacaaagtctaaaatgcttggcttgttctgtggggactgtatgaagcttcttttcttctcttctcttattgctatgataaaggacctgaagtggagggacagagatggctcaggggtgaagagcactggctactcgagaaaaggactggggtttaattcctagtgctcttcacagcttgtaacggtctccaactccagcttcaggggatccagtgcctctttaggctcccatagacgctgctcacatatggtgcaatacataagtgcaggcaagatactcatacacataaaatacagtttttttttaaaaaaagtaacttagccctgggactaaaccaccactcaaagaaaacacgtggtgggactcatggctccagctgcatatgtagcagaggatggcctagtgggtcatcaatgggaggagaggcccttggtcatgtgaaggttctatgccccggtataggggaatgccaagaccaggaagcaggagtgggtgggttggggagcaggggtaggcgggaaggggataggggatttttggagaggaaactaggaaagggaataacatttgaaatgtaaataaagcaaatatctaatt

SEQ ID NO: 24728 - DNA, 1197 bp, Mus musculus
gatgtaacctggaacttatgcagaccagatctgcacttgtttgttttctctctctatgtgtattggttagatgacagcttacagaagttgatggtcccctttcccgctctatagttcatggttgtcgggcttggtagcctttacttactgagccatctggccaacattccacttgttatttgagacagtctctctccgtacctggagcctactgttttgtctagactggctgagcagggatctctagaaatctgcctgtctctgacctgaagcactggtgttacatatacattgtacaaagcacagctttttttaatgcaaactttgggggtctgaattcagatcttcacactctcatggcagatactttatcaactgagccatttccctagtccccttgctcacttccctttttgagacagggtctcatgtaggccctcacacttgctgggtagccaggatggtcttgaattcctggtcctcatatctctacttctaacggctgagatattaccacatctggcttatgtactagtgtacattttttattactcctctgttctccacctgtttgtcccgctctcttccaacacccctggtgaccacccatctttttattgtctccatagtttttcctcctctgaaatgtcacatactcgaagttgtacagtgtgacagcatgcagcctattaagttttctccatgccttcttgtggcttgatggcccacttttgttgttgttccatactgagtattgaatccatggatctcatattctaagcaatcatgagctcattcccagccctgtttctatattgttattttaagacagtacctaagtttctcagacaggtcttgaactcactctgtagtcctggcagaccttgtccagtcttagttttctgagtaactggatttacgcagttaatcaggttacattcctacagtaccagatggactctttttaatggttccaccaaccacatgctggacaagcactttaccactgatttgcagctccagctctcactttgtgtgtgtgtgtgtgtaagagtgttgtgtgtgtgtctgtatgtgtgaatgatagtgtcttagttaaggttttactgctgtaaacattagacactgtgaccaaaggcaagtcttataaatgacattatttaactggggctggcttacaagttcagaggttcagtc

SEQ ID NO: 24729 - DNA, 1195 bp, Mus musculus
ctgaccgtgcagcccacgatgagtcccctggcaacaacgtggtggacatcagtgtgccacccaccaccgatggacagagacccaacaagctgcagtgctgccagagcctgtgactgccctgcactttctttttcttttggttttggtttgttttgttttgtttttcttggttttttttggtttttcgagacagggtttctctgtgtagccctggcagtcctgggactcactctgtcaaccaggctggcctcgaactcagaaatccacctgcctctgcctcccaagtgctgggattaaaggcgtgcgccaccactgcccggcttgccctgcactttgacccagcgtgcgtgcacgtcctcgatccttggccagcccttcaccagtgtcctcccggcccctcccttgtccctctaggacaggctgctcccaccctccaagtgagctccgcctgccagcccaatggcccaggaagagcaggagtccagtggcctctcctgtcctgcctgctcaagagaagctaaaagccccttgcttatgtacctgctcttggatattgtgggcatcttgacaggatagggaggttggtaggatggacaaggccagccagaggtgaggaagatgagtggaaggaacctgcttctcctgttttccagacttcagagatcgaaaccgcctttcctctctggccagttgaccagctggccctgtatcctcatcccaaactctctctgagctgatacccgaagagccaggcatcagaggctgagcaggtggacattctgggctctgcctcctgcctacaccaccatagccagtgccagcacggcctccagcattcccaggcctgcgcactcctgctcctgcctgtagatttatgctgggagaagacacccttgcccctctccctcctcctctgcacgcagcgctctcctctgcccatccccacttctctgtctcgtctccgtgtctggtcaggaacctgtctgcaagtgaagcaatatcttcgtgttttgtatatacaactgctcttgtagcctttggtttttgttattgtagagaacagattctttatacactttgtaaaatttacgccaaaccccagctctcgaactcttattctccctgtagcccttgcactgttgcccgttactaaaatgtataagccacttctgtacagaaacctaccactcagctt

SEQ ID NO: 24730 - DNA, 1199 bp, Mus musculus
acagggtttctctgtgtagccctggctgtcctggaactcactttgtagaccaggctggccttgaactcataaatccgcctgcctctgcctcccgactaggattaaaggcatgcgccaccacgcccggctatcagcttggaatcttgtgcccctgtttttggaaggctgaggaccagtttttagattttggaagaaaacaaagaggtcagggaagctgtagatctctgcagctcctgggaggttggagatggataagaggagagataatttagggtccaagaaaggaggtatatctagcactggagcttagtaagcaactgtttgggtgagaattcccataatgttagggtaagcacgtttagtatattgacccatatacagaggagattttctttaaaaggaaggctttttaggttagatcttggaaaggctggaaacttagccttaaagttttgtaagccatgcccttgcctttcttcatatgcatgacttgtaaacttaccctaactggctacttctgttcgctaaccctatcctggggttccctagtttctgacttcttctctcctcccacagcaagacctgcaggcgaagctacagctgcgctaccaggagatcgccaagcggtgagcaggccgtgcttgctgccttcatcctgacattcttccaccaaacccaaggctggccatagtggtacagtctttaatcccagcactcgggaaacaggcaggctgagttctgagttcaaggcctgcctgatctacatgatgggttccaggttaacccctgtctaataaacaaacgtgaaaaaacaaccctaaatttgctgttctcttgaactttccttggagaattgagcagagatctttcttgtcaggctgtgaaagcaaaaatttaacttttaacttcattgggttgtcttggaatagttaggagataggttgtattatttgttggtctcttgggtagctttgcagtcttcattgtgaccacccacatgaaatgctatgttctcaagctactgaagggggaggatgaggcccatgtaggccaagtcattgcttaaagtcagttttgatcacatttatatactgatgagtctttgccttgtcctcaggcttttggatgccaatacaaacgagtgttcttgctttgtggggttggtggctttagcactcagagactccacctcactttgc

SEQ ID NO: 24731 - DNA, 1197 bp, Mus musculus
tgggttttgtgtataaagatttattgttacacataagtacactgtagctttcttcagacacaccagaagagggcgtaagatctcattacgggtggttgtgagccaccatgtggttgctggggtttgacctcaggaccttcagaagagcagtcagtgctcttacccactgaaccatctcgccagcccatatttttcttttttgttttgttttgttttgtttgtttgtttgtttgtctgtttgtttataaagacagaaagaaggcatggagattggaagtagggaggatctgggaggaaatgagagaggaaactgatcagagaatatattgtatggaaaatttattttcaataaaaatttaaaacaaacacaaataaaccaaaagatcctcactgttctttgtaggcctggttctaactggagtttgtcgttttttcttgtagttctgcaatggcagccactgagaagaaggcagtgacacctgctcctcccatgaagaggtgggagctgtccaaggaccagccatacctgtgaccctgccctaggttaccttgctatatatgtctctagggccacatgactgcttttcctccttggactccctctggggagagtgtgacctaatttgtaacaaatatatagaattccacattatttccaatctgtcttttcttagtatttatcgattggatttgatattactgtgtgccgggtgtgtgaatacatgctgcagcatgtgtggacatgtgtgccaggtgtgtgaacacacgctgcagcatgtgtggacatgtgtgccaggtgtgtgaacacacgctgcagcatgtgtggacatgtgtgccaggtgtgtgaatacatgctgcagcatgtgtggacatgtgtgccgggtgtgtgaacacacgctgcagcatgtgtggacatgtgtgccgggtgtgtgaatacatgctgcagcatgtgtggacatgtgtgccgggtgtgtgaatacatgctgcagcatgtgtggacatgtgtgccgggtgtgtgaacacacgctgcagcatgtgtggacatgagaagacaactttgggaattggttttctccttccacttggtttttggtgtcctgtgtactccaggttagctggcccaagagtgtctgcctgaggctgctgtctgtacctcccagcctgctgtaggattagatttgagccactatgtgtcat

SEQ ID NO: 24732 - DNA, 2135 bp, Mus musculus
tgtgtgtgtgtgtgtgtatgagagagagagagagagaaagagagagagagagagagtgagttagggtttctttacatattgatagctgtcttagaactcactatgtaagccggggcgtggtggcgcacgcctttaatcccagcactcgggaggcagaggcaggcggatttctgagttcgaggccagcctggtctacaaagtgagttccaggacagccagggctatacagagaaaccctgtctcgaaaaaccaaaaaaaaaaaaaaaaaaaaaaaaaaaaaaaaaaaaaaagaactcactatgtagactaggctggcctcctcttccaagtgctgggattaaaggtgtgcaccaccgtgcctggcatactgcattttcttgcatggatgttttgaatctgattgactctatgtttcagggattgagtcatgtgctcagaatgggcagtgccaaccacagtctgcccttccttgctcctgtgacaacatcagtggttgctctgatgtctctgacaagaacctcaactgcagccgcccaccctgtcaggagagtgagctgcattgcatactggatgatgtctgtattccacacacgtggcgctgtgatggccacccagactgtcttgactccagtgatgagctcagctgtggtctgtgtcctgggatcttggtatacctgtgtgggtggggaaggctgacagttatttaaggacatttctttccttccatgggtgactagtttgaggatgtaaacacacgcttcctcccaggccttcgtccctgtgctggtggacaggacatcatgaggattagtgatttcccaccaactttactctgtcttagatcaggatgaattctaagagttgggcactggaaaccttgtgtaccagactgctaagccctgggcgcccctcagctactgatgccttgccttgttgcagacactgacacagaaattgataagatattccaggaggagaatgccacaactacaaggatttctacgaccatggagaatgagacctctttcaggaatgtaacatttacctctgctggggactcatcccgaaacccaagtgcctatggggttattgcagctgctggtaagataggctttcccatgtgaggaacttggggctctccacttactagtctgcgatagttcctgccctccttatcctactcctgaccatctgtctgtcccctacaggggtgttgagtgccatcctggtttcggccacccttctcatattgctacgcctccgaggtcagggttatctgcccccaccagggctgttggtggctgtgaaggagtcgctgctgctgtcagaaaggaaaacctctctgatctgaggacacatggttaccacctggccctgagtgcagtcagactgggacaaaggagccgtgaaacacgcaaggagcttctggcttctcagctttgagacctgggctctttggagcacagagaactttgatttttaagcttctacagatatggtcctagagactggggtcctcagacactcccgctgtatgtggtgagcttggctggaaacttgccatagccaggactgaggggctggccccaggacgctctcaagaaatggggctactgtggtttagacactcctgctgctcacattgatgggtggctattaaagtttcttcacccctctgtctgcctctagcctgtttcccttggcctgggcagcctatggtctcggctggatctccttctaccttttaaaagggagtcttcagccaagaggtctgtgtcctggacatttcctcctatactctacttttataaagtgaggacgagtattgagtccacactcaacattaacagtgggcttaataggagaagagacctgaagtaatgtttccttattgggcattcctttgtcatggcttcttctgtgacatggaagctgggctaacctgatttgaacttggctatcccctgttttttcagggctataatcccagcagttgggaaggggagataggagaattagaagtaataggcttgatgtacatgcctgtaattctagcactggggaggttgaggcctgaagagctggagttcaaggaatgtctgtgctattcagggagaccttatttcctttcttcc

SEQ ID NO: 24733 - DNA, 1099 bp, Mus musculus
gacacaccagaagagggcgtcagatctcgttacggatggttgtgagccaccatgtggttgctgggacttgaacactggacctttggaagagcagtccggtgctcttacccactgagccatctctccagccctctcctatgtcctttgcacagcccctctatccctgttcctcatccacccctcccctttcttttccagataatgaaggaaatgagagtcccacatcgccttcagactttttccatagaaggaattcagagcctgcagaagggctcaggacccccgaggggcagcaaaagagaggactgacagagaccccagcatccccgccaggggcatccctggaccctcccagcactgacgctgagagcagtggagagcagctcctcgagccgctcctgggagacgagagtcctgtgtcccagctcgctgagctagagatggaagctttgcctgaggaaagggacatttcctcctccaggaaaaagtcggaagattccctccccaccatcttggaaaatggggcagctgtggttacctctacatctgtcaatgggcgtgtctcttctcacacttggagagatgccagtccccccagcaagagatttcggaaggaaaagaagcaactgggctctggactgttaggaaacaggtaatagtgggtgaggaggaaggcaggcaaggaggcaggactctctgaagggagcctgatgtcctaggtctccctgcagcctcaggccctttctgtcatttttcttctgtccttagctatataaaagaaccgatggcacagcaggacagtgggcagaacacaagtgtccagcctatgccatccccccccttggcctctgtggcttctgtcgctgattcctccacaagggtggactctcccagccatgaactggtgaccagctctctgtgcagcccttctccatccctgcttctccagacaccccaggctcagtctctccggcagtgtatttataaggtgagtgggcagtgtcccctggcactgcattctcaccctttccctttctgtgggtattgcacctcctgctcctctgttttccccatcttcctgcccgcccgcaagtgcgtg

SEQ ID NO: 24734 - DNA, 1200 bp, Mus musculus
tttggtggtgtttgattggatgttttacttaatagtgagcctcagttgccccgtctgtaccatggggttgacaggggtacctgttttttttttttaaatactgtgatggcttaaaatcagtgatgctttcaaaatgctgttattctttttttttttttttccctagagacccccccggccgccctcttctttcctttgttcctgtggctgggggggtatctccttccacagcatggagccgtctgctctgtcacccagtggggccacactcccactgcctctgtcactggctccaccgccactgcctctgccggcagctgcagtggtacacgtgtccttccctgaggtgaccagtgccctcctggaatccctcaaccagcagcggctccagggtcagctctgtgatgtgtccatccgcgtgcagggacgggagttccgcgctcacagggccgtcttggctgcctcctctccttacttccacgaccaggtcctactgaaaggcatgacttccatttccctgccaagcgtcatggacccaggcgcttttgagactgtcctggcctcagcttacacgggccgcctcagcatggctgctgcggacattgtcaacttcctcacagtggggtcggtcctccagatgtggcacattgtggataagtgcactgaactccttcgggagggtcgatccgcagccactacaaccactgtcactactgctgcagccccctctgtctctgtcccttgtgccagtgtcccatcagggaatgggggcactgtcgcccctgccaccgtaggctctgtccgttcccatacctccagcagggccagtgagaatcagtctcccagcagtagcaactacttcagcccccgggagtcgactgatttctcctctacctcccaggatgcatttgtggcctcagcagcaggtagtgggaaccgtcgggatggtggcccggtgttcccagcccctgtggttggcagtgcgggtaccacctccgggaagttgctgctggaggccgatgagctatgcgatgacggtggggatgggagaggggccgtggcccccggggctgggctccggaggtctaactgcatgcctgccagtgcagtgccacagaaacactgggtgtatgtgaagcaagctagaaattgccctgcaccagcctccctggtccaccaagaccccgatctagaagatga

SEQ ID NO: 24735 - DNA, 1145 bp, Mus musculus
tgaatgtcctgaatgtttgcttttctctctggacaccacctaacaggtagatagaatcgtcattggctttccccatttctggtgcttttatgcaaatattctcaccgaactcagtcctttgccttcatcatttgaagtctccaaatggggacagtctgaaactccactggcacctctactcttagctccaccctgtgcaggccctttgtggggacagtagttctcttgaaaccacctgccctcacactgctggtcttcatgtgggatggtgttggctaccttttgccctatgggtcgtttttttccaactgtaagaagtaggatctattttgccagctacttttatttgtggcattgaagcaaggccctgtgcagctatgtgctggtccaataaatgttattagcaccaagaaaaagttaggaccctgaggtccccagatcgacctccagataactagcaaagaacctactgaaagcttgggcttgggaatcacagtgtatggggtggccctgcgtgctcagtgacgggtgatcagatgtcgactcaccgtgcttctcagatctgtcaaagataatcccatgtggcttctgcagggcaggtgtgtgtgcctcagtgactgtattagttatttgcagagttagttttgtatgtgtgtgtgtgtgtgtgtatgggtatatgcgtgtgagtgcagctgcccagggaatccaaaagagcttgttggatcctctggggctgggttacggctggttgtgagccatgtggcgtgggaaccgaccttgggtcctcagaagtgcagtctgtggtttaaagtgctgagtagcctctctaggcccttatctgagtcctagagtgctctggaccagagctgactctcagaagactacttcgcatagacttggggtaaaatcaagttactatggcctgtcttccccatcagatcactttcaggtcacttctgcttgatatgaaaatcatgaaaatgggggtgggggtgggggttgggtagatggcacatcagttaagaggactggctgatcacccagagggtctgggttcacttcacagcacctacatgacagctcaccgctgtaactccagtctcaggggagctggcactctcacagacatacacacaggcaaaaca

SEQ ID NO: 24736 - DNA, 1100 bp, Mus musculus
ggctcatagccacctgtaactctaattccagggatccagtgtcctctgctggcctcctttggtactgcacacatggtgcacttacatgtaggtgaaacacacacgcacacgcacacgcacacgcacgacgaaattttattgtgcccttagagatccgggccatctataggatttgagaatcgtggttggcagtgtgtgtgttcaacacctccagggctgcaaacctctcatcaccttgatttacccctatgatattgtaaatggatgtgtccctgaagcgtgggtaacctggagcttggtcgggccaccaactctccttctcctttccgtttctttccactctccccacgcacgcccagtggtgctgaccgtcctcacccataaccctgcccctcgagtccagctgggaaaggatgcagtgctggacctgcgcttcgcctacgcaccctccgccctggaaggttctccctctctggacgcaggccctcctccctttgggctggagtggcgacgccagcacaggggaaagggtcacctgctgttggctgccacccccgggctggccgggagaatgccaccagcccaggaaaaggctacggcatttgcagcttgggatgacgatgagccctggggcccgtggactgggaatgggaccttctggcttccagccgtgaagccttctcaggagggtgtctacctggctacggtacacctgccctacctgcaaggacaggtctccctggagctgactgtgcacagtgagtcggggaacaccatggcaggggtgatactgaagacagttgggagtcctaggcatctgaaagctttaacatgggattgttgtgaagttctaacggggagacagagcgccccctgcagtattagggaagccagaagaccaactgagggagggagggaggttaattccctcagttacctttcctattctttcttcagaggcccccagagtgtctctaacaccagcacccgttgtgtgggctgccccaggagaggcacccccagaactgctctgtcttgcatcccacttcttccctgcggagggtctggaggtcaagtgggagctcagaggcggcccagga

SEQ ID NO: 24737 - DNA, 1526 bp, Mus musculus
acttccctcccaacacttccaattccccacttctttcttctcttgcagaagtcacagtaaagaagttctcgtctgtggaagccaccctcatctctggcccagatgactccagtagcccctgccccagaacaacagccttcttctcttcttctccctccattgaatagctcggatttttttttttaaggtttttttgtttgtttcaatctttcttgttttgttcttgtttttagacaaggtctctctatgtagccttggctggctgtcctgaaccctcaccaagccaaccaggctggcctcgaagtcccagagatccacctgtccctctgcctcggagtgacaaacggcactggacaccatgcctagaggtcttttttttttttggtttttggagacaggatttctctgtatagtcccggctgtcctggaactcactctgtagaccaggctggcctcgaactcagaaatccgcctgcctctgcctcccaggtgctgggattaaaggcgtgcgccaccaccgctggactcgaactaaacttttaagatgagaaaaaagcgagacttagcgccacactcatttgatgcccacagtcgggaggcagaggcagtggatctctgacatttccatgccagcctgatctacaaatagggagtttcaggtcagtcggggttacttggcggggctttgttgagagaactaaatataagaacacacatgcgtagagtcccagggttgagaagaaccagtgtatgcgccagagaggcgggttcataacctgtggctcacaaccccctttaagtccatcggaaataccagacattaggattcacaacagtagtaaaggcagttacgaagtagcaaagaaaataattttacaacttgaactgcgttaatgttaagaaggttgagaaccactggccaggggattaggacgaaaggtcttcatagcatcttaagattctagagacctcagggacagcccacagcagtagtctagagacggaaaggtccatgtgtctccctcgcggactaaagcctacctctccagctctccattcctaccacagcttttcttttgcctggtccacctttaccatctccgggcctggtgggtctcggccctttacgaatgtccccgtgtggttcgtcctctcctgttcgccggtcctcgtgagctaataaagtctttccgagtttccatgcgggcctctcattctcccgtttccaagcacagccaacctcggtcacctcccggtcctcgtctcgcacccgggagacgacatagccaccgtgggaaccgcgcgcgctcgggcgcacggtgagagccggacgcccggagcgacggacccgagtggaaccggaagcgccgcactagccggcttccgccccctccccgcgagtgggcgggcataagggcggcacagaaaacccggcgcggattcgctccgttgcactcgtgccggggcggcagtgtcattctcgagctgcagtaacggggtcgcgccactgctagggcactttcctc

SEQ ID NO: 24738 - DNA, 1150 bp, Mus musculus
gaaaaacaatcgtgattctgctgtggcttcagagttcgagctggtgcagctgctacctggggatcgaggtgagcaggatggagggatggcgcactgaagggaggcgctcggagagagggccgaacgctaatccccgccctcttctgaacccacagagctgaccatcccacactcagctaacgtcttctatgccatggatggtgcatctcatgacttcctcctgcggcagcgcagaagaccctctgctgccaccccgggttcccacagcggcccctctgcctcaggaactcctccgagcgaggggggagggggctcctttcccaggatcaaggccacggggaggaagattgcacgggcactgttctgaggatgaagtcctattggtttacatagcaactcataccaggagtgagcagccacacatggtggccacaatattagagcagaaaccctgaaaggtggccagccaccctgggacagtgaagtcacctgtttacgaaaccactgcggaagccagccccagccccagccccgtgggactggtgaccacgtaaccatgttggatacctgcatctagcttccacctctgcggaatgtggcattatcatctgtgctgggaagagtactggtccctgccacatgccagcctgtgacaggccaagggaaggcctagaggctgagcctggggcagagggcagtgacaagaggttcttgtcccactctggggattcctgtcactgtgacaacactaagaaaataaaccaaaacactacctgaaccctgtccccatccttcagtgcgcggagctggatactgcgagggcagtgggttgaagttaggtggcccagaccaaggggcagtggttctagtcccaggaggtacctggtatagctcagtagcaaagtgtttggtgggattcgggaggtgggaggccctgggtgccatccttggacccgagaacagatactggtgaaaggtatcccagggttcccttcagtcctggctcctttaaacacccgtttcttcttgtcccctaagaagcaggggctcctggatgacagtgatccctatggacttctctcaagccagatctctttttttttttaaatcattttatttatttatttatttatttatttatttatttatt

SEQ ID NO: 24739 - DNA, 1098 bp, Mus musculus
cagagctgatacaaagaggggggccttcggagcaatggcagaagggcaaagaggcccaggaagagacaacagctatccatgaagagcacagaggccaggcagtgccccttctgtatttaggcagggtgcactggagggtgagacccactcggacaccagagtcccggcaccatgtgtcagaagaactgtggccggaaaactggggtccttttccaccctatgcctcgggcacaggatatgtactgtccatctctgctgtgcagctcatcctgaaggtggccagccgggccccacctctacctctagaggatgtctttgtgggagtaagtgcaaggcgagggggccttgcccccacacactgtgtcaaattggctggtgctacccactaccccttggatcggtgctgttacgggaagttcctgctgacatcccacaaggtggatccctggcaaatgcaggaagcttggaagctggtgagcggcatgaatggggagaggactgcacccttttgctcctggctccagggatttctgggtaccttgaggtgccggttcatagcctggttcagtagctgagaacccacagaaaacagcacctcagagacctttccccaaagttggtgcagaggctgcagatccctgtggtgatctagttcctccattttctcacagcaaactctgaagctgcaaccaaccaagtttaccaagataaacttgggccctggcctgccagctccggggagggataaagccaagggcgggaaggggactcacaagcagggacaagggtccaataaacatgtctctctacctcaagtgcagcgtcttcaccaggcccccagcacacctggagagcccagagctttcagtactgctgcatgttggtctttgcgacaaccacaatggggataacgcccccctctagggtgaaggcttgggcagtggtggggagacaggcagggcagtgagctgagtctagaatagccacacagggaagagcagacctacaggatggtccagacacgtctccagaaaccttgtttaatgcccacacacccaaggagctgtctgctcctacccagttaagatgtaaggcaca

SEQ ID NO: 24740 - DNA, 1495 bp, Mus musculus
cagggagctgggataacatctgcacagcccctctgcttttgagtaatagggtgtgtgtgagggggctggagaggtggcttggctgttagagcattagctgctcttccagaggatccaggttcaatgacccaacactcaacaaccattaactccagttccagaacatcagcgccttctggcctctggtcagtgtgccacagacacacagacatacaatgcaggcaaacataagacacaaatagactgggctagagagagaatccagctgttaaaagctatgacttcttccagaggctcccagtgaccacatggtggctcacaaccatctgtaatggattctgataccctctggtatctctgaaaactctgtactcagatctttaaaaacaaaagtctaatagcccaaacttttgacctcagggcgtggggcggagatatgctcatgtggtgttgaggaaagcagacatcgacctcaccaagagggctggagaactcacggaggatgaggtggagcgagtgatcaccatcatgcagaacccacgacagtacaagatcccagactggttcctgaacagacagaaggatgtgaaggatgggaagtacagccaggtgtgttaggggactggtggacacgggttgtccgttaaaactgggtgcagaatcaggagataaagttgtctcccctgtctcaaaatctaggttctggccaacggtctagacaacaagctgcgtgaggacctggagaggctgaagaaaattcgagcccatagagggctgcgccacttttgggggtaagtgggtgatgaggcttaagctgcccactcccaatcaggctgcacagtccaccggctcgcctcctgctgctctgtgacctgtatctttttcttctgcagccttcgtgtccgcggtcagcacaccaagaccactggccgcaggggccgaactgtgggtgtatccaagaagaaatgagtctctgggcctttgctgttaataaatagtttatatacctatgacctccgtctcagtttgtcttccatctgatagtacttaatgccacagcgatcctgagctctggtagtttaatctggctgcaggtgccttctgggtacagtgctcttggtgcacttgaacggaaatgtccctcataggctcctgctggtgtttgctcctccctttctgttgggtgttcacaaggagactgccttaggtgcagcaaactgggcggcaaccactgttaaaggtggggcagccggtgttgaaaacctccaggggaagcttgggcaggcttcaattgagtctcctgccgtagccgtgctaagctgttgtgaagtggctacagctccgccagatgctgctgctcgggtgagttaacagcagatgctggctgctctagaaaagcagcctggtattccgcgtgctttacagtagggacggaccgggaagggctggacctatgtgaaatgcacgccgcttgtcggcttccggcctagagagg

SEQ ID NO: 24741 - DNA, 1703 bp, Mus musculus
ggtccctgtgcaagtaagaatcatatttacaaaatgaaacaacccagaaaaataaggccgggtgtggtggtgcaggattttaaccccagcactcaggaggcagaggcaggcagacctctgtgagtcccaggccagcaagggctgcacagagagaccctgtttccataaccagaacacaaccgaagtatttgttccctttgctttatcttcaccccattcctgccgtacagtgaaagcccaccccgcctcatggcccgtctgttccccacgcctaggcagtgacgaagatccgggagtttattctccagaagatctactccttcagaaagcccatgaccaactaccagatcccccaggcggccctgctgaagtacaggtgggtgcggggtgggcgcggggtggcctgtgccctctcaacactgcagcgtgggcatccagggagtctgacttgccctggtccttccaaggtttttctatcagttcctgctgggtaatgagcgtgctacagccaaggagatcagggatgagtacgtagagacgctgagcaagatctacctgtcctactaccgatcctatgtggggcggctcatgaaagtgcaggtgagcaaggctggagacatggaggaggatggggaggaggaggaggggaagggggaggagggggagggatgaagtcctcacctgctgctggtggagagtgatggttcagctctgttattttctctagtacgaggaagttgctgagaaagacgacctaatgggtgttgaagacacagcaaagaaagatatcctggagaggagagccccatgagctgggctcatggctgggaccatggcggggacatctggctccagcctgcaggctgtgtttcgtttcgtttcgttgctttgctttgcttttcttcctttctttatttcttttcttttctttttttaagaagatttatttgctttatgtatgtgagtacactgtagctgtcttcagacacagcagaagaggccattagatcccattacagatggttgtgagccatcatgtggttgctgggaattgaactcaggacctctggaagagcagtcagtgctcttaatccctgagccatctctccagcccggggctgtgtttcttacccattctgtggttctcaacctttgaggacatgaaatcgagagctttttctctaagaagcactcgccgctctgacagattttcacatttatttctgagggtttgtaaaaccttgacagccattaagggtgtcaggccaagcaaggctcaggttctggaaagggctatccgggccatatttagtttcctgggactcgggtcttggcttgttgggcctggtgcagttggtctcattggtttccctgactccaaagctgttcacgcttcttctcgaagccgtccctccgaagcaggaacaccatctttacccttggcactcgtggtactgtcatctcaccggccgagctggaggcccccatcctagtgccccatactgcccaacgtggagagcagagggtatggtgaggcaacccctccatggccaggatcagttccctgagtgttagtttggtgtgtgggggggggccggtgtccctggcctgctgtgatgcgggaagttaggagccatggactcagaggcgggcagagggagactggctggggcgtgactgttgggaggcaacagttgaagtga

SEQ ID NO: 24742 - DNA, 1210 bp, Mus musculus
tgatgggagctctgggaatccataatagctcctccagagaaatcttctaggtgcctgagttgtgccatgaaatgaatatgtacatgtacatatgcatatacatttgttttgttttaccctaggctcccagacctctgatctgtctctcccagattgtaaaggtgacactctagggtctgattggggaggggcaatgtggacatgattgggtttcaggaactcccagaatcccctgtgagtgagtgatgggttgttcgaatgttgtcttcacagtgatggttcatgaccctcattctctagcgtgaagacagctgcctggagtggacttggtgacagacaatgtcttctcatatctcctgtgacatccagagccctcagttctctttagtcaagtgtctgatgttccctgtgagcctatggactcaatgtgaagaactgtggagcccagtccacccctctacaccaggaccctgtccctgcactgctctgtcttcccttccacagccaaccttgctggttcagccaaacactgagggacatctgtagcctgtcagctccatgctaccctgacctgcaactcctcacttccacactgagaataataatttgaatgtaaccttgattgttatcatcttgacctagggctgatttcttgttaatttcatggattgagaatgcttagaggttttgtttgtttgtttgattgatttgtttttttgaagaaataaatgatagatgaataaacttccagaatctgggtcactatgctgtgtgtatctgttgggacaggatgagactgtagcagctgagtgtgaacagggctgtgccgaggtgggctcagtttgctttgatctgtgatggggccacacctccactgtgtcacctctgggctctgttccctctatcactatgaggcacatgctgagagtttgtggtcacaaagacacagggaaggcctgagccttgccctgtccccaggattatgagcccccagggctaaagatcagagactcaactagggatcctttaatgtgccagttgcagaagacaatttacccatttcctctcacccattcgttttagctactaatgatgccatgttaacgctcccctgggttctccctgtcccatgctactgtggtggtttctgcttctccttctctccagtttctcttccaggggtctcaggtgtaggatgtgattttttttt

SEQ ID NO: 24743 - DNA, 3552 bp, Mus musculus
gagcggagcaagtagtatagaggaagggcttcaagggacgcggatcccgaataggtagattgagagtcaagtcgagtcgtctcttgttcctccggtcagcgtgatgaccatgggcctgcgggccccccactgggtggctgtgggactgctgacctgggcggctttggggctgctggtggccggacacgagggtcatggtgacctgcacaaagatgtggaagaggacttccatggccacagtcacgggcactcacatgaagatttccaccatggccacagccacgggcactcgcatgaagatttccaccatggccacggccacactcatgaaagcatctggcatgggcatgcccacagccacgaccatggacactcacgtgaggaattacaccatggccatagccatggccactcccacgatagcctccaccacggaggacatggacatgcccatcgtgaacatagccatgggacttctagggaggctggggctccaggcatcaaacaccacctggacactgtcaccctctgggcctacgtgagtcgccaggggatgtggggaagagggactggttcttaatcggtgggaagctccatctttgccttctgattgtgcttctccaccaggcactgggggccacagtgctgatctccgcagctccgttcttcgtgctgttcctcatcccagtagaatctaactctcccaggcaccgctctctgctccagatcctgctcagttttgcttccggggggctcctgggtgatgcgttcctccacctcatcccgcatgccttgggtaagtaacttgtgggctccgcctcaaaggcttaagcggttttgttctttctctttaatgatcccagattttccggttgtcttcaaacacacatcccctgagccaggcattccctcatcaagccttttctcccacttcccgcagaacctcattctcaccacgctccagagcagcctggacatggacactcccacagtggtgagaaaaaccagggactggtgtgctgggaaagggcaacctctccattcccatgcttcgcctcttacacttgagtctgcgtctcccttcatgctttactgcctccgttccaggccagggccccattctctctgtggggctgtgggttctcagtgggattgtcgccttcctcgtggtggagaaatttgtgagacacgtgaaaggaggacatggacacagtcacggacacggagacaggcatgcgcatggagacagtcacacccatggagatagacatggtgagcccgcgttgcctgctctgtaacacactcagggtcaccctgtggagcaggacacatgcgaaagctctgttccccactctgatcaactcctgttctccctcagagtgttcttcaaaggaaaagcccagcacagaggaagagaaggaagtgggcgggttgcggaaaaggagaggaggaaacactgggcccagagatggcccggtgaaacctcagagccctgaagaagaaaaagcaggctcaggtaagggatgagctgatgggttggctgtgggtgtgtgggtgacggtgggagtctaggaaatgggggcgaggggggggctgtatgtgaaccggcttgatggacaccctcaatcatttttgtcttgtctctttgcaaaaagacctgcgtgtgtctgggtacctgaatctggctgctgacttggcacacaacttcacagacggtctggccattggtgcttcctttcgtgggggccgagggctagggatcctgaccacaatgacagtcctgctgcacgaagtgcctcatgaggttggggattttgccatcctggtccagtctggctgcagcaagaagcaggttggtgccgactgcccatccttggttcctaacaagctacactacagtgagccgtttagagtcagggaaagtcgtgcctttacctcttgctctgttttacgctgcagtcctcacctgtgtatagttctttgatggcttaaggttctcaggagatgtctgttctagtactccctcctcaacctggctgttttggggggctgcgggccttaggtgtggtcctgaggcagagtcattgactacgtattagctatcgagggagccccaggcgacagctatctgactgcttcctggagctggtgtctgggacccagattcctgtcctcgtgcttgtgcagcaagcactacctgtgggtccttctccccagaccctcctttccttaacactgctcccacctaattttagctgtcgacagtcatatctttctcttttctgcccaccaggcgatgcgtctgcaactcgtgactgcaattggagcattggcaggcactgcctgtgcccttctcaccgagggaggggcagtggacagtgacgtggcaggtggtgcaggtcctggctgggtcctgccattcactgcaggcggatttatctacgtagcaacagtgtctgtgctgcctgagctattgagagaggcatctccactgcagtcactgttggaggtgctggggctgctggggggtgttgccatgatggtactgattgcccatcttgagtgaggggtgaggtgacctgtccttcccctaactcctaataaaggcagttggtagtcctggccagtgctaatgccagaaggagtgtcagccttggagattagcagagcctctgtttgaggccttagaggtatgaggatcatacggagcatgagaggccagaaggaccacggagtgggagactgcccagcagcgttgttgcttttggaaaaatcaatgggaccatgaagaagactgggaagacggtagcctacccgatggtccctaatctacgatttctcagcgccagcgtgccgcaggggtccctccaaggcccatctccctctgaactagttagtgatggcttcagggaagacctggcagaaggactggggtagacatcaatcgtgtgtcctgatttgaagggggaggggggctccttgggaagatgtctcagcctgattttttgtctctactcattttataccactgtttgaatgggtgcggaggaacggtgaccaggaataaaagaccttggatcttcggccccacatgcagcctttgtctttatgtggggaactgggccccttggctcctggactccctaggtccccaagtggtggtggatggtcacgcccccgtggtgggaggtcgcgctggtggctaccaaaggcctctgactagtgtggtttctattgggtccgtaccgggcctagccacgcccccggcgtgctcagattggcctaggctcagggcacgcccacccacagccgccatggcgtctcagctccggctccgctctgcgctggccctggtcacaggttcaggggttccctctcagggtgggttggggtgcccgggccatgtcagcgagagccaccccttgagtccctggccctgttgtctgagtttcagtaactttgcgccccgtgacctctgacctcctcccttcttctcccgcttccgcggactcccatctcaggtgcgggtagcggcatcggccgtgcgatcag

SEQ ID NO: 24744 - DNA, 3552 bp, Mus musculus; identical to SEQ ID NO: 24743

SEQ ID NO: 24745 - DNA, 1487 bp, Mus musculus
taccctgagcagcagggccggtgagggcctcggggctgtggacacctcaagggggaggtgggggttgtgaagctggggtatgtccagggcctgggtggtgctggctctcactcccttcctccccacctcaggtttgccaagctgctgttacgtcttcctgccctccgctccatcggcctcaagtgtctggagcacctgttcttcttcaagctcattggcgacacccccattgacaccttcctcatggagatgcttgaggctccccaccagctagcctgagcccagatgcacaccgagtgtcactgaggaggacttgagcctgggcagggggcagagccatgggacaggtgcagagcaggaggggacttgcccagcctgccagggatctggcaacacttagcagggttcgtttggtctccaagtcagaggggaccccagatccctgtgaggactatatgtctaccttcagtggccttgagtctctgaatttgtcggggtctcccatggtgcaggtgattcttcatcctggctccccagcacaaagcactgccctgcttccttctcatttggcctcactcccttctgaagagtggaacagagctcccccagaaaggggtgttgtggggcaggccccccaagctgatgatcatgggagcagggctctgacagcctttatcctctcagacttgacagatggggcagaggagggacctgcctctgactcctgtcagccccatttccacagtccctcctgcagtcagactgaagaataaaggggtagtgaaggggctgctggaggtggaggaacccattgctcttttaatttcctgtgaggagagactgggagttagactcaaagaagtactgtacatccccaggttgacttaaatgtcagggctggagatggcatgtgggcaaggaggcccctcaggtgggctgtcccaaagctccctgggctctgcctcgggtggccctacagctcttccctagtcctcagcacagctaggctgggagcaagtggggacattgatgggggtggccagcctgcagagttgggtgctgggctgcatggtttttgccctggacctcttttgggggttccctcccatctttcacttgcacataaagttgctttccagttaaaatagccattttctggactgagataactatatgggcggtgggcaccagggcatctacctgtggggatatccggtgagaaaccctgacatgttccctggatgctgccacggcctgaggttccctgggcctacagagccggtgcagggtgggggacacaaggcgtgctttgtcgggagggggagagggtgtgccaggttgggggcggggctgcccagggaggagggagagcggctgcttttcaaaggcgccttgtttgccggtgcccttccagcgccagcgggcggcggcgtcttggtcacttcagctttcaccctggcttcgccacaggctcctggcagacccgg

SEQ ID NO: 24746 - DNA, 1301 bp, Mus musculus
atcctgccttcgaaagaaaccccggaagccctacagtgagtatcagatgattgatgtccatcagtcaacactgctccacagtagtacttgtgaggacagcaagatgtgggggtctggtgtgtgtgtgtttgtggcaagcagcatccaggatgactgggctgcttcaggaatggaagttggcgactctgggggaagacttggcaatagagtgagtcctgactttccccctccagctattaggaaacctgtgggaaaaacaaaggaggaactggctttggagaagaagcgggagctagagaagcggttgcaggatgtcagtggacagctcaactccaccaaaaagcctcccaagaaaggtatttcagactgctaaacgttatattcactctttctctccttaagttgaatgctgggacttgaacagaggattggctagctagcaactagcccttgtgactacctgacaaatgaaaatgtcacatcttctacctttaactttacagcgagtgagaagacagagtcatctgcacagcaagtggcagtgtcccgtctcagtgcttctagttccagctcagattccagctcctcgtcgtcatcttcctcttcttcagacaccagcgattcagactcgggctaaggggccaggccagatggggcaggaaggctccgcaggaccggacccctgaaccacccttccccactttcccttgctgtgacgcttcttcatctcacccctccataggagagctggctctgcagtggggaggaaggcagggacatggacaaaatacgattgaattcctagccctcttgggtgtggtgtccctgttgaggatgatgggggtggggcaagggtatgggtgggagtggggataggcctggcataaagccccctgagctgtagctgtcctgttcacttctaagggccctgttttgaggttttaatttatttaagctatgtggtaaggctgggggtgtgtagccgtggtcctccctccagcttccatggggagggaagaagagggagctctttttgttttttacattgactttttttttctacttttcccttttacttccactccatttggggcctggggattttagtcacctctccagttggccccaagactgtcttttctttcttgagtctaacatgtaaataaagaaaatattattgaagttttgagttagttttcttagtgagatttgtttctgtgttcaaagtggctcagaagaaatggttgagtattattggtgctggggtgggtggcgattgttctgcttgattcggtgctggg

SEQ ID NO: 24747 - DNA, 1833 bp, Mus musculus
accatccctaaaaacagccataagaagggggccaagttagcaggtaggaagtggtgacctaaagacaaagctattcaggtgacctgaagatacaaatgagcaacacttacctgtcttttgttactgttttgtagcactccagggcagtattaccagtgcccatcaggtgcctgctgtctcttctgtgtcgcatacagccctgtatacaccaccacctgaaatacctaccactgtcctcaacattccccacccatcagtcatctcttctcctcttcttaagtccctgcattctgctggacccccactccttgctgtatcagcagcgcctccagctcagccccttgccaaggtatacatcagtaggttgattgttcaggatgactaggaagaaaggggttaaaagaaatggaccagaatgactgattccctccatctttctactacagaaaaaaggcgttaaacggaaagcggatactaccacccctacacccacagccatcctggctcctggttccccagctagtcctcctgggagtcttgagccaaaggcagcaaggctccctcctatgcgcagagagagtggccgcccaatcaaacccccacgaaaagacttgcctgactcgcaacagcaacaccagagctctaagaaagggaagctgtcagagcagttaaagcactgcaacggcatcctgaaggaactgctctcaaagaagcacgctgcctacgcctggcccttctataagccagtggacgcttctgctcttggccttcatgattaccatgacatcattaaacaccccatggacctcagcactgtcaaggtacccactgcatggggcagatgggctgctcaggcaggggctggagcctggggaccaataaagcaatacccatgtctcctcatgggaacatggcagtttttcattctgtgtatcttacaaagttgtacaaagtcacatactttgaagtccttgttttttacagttaaggataagtgtggggttagggaaatgtaatgggagagagatggccttggtcacttagaaatgttttcttctagacatagatatttcttcaaacctaccccaaatctttggacttcaaacttgaaccccagggcacagatccctaaggtcatccccacttgtttcaagagagggctgcttgagtcgggttggcagggaaagatgagactctgcctgtgcagcttctcatgctgcctccttctgcagcggaagatggagaaccgtgactaccgggatgcacaggagtttgctgctgatgtacggcttatgttctccaactgctataagtacaatcctccagaccacgatgttgtggctatggcacgaaagttgcaggtgagcttaagagctgcagttgaatttactccacagtaactgcctatggggagagtttaatttttgctgtgctttaaacttgtaagactttgccaatcttttatcaagttggagctggtatgctgggtggctgggcattaaacacagttttgagtctccctgtcttttttaggatgtgtttgagtttcgctatgccaagatgccagatgagccactggaaccaggacctctaccagtctctactgccttgcctcctgggttgaccaaatcctcttcagagtcctccagtgaggaaagtagcagtgagagttcctctgaggaagaggaggaggaggaagaagatgaggacgaggaggagagtgaaagctcagactctgaggaggaaagggctcatcgcctagcagagctgcaggagcaggtagatcattgtgttgtgctctgtaattgggtaagaacttggactaagttaaga

SEQ ID NO: 24748 - DNA, 1173 bp, Mus musculus
cccatttttgtttcagatcttctccataaggctagagttgtcatgtgacattggttttgtatttattttaaccaagcagctcgtcaaactacccagtgtaagctaaagatggacaaaaactattgttaactctttgctggttgcaattcacttcactgctttttatttatttacttgttatggagacagggtttctctgaatagaccaggcagaaatctgtctgcctctggctcccaagtgctgggattaaaggtgtatgctaccactgcccagccagtctggctttgcagggttgcatagtgcaagttagcaacattttcttgatctttcatgttattaccacatctaattctgcttcccctttttgcaggctccctggggaagggaatgcagggttactggggctgggcccagaggcagcagcaccagggaaaaggattcgaaagccttctctgctgtatgagggatttgagagccccacaatggcttctgtaccagctttacaactggcccctgccaatccaccaccccctgaggtgtccaatcccaaaaagccaggacgggtaacaaaccaactgcagtacctgcacaaggtagtgatgaaggctctgtggaagcatcagtttgcatggccattccggcagcctgtggacgctgtgaagctgggtttgccggtgagtaagaggctggatgggcatgagctggaatgcgtgagtgggggtgggtgacctagcataggtgctgcggcccctagggagttcccattctcttagagcaaatagccaccagagttgtagattcttggtcctttgtgcttgttatctctatcttggcatttctcatcttgcctccatgtgtcccttaacttttgtgccctggctccattttacagattcccacccctggttgggagaggaccacggtggccaaaattcttagcttcttcctttccctcatgcagcccatggatagccatccccagaggtaatgtcacaggatgggaagtttgcagcgtgggtgggaggtgggtggctagagaaaaggtatcaggaacctcctagtgggaattaaattacctttttctagactagtttaattggggccgcagtgtgggcaatattccttaatagctagggtgtgcgtgtgggtgtgtgtgttttgtctgttggtag

SEQ ID NO: 24749 - DNA, 1130 bp, Mus musculus
gcctgccccctcgcctttgcttctccaggcgcgtgagcgggcgagcacgcgcggagggggcgggggagctcgcgagcagggtggcgcgcatgagcagcgaagctccgcccctccggctatatataaagcgctggcgcggggctcggcggcgccatttcgcgctggagtggagcagcctctaggacgagctggaggattgcgcctactgacccagcgtctcggagcctctgcgggccgccagtacaatccacgtccatccgcttggaaatggacttcgtcccggcccgcgaccgctcccggcggacagtgcagaccccatagaagcccccgaggctcccctttctcgggccccgcccagtcctcggtgtctgtccacccctctactccgccctcaagaggatttcaaagatggaggcggcggctctctgaaacccctttttggtgctcatccgcctccatcggaggtctgacgcggctctcgtgaccccccggcgaccgcggcgggaagaggggacccctgtccaccggcggcaggccgaattgacgacggtgtccagtttcggggactgccgggtttgcagactgcgttctcctgtggctcgccggccggcagaggccgccgccattttcctgctgtcgccgcctgcggagcgtgcaaagctgccggagttgcggggaggacggcgcaggagacagcgttcccgccggtcccgcaacgaggctgacgcctggagggccaagggcagcggccttccccccacttcccgggttatgctgggcccggcggtgaggggagccgaggctacccggacttcacgcagctgagcggcggcggttccctgaggtcaagatgctgcaaaacgtgactccccacaagtacgtctccgccaaccgtgtgtgggaggggggttggggggcggcgttccggggagcggcgggcgggcgaggcgcgcttccgcgccgcagctgttgacgcgagctcgcggagggggctgcgacggttttgaagcggtggcggcggcccaggtactgcgtctgagcagcctgtcggtttccgcgacgcggagacccattcggccaggacgagttggactgcagggtggtgggggtgtgtgcgcagatccagcctt

SEQ ID NO: 24750 - DNA, 1208 bp, Mus musculus
gggctgcacagggatttgtagatcatggtggggacggtgaaatgagtcactgatggagtaccgtgtataatgatgacctcaggaagagaggatggatccaagggacagaaaacaaaggttgggattttcgttggatgagtgaaaaccatctgaaatgtgttcagcatggaaactgggtacgagcccacagatgaacaagtaggcagtctgtatgaattgatcacaagggtgctacagtgatgatggtgaagagatacgggaagcagtgggaatggaagggagtcctcttctggcctccaagagcattcacacacacattacattcacttatacaggcacacattcatacacatagagaaaaatggtaaaaaaaaaaatccagtctaaaaatttttttttaaatattctggggactttgattgtttctttaaatgttagaatatgacacatcatactttactacacaatcccacctgtctgtaatttcctgataatctccagcatcatttcttttatgtcaatttccagttgcacttctgtttttcttgcaggacttcttggtgacttagtctgccggagactggtgatgctgcctcacactccctcctcattggttggatcagaaaccagcctctgtaaaacctctttgtcatccgcgtcttcatttccactttagtggtaagtgtgaggtttaaatgttagagtttaggggaaggaaaacctgtgtgggaagttccccttgtgcaggcgcttgcctcctggggagagtcctgctcttgtgtctacagaactatgtgatttcaaagggagaccatggggtctgcgatgggactaggggacatagagcactctaagccacaattaggccatgagtgctctagcactagctgttgtggaagtaaatgagtattcagtgtcaaccaccttaatgtatgtccctgccagggaaatctaggagacatgtcaatgggacaggtccgactctgagtcaccagcgtgcatgttcctggttcagctctttcaatggaatggaatggctgtagacccatccgctagtagctggttctcacagcttctgagtcaacacgatttcatggtttgctaggcataaggaaagagccggggatggggaaacagctaaagcctccgagatcccaagagtctagtctaggagggctgtagaactcaagaaaaaaaatggaatctgc

SEQ ID NO: 24751 - DNA, 1193 bp, Mus musculus
cttcagccaacaggtaacacccattgtcttctctcagagacagatctgctttccctacagtatgggggctggggtgatggactcagggcacaaaatggggaagactgagatcccagggttggccaggcagttagcactgagccttgctccctgcacttactgaagcctgtgctctgaagcagcaatgattcggggcatgagaagttcctctctgctcactgccatgctgtaaggagaggcctgaagcagtcagagaagccactgcagagtgaggtctggaaacagccctgtcccctgtgctctacaggactcctgagctgagatgaagtaacaaggctgaaggaaggaattccccccgtgtctccatgccatgaaaacatgtcctgcttggcccacatccctccagagacactgctcttccaggacctggctcctcctgattctccaccctggagatctgtgctcctgatggctgtttatccctgacccaggccttgcagctcccaggacagaggccccactcttcacatctcctgtccccttttgtcccttgccttttgtctggcacttctgagccagtctgctgtcatatgcttttttacatttttctcaaataaacaaataatgaaagtcatctgcttcatagagtttcaagcagaagaaacagtaaaaagaaagacaggacccactataagacactgttcatgcataattgtagatgccagcagctacatgaactgggctcctgaaaggaaagctggggctgtatgggtggggggggggtggcgagagaagaatgagaccaagacaaagtttctgatgaaggtccaatgtttacattttgaatctgaacctaaagcggcgggggacccatcccctactatgccaggttctcctggcttgtcagaatctcctcaggaaaacaaactcagcctctcagcagatgtggcaggacaatagatgttccctacgtcagaagactccaccctatgtgggctagcaggctgtggcatgaacaaggtctaaatcagcctgctcaaggctgggagaaggcacacataataagcatgggagttattgtataagaaataaattcagttttaattcattaattgtcaattagagtatttttacaagttggattaaatttgagaataccacctataatcattacagacagagtcattgaagca

SEQ ID NO: 24752 - DNA, 1804 bp, Mus musculus
gggagtaaagactgtccaggatttggttttatatttgtcaccagatttttattattaatgtaaaaaaaggttggttttgtttttagggtttgttttgttttggttttttttttttggaactatcagtagatggacactggcagctttgtgagggacagagataggctctcgacgtctggcaccgtgctgttgggaaataggccttttatttttgtctgataattggggctcagtttttatttttattttacagacaactgttacaatattgtattccttggcattcattgttcagcatagataatgtgtacagtatttctgtgcacataatcttatttaattttttgcataaaataaatgcttttagatgtcttatgtaagtcttatctttttatcatgctttgctttcttaggaatttttatgtgaaagggctaaagtcacagaaggacatgactacagccaactctcccttatctatgtaaaatagtgactgtgcctcaggtgctcagtttgtaggactatggacatgtgcaagaatgaggagacgtttgaaattaattttctcttatcctcctcaggtgttttgcctgtctccactgtttctgcttggcttgtacccaaaatcctagtgggacgagctgctctgtttgcattatgacttggtcttgctgggatgtgtaaaatcactgaagtatcaaaactctccagaatgaaattctttgatagtatgtcaattaggttctcatagataagtgagagttggctataaattgattctgggtgaaaggtgggcttcttttaagtattttacatgtacatgtttaggtgtcagaagatggctagagaacagtgaataccaatgatagaaacaatatttcttgaaagggcgtaaaagccctgctcttcctgttgcctccaatctgctgacagagcatctatgcgtaccgtcagccaggtccctcattcagtcagtgctatattctatttacaagtttgacttagggccaccagtttgtcactaccaaaacttctttgctggaacccagtgaactctatgttgagcagttagtcacacagtgtaaggaagaaggttcctaaatgttaagggcactcgtcagaatacagcagaagcgttcacatctgttacagctctttggagttttgcattgaaacagttactgtcagggtctgttcctcctgagtgcctggtctctggcaccaagagtaaactggttggggattaagcaaattgagagggacttgtttactggaaatgtgtcaggttttctttgaaaaagaaaatgttaaaatctcttaggaatttggtatttacatctcagagaaatacaacacaaaagtgcagacttaaaattgagaattaatgttaaccctttgtgtctagtttgaagcttcttgtatttgtctaaaactacaagccagaattttgtatctcctttgataaaaagtgtgtatactgtaaagtagttttgcatattcttgtgctgcacatgggctggatttttagaattttttaaaagactttaagccgaaccttgtaatttgtgtaaatgacaagtgtaaaatccttccataaaatgcttaaaatatgcactgtttcaaataaaaccaagaaatgcagcattaaaaaaaaagaaagaaagaaaaagaaaatatgtacaacaaatgacctttccctccccagattacactagtttcttacagcaatagaaacctaattagaacactttctttacagaaatgttaacactgcagtctgatcccagatgcagacagaagtctaga

SEQ ID NO: 24753 - DNA, 1294 bp, Mus musculus
tagccagaagattccccaaaaacccaagtccacagatggcaagacaaaggcagaaacagacaaatagcctggcctaaatggcaagttcccagccaataagaggccctgtctcaaacaaaaggccagaggactaacagggaaaatgtcctccgatcactacacaccaagcatatgcgcattcgagtacatacactgcatgacacaagtacgtaatcatcagatggccacacaccatgcacacgcacacagaggcaggaatgatccaagtcgataatcatcagacacctatgattcaatgcatgagaaaggctggagggtaagttggtacgaaaaagaagtgtccccccaaatgaggcaatgcttagtggccacattgtttgggactaaggattttgctctgtcactgaacaactgcatgtcaggtagtactcagagaggctgcaatggatgagtgagaacttcagctgtggaggtaggaggcgggaggtgggaggctggcagaccaccttgagctccacacatccactggctccctctgtgtctccagtgtgccccaggctatgagggacagaactgctcaaaagtacttgacgcttgtcagtcccagccctgccacaaccacggaacctgtacctccaggcctggaggcttccactgtgcctgccctccaggcttcgtgggactgcgctgtgagggagatgtggatgagtgtctggaccggccctgtcacccctcgggcactgcagcttgccactctttagccaacgccttctactgccagtgtctgcctgggcacacaggtaaggcctggcatctctggggcatatctaagaccaggacaatcttgacggtcccttcccaaaagacagcctctctcctcaccctctgccttcacacctctccccttagaagtcccctacatcttcttgcccacatatcatgtgctgaaccgtcaggaggcagccactgaagccaggtgtgacctcctatctcacccccaccacaggccagcggtgtgaggtggagatggacctctgtcagagccaaccctgctccaatggaggatcctgtgagatcacaacagggccaccccctggcttcacctgtcactgccccaaggtatctgatgcaacagtcctttctctcttctccttacactgataagaacaccagacccagaaccctagggccttgagtggggctggagtcaggattactggagaaggcccaatggtgagtggctctcagaaacagtcatgggaaaggcagaatcagacactagcatggtgcaatt

SEQ ID NO: 24754 - DNA, 1117 bp, Mus musculus
cgctctgagaactaaagcctccctgatgagaaaactgggcctcagagaggttgatgaagacactaaatctagtcgatcggtggtggtgcacacctttgattcagacactcaggaggcagatgtaggcagatctccgagttcgaagccagcatcgtctagagatcaagtcccaggacaggcagcactacacagaaaaccccgtctttaaacaaaacaaaacactaaatcaagaaccaacacttgactggcaacagtggcacacacctttaatcctatcaggaaggttttagtcctagcaggaaagcagcagaggcaggtggatctctatgagttctagaccaccctggtgagttccaggacagtcagagctatatagtgagaatctgtcgcaagcacccctttactccatcaccctaaaaaggcagagcttggctaagatggctgcaattctcccaggggcatgctatcattctcttatccctttgatcggccctagtactcattctcatccgcagatggggtgacacccctgatgtcagccgtcttctgtgggggagtgcagtccacgactggggctagtccacagagactggggctaggaaatctggaaccctgggaaccactgctggatagaggggcctgcccccaggctcacactgtgggcactggagagacgcctctgcacctagctgccagattctctcggccaaccgctgcccgccgcctccttgaggctggagccaaccccaaccagccagaccgcgctgggcgcaccccacttcacactgctgtggctgccgacgctcgggaggtttgccaggtcggcacatatcggggtctctaaaggaagtaggagtacgcttacatataaaacagagaggtcttctctggggtttgacaaagaggaaacagactggagacctgaaggtggcaggtagcgactggcttcggagctgatgggcctataaccccagcactggggaggtgggggtagatagatctctatgtgtcccagactagcctgggctgcgtaagaagacattgtctcaaaacaaagacaggcaacaaaagcgtgagggagcctgacctagaagcccagggtaccctaggggtcaca

SEQ ID NO: 24755 - DNA, 2279 bp, Mus musculus
cgagcagatgtaggagccagggataaaaggggtatgcatggagccgctgtgttattggaatgttggggagagcggtaaggaggtgaagttcaaaatacaggcgcagtggggacagactagaggctcttatgctgtggcaggatggagagcgagtttccccatcactgttaagtacacatcttgtctcagtccatgatacgggaatggaagaagtaccggcgggaaccgtaatggggataccggggtcccaccgatccagaacaatacccattgtcctgcccgcgcgcccatgacgtcaccagggcaacacttgcagccgactgtcggttgccagggcaacgcttcccgcctctgaagaatccaagtagctctcccttcctccccccaccaccaaggccagaacccgtgggaaactaaaaggtaggagtctgacccccaactgcggggtaaccagctcccacgtggtaccctaggaaaaactgcactgcactgggccgctgctgtgaacaacgcccgagccgcccgctctctcctccaggctggagcggataaagatgcccaggacagtagggtgagccacgtcgcagcccccactgaacaagccaaaagcaggggaatccaacaggctccaagggggcggggcccagtgtctgacgggagggcacagactcccggggggcggggactccctaacagtccctgcccccgggctttcgggtctcctccgcaggaacagacgccgcttttcctggcagcgcgcgaaggagccgtggaggtggcgcagctgttgctggagctcggggcggcccggggactgcgagaccaggccgggctggccccaggagatgtggcccgccagcgcagtcactgggacctgctaacgctgctggaaggggctggaccgactacgcaggaggcccgtgcgcacgcacgcaccacgccggggggcggggccgcgccgcgctgccggacgctgtctgcgggagcgcgcccgcgcgggggcggagcctgtctgcaggctcgcacttggtcggtggacttgggagcgcgcggagggaaggtgtatgctcgctgccggagccgatctggaagctgcggaggccccaccacgcgcggccgcaggttctccgcgggctcccgtggacgacgcggggctagggcatcacaggatgactggcctcgcgactgggtggccctggaagcctgcggctccgcctgcagtgcgccgatcccgcctcccagcctgaccccgtccccagaacgtggatcccctcaagttgcctggggtcttccagttcaccaagagattcccttaaactcggttgtaagaaatctgaactaggcagctgcgtggaaggaaggaagcgacacgtacgagtctggaagactccggacttttaaggccaaaataaccgttaagctcacttgtctcccccatagagtatgcacagcaatgggaagagggtttaggatgtccggttgagatagaccgtgattttcctggaaaatagggcagcttcaagaggacaaagttgatttcgagaatccctaaactctggaaccaagaactgtgggcgaattgggtgtaaaatgtttcttgtgtatggtttcccaaaaggagcctctgctatctactgcccacaagtagctggcaactatttattaagcacctacgatgtgccgggtgttgtgtagatgaacagtaagtaaccagtggcccatccagctgatgactccttgccctctctctgcctccccacaaggacactggtgcagggatgaggccatgttctccagtcactgctatctccgagaaccccaaactcatggataataaagctaatttgaagtgctactttatcttctgagggactaaagggtgagatggaaaaagtgcatagtgtttgggaaattcaatactccagaatcattcatatagtgaggggttaaatataaattaaaggcaaaccgacaatctgggaattccagttcatctgggatatcactgaaagtgagaatctccaatagttttcaaatatacaaggtgataactgtgtccctcatctaagaccatttagctataacaaagatccctaagggctcaaagacaggagggtctcgaactgctcatacttcattaggctttaccccaatgctgataaaccaggaggcattctggaagattatccaccatttgaagggcattcaccatgtgccaaagtgcctccttaccagtaagccttagtaatgctgtgaggtaaatgacacgcagttgaggt

SEQ ID NO: 24756 - DNA, 2100 bp, Mus musculus
tcctctcttctctttcattgctgcgtgcatgatggggagggcgggcgggtatatgtgcgactgcacacgtcagcgtcacagggcagctctgcggtagttctcccatctttaggtgggttctggggatcgagctcagatcaggaggcgttacctgacagactcctttctctgctgagctgtgcgtgccctgccccacccccaaacacacaagaaccctctgaggcatcccgtgtgtcatgcctttctttgtaacctgcaggtggaatcactccgacactcgatggggccggggagctacggggataacattgggggaggtcagatatacagtcctcgagaaattcgggtgagtgggtcaaagggccttgctgcctccagctttgggttctcaccggggtgggagtgtgacccccacactgggatttcccattctgactctcattctcttttaccaggccaatggtggctggcaggaggctgtgaccccgtcctcggtgacatccccgacagagggaccaggaagtgttcactctgacacctccaactgaccttgcccctcaaggtcgcggggctaggggcttccaccaggcaactcttaaggactctgggcatctagaggacaaaccccacagaagcacaaaacagagggcgattggggttgtgccctccccgaccagacgcttggtgctggggtgctgacaacatggcagggagagtggggtgtccccatttcttctttctttttttcgtctcacctctcaccaaaaccagatacctatttctcagatgtctctcttaaatctacaacctaacaccagttgtgtttgtcttggactcctcctacttctgttccccaccccacttatatactctggaatctggagatgtcagccctgcccgacccagagatgccaaaaatggggactcttggacagaggccctgggccaacaccccctcccccatgcacccccacctcctgcccctccagacggctttattacctcatacgcagctcatcttaaaccaatagaaccgctcggtggacaagagtgtctgactcggatatctacctcggagggagtttctgctactttagaaaactgttgactaggctttggagttggactttttgttttgtttgtttgttttttaagaaaagaaaccctgaatctgtatttctttttaattgtttctgttggtagtggtgatccttaagttttaatatagtttgaagaagtagggttttgggtgtgtgtggggtgtgtgtgtgtgtcttaaataaacatgctgatttatttttgtttacccacttgagaagtaagagccaaaggggcctagtaagagacaagacagatctggtggtggctacttgacccagccccccagtggggaatcggattttgtaggacaccaggtcctcagcctggacacgtgggtttcttagcctgcgcaggcagatctctgctgtatttcctatggagcatgaagccctgtagcctcctgcctcccccacctccccagtaacctttgggcaagactagactgaactcagtgattttgaaaaagtcaaaaggcttttgttttgttttttaaactatttgcagagtggaaaagattgatcggggaggggagttcttgccaaatacgctaaatatgggctgggtgcttctatatgtgtctcccccagtttcccagaagtacatgtttctgttcagttcttaatctcatgccaaaatcaagggggtggggagaagagggcggtcacagaaagccaggtatgagggaaggctaaaaaagtctcagccctgaacccttctatctgaccccctcagacatcctcaggatcttcaagactgtcaccatggggaacccctcccatcaaaggcccaggctggactgagggagtgaagagggtggtgggaggcaggggccaggggcagtttctctcctcacttgtaaacatagattcacagaaaaaaaaaaaaaagaaagaagtggcagttttaaataaagatatttctttttcccctgggtttagttgagatttttttttttcaaaagaaaagaaaacaaaaaaaccaaaaaaaaaaaaaaaaacc

SEQ ID NO: 24757 - DNA, 1315 bp, Mus musculus
gtgctggtcacacatgatgccggtcctcatcccaccaggacgttgtcaggtgcgggtgctgcctccagtgtccacagaagggctgacaccagatgacgtcccagctctggcagacagcgtccggcactccatgctcaccatcttccgggagatctccactgacggcctgggtggtggcgactgtctgaagaagcctgggggagcgggcgaagcccggctctgagctccacccccttcttcctccctgtacctcccacccagggtctgaggcagggccaggccctcttcccgggtccccactccttcctctccttttggaatcctcaacttctgaagtgaatgtcactccatgttctttccctgccccacccttggactctcctgcgtgggtgcagtctccactccaagccccacctgccatcttgtcttgtgggacagttgcctcccctcatctcaagtggctcatccgatacaagggtggaagacattccatcccacccgtccctcaatggtctttgtgtggccttctctccctctccgccctacactggacaatggacttgtctgttgcgttctgaggagcaatctatccttcacccccaagtccacagcctgatggggctcgtctcctagtgaggactcctcatcctgtggctggaagctgcacctgacactcctcacaggctcacctggggactgactgcctcagtactgtcacctccatggggctgacacccaccatggggctggctcgtgtaactcagagatccctgcccgtgccagggctgagcatactccagatgccaatttctgcttccccctagcctcacccctgccccaggtagtggtcttcagggtcctggccgggcaccatctaaccaaattctggagaggcagacgccagaagctgctctctgctccctggggccttagggagaagaccctgaccctggagagaaggagaggagggcgcttaatttatttcttttttttttttttttttttttttgaggtacctccgtctctgagccaattttcatttcctcccagtggcgttggccacccctgcctcccactctagacccattcctaaaacccaggaggtagactggggggaaggaggaacgggtggggtacagttttgtgtggttggtttttattatctggataacagcaagcaactgaaaataaagagaaagagagacgtggggttctctgcggcctgttgtacttcagtggttgatatccatatcttctgatcccaggttagcaggtgtagcttctgtgtaagttggggaccccagctgctgcgggc

SEQ ID NO: 24758 - DNA, 1610 bp, Mus musculus
cttgaaccccagcactcgggaggcagaggccagagtacagagagaaacaacctccaaataaaaaaggaagtgaaaccatagaaacaatagtactgaaagcgaggacgtgagaagtgttgtgccagcacacgggaggcaggccggcctggtctacacactgagttccaggacagccagggctgcacagagagaccctgtgatgaaaagcaaaaacacaaaaacgaaagaaacaaaccaaaaataaaataagagcaaaaccctccagaggggagggggctggagagacggctcggtggttaagggtactcactggccgctctcccagaggacccaggttcaattgccagtgccacgtggtggcccacaagtgtctatgcctctagttcagggggtcgtcttctggccttgtgcacttccaaatgcgtctgcgcatgaaataaagacctctgtgtgagctctgtgactgctgagctgccttggctcggaagcctgccccatcggtgcacagggtctgtgagagagaagtaaagacggaaggggagaaggcagcatgtgtgcgtgtgtgtgtgtgtgtgtgtgtgtgtgtgtgtgtgacaagttagggaagctgctgaagtgagaggagggtcgaggtgggaggagccttagagccttagtcagctcacagtctctcctgagatgcctgcactatggcgtccaagtaaaaggaggactaaccctcgtctcccttcatcttcagtatttatctgccagccaactgctgctgcttttatgatttgtttattttatgtgttgggtaatttgcctgcacatgcacaatgtgtgtgctcgatgcctccagagatcaggagagggcattactgacagctgttagcaaccatgaggactctggggtcagtcttctgtaagagcagtgagttctgtctaccagcgagcatctcctcagctcctgtagccagcactggtgtcttcttcctgccccctcagatatccagaccaagctggaacctgcctctccgtcttcttctgtccactctgaggcctccttgctgtcagcagactctcccagtcaggtgacacaccttgctctcctgagcatccttctccaggggtgcgggaagctctcccttgaccacctgctccgtaccggcactcctaactaatgtctctgggctgccctgcacagccttttataggagaggaggttctggaagtgaagacagagtctccgtcccctccagggtgcctcctgtgggatgtcccagcctcttcgctcggagctgtccagatcagcatgggtccatcccctgatagttcctcaggtaatggggtctcctgacctctggggtccctgttgagaggcctcacagtgttagaatcccttcctttcccttcccttcattcagggaaagctccggccactcggaagcctccactgcagcccaagcctgtggtactaaccacagttccggtgccacctagagctgggcctaccagcgctgccgtcctcctgcaacccctggtccagcagcctgcgggtgaggaagctagagaggggcctgggagtgagctcactgcccccgagggccctgggccttcagggctcgtgt

SEQ ID NO: 24759 - DNA, 1189 bp, Mus musculus
cgccttattatgaaggaatcgccttcaatggagatttcaacagaatcagcagccatacttcctgctcttggggaacaggacaaaaactgaccctgactgaagtatccgtgaggaatccaggtctctgtataggcaccccaccttccactcacaaacacctatgcggacaaattcagtccatgtccagaacagaagctaattactatcttgtaccttccccggttggatggtgggcttgcaatacaggacttactccctgtgtatcaactaaggtttttaattcatctcatgatttttgtgtcatgatacagctgttaccccacgtatattatcaccctgcatccagtttagaagaaagctatgctggccggaggtcaaaaagagaaccaactactttaaccctggctgcattcatgggaataggtatggcagtaggagtggggacgggagtgtcagctttgatagaaggaagacagggaattcagtctttgagggatgctgtcaatgaagacctagcggcaatagagaagtccattgacgctttaaaaaaatctttgacctccctgtctgaggtagttttgcagaacaggagaggtcttgatttgttgttcctcaaggaaggaggactgtgtgctgcccttaaagaagagtgctgcttctatgcagatcatacaggaatagttagagactctatgcagaaactgagagaaaaattagagcgaaggaaaccggaacgggatgctcaacgggggtggtttgagtcgtggtttgaatcacgaccatcttggataacttctttaatttccgctgtagccggaccaatccttatgatatgcttagctttagttttcagcccttgtataataaatagaggaatggctttcatccagagtaaaattgatacagtaaaactcatggttcttcaaaggcaatatcaacctatagttcaggtagatgaagagttaggggacaccaatctctaaaattctatgattagaattagtctaaacagaagaagaggggaatgaaaggaaataaaactgtaattcatgtaatgtatgttaaatagcccaaagagttgtttgtgagctttgaaacctggggctgagaacatagcagaacagaccaggacatgcctgggcaggcccatcgcctccctagctcccacccctctgacctaagttaaatg

SEQ ID NO: 24760 - DNA, 1190 bp, Mus musculus
tgaagaagagtccaagctaagaacaaccccagaagctctgggctgtgggctgagaggctctgaaaagagtataagaccaaagaggaggcctgtctcttagccccacagggaatccttgggagggatgagcagtatgaggaaagaaaagctgaacacttgagttcggagaggtcctcatggggtctctcagtgtggacagcccattctacccaaaacaaacttttctgaggaaggagtaagcaaagtccttgcacacactaggaaggaaccagaattgaccagtgtaccagcaaggtacagaaacattctgatcttttaatttccatgtatttgtgatgttatcatagtcacatctctaactgtgttaacattctggattttctaagccacagtgaggttatggccaccagagggcagagtaagccctggtggaccagggccagggctctggaccccaggtctaacgccactggtgcttcacttaactgtcactttcctccctccttagctgtccagaacagccctaagggttgccatcgagacaagaggacccagattgtgtacagtgacgatctataggaaaccttgtggatggcttctaggacatgaagctggattccttgtgcctcatatgcccccaagctggtctcagtaaaatcctggggtagaagcttttcacctccgtcagcctctagtctttcagcacttgggattggagttaagccttcaaaagcggctgtcagtgttgatgttaaccagtgcacgcccttaccccaaaaagatgtggaacacacttgttattgtaactgctttaatctgtcctcacactctccctgcaggaagctctttatagaaaacccaaatcctcatctttgagcttgtcctttagccagggcagcacctggaagaggttgatgtggaagtcccgggcataagagggtaccagctgttgccgcctctggtctctgcagacatctactactccccagctaatcacaccaacctgtgtagataagggtatgccatgggtcacttgacacactaataatcccagaaagcttccaagctggcctaaagaagtgcactgggagcctagctccccctgtcttctgtggtgcacataagccagacacttggcattcactgaccagttaagaacatagctgtcagatgaggtgggccctgttctg

SEQ ID NO: 24761 - DNA, 1099 bp, Mus musculus
gggcatgaagactccccctcacactgggaccaccaccactcactgtcctggaacatgaaccccactcactcctacttttctcccacagcactgcacgtgtgtggatgactgctccagctccaattgcctatgtggtcagctcagtatccgatgctggtatgacaaggtacgtgaccctcacctggcaggtctgccaaggagccaggaccctgctgtgttggggaagagacacagggtgtggcaggaagccctgccaggaatgcaatgggcctctctgctggagtatatgcaaatgcgcgctctagtgcctgcgcgcacacttcctggtctctgacctcagcctgcagactctgcaccttgctcttctgctcttggctggggtcagagtggagtttcctgtggagtcctctgggtccagggcagctgaaatgggccccacagagaaaccactatcccctccctccgcaccccaggacgggcggctgctccaggagtttaacaagatcgagccccccctgatctttgagtgtaaccaggcatgctcctgctggagaagctgcaagaaccgcgtggtgcagagcggcatcaagtgaggcgcgcgccccggcaccctgcctcgcctccgcctcccctcccctggggccctcccaggtgtcccacactcagtgtgactccctctccacctctagggtacggctgcagctctaccggactgccaagatgggctggggggtccgagccttgcagaccatcccccagggcacgttcatctgcgagtaagttcactgtgaggccgtggtgcatgagggctctgctgaccctagagctccatgtcaggatacatgtctctgctcgcccaccgagtgtatttccaaacatcatgtcccccctttacctgcacgctgcctagatggagcatgcctgtggcagacagatctgtaaagtggagaatagctttttcctgtgcacttcctcccctctgccgtcagactcacctaggttctctgtggcctttagagcagagaagccccttcacctgctccgaggacctcccagtttctctgttccctcaacttctcagacacccacttctcttggg

SEQ ID NO: 24762 - DNA, 1305 bp, Mus musculus
agccaggcctatgtagagagaccctatcttaagcaaaaaacaagaagggggatgggggctagtgtgggttggctggatggttgagtatactaggccctgggcaggctgcatcccacttcccgcagagcctcgggagagtctggtcacaaggcaggaaggctagaagcctgcatttatgacagttctctgggagtgtgagtcaacagagccaacaaggacctggagtccatctgcaggagtggttgggtggaagaaggtggatccctcaagagggctcctgggctctatgagatgggtttgaagtgtctagatccaagggccaagagctcctgtgtttcctctgccagctttgactacggtgaccgattctgggacatcaagagcaagtatttcacctgccagtgtggctctgagaagtgcaagcattcagcggaggccatcgccctggagcagagccgcctggcccggctggacccccacccggagctgctccctgacctcagctccctgccccccatcaacacctgaggactcttaaaatccaggccgggcactgcccttcagacatttctccatcagagaccccagtaaggcctggaaggtcgatggcccctctcccagagctggtttctcactgggagtgcaagtgacttcagggctggccttccccactgagcctggcctcagttagctgattgaagttgggcctctgccagctgattttctgtgttctcaataaatgttgggtttggtaataaactgtctggtgattgtttcaggacgatgaggactatggggctgaggggacagttgggtaggaagcaagctgtggctgtggggtggaagagaacagctgtggggcacccactggccacaggggtttaaggaaaagcaaatcacaacctagaggtttgggtgtgccacagttgaagtactctaaacaattatgcagtgtttccttatcaaagtgctccggtttcttcctgctgcggtccgtagcagacccggtaagcagctcctgggacccagttctgagccctggtacccctgggctggtcaagagttgagatctgaaaaaggaactgtagaggaccacaggcaggggcggggctgtgacgtctgggagggagggcggggcgggcggcaggtgagcggctaggtctccgtggctccaatcactccggagactgagccatggggagaaagcagaatgagaacgaggctcacggtaaggctaggggcagaggcccgggctctggagagaggtggccgggctctgcagccatggcagctgaggttggatcc

SEQ ID NO: 24763 - DNA, 1305 bp, Mus musculus; identical to SEQ ID NO: 24762

SEQ ID NO: 24764 - DNA, 1162 bp, Mus musculus
agtctctgacgctgtccttgatgtcagctataaatctgactcatttggggaacctcttgagattgagcccagtgtgccaacactggctctggtgaggaacataccctgctctcctgtttctcattgtgcccatcttaactctccagggtgagctctgaggacttcacaggggccccatcccctcacctagatgagggctaaccttggaatccagacaaaggtggaagtgacctagatgtgacctgaatgagctaatcatctaatgagagccagccctttgtcctgcccacatgaaggtgggtggttagctcacttttcagggtaataaagcagtaaaggcggggtggaggggttgttgaaggctttgtatgatgtcactagggcctgtaaagttagcacaatgaacccgctgtgcagattgtaaagctgaccttgttggaatatcctggttttagaaacacataaatcagctttgtgtttgctgttcccctgctgaaaatgttcttctgaattttcagggctttgctgctacgcactgacaagttggacggctttttattgctttgttgccagttatctgaacatgagaggctgtaaggtgtaatctgcgagccctgcgcccagactgaaccagggcctcccttgaacatgagtattagacaaatgaaataagaacttatcttgcccagactatataatggcttggaaatgcatagtttcctgaacgatctcaataaaatacttttaaaagtacttaaatagactttttctgtgtcactttgtggggaggtgtgagaagatatatgggaataaggttttaaccttaccacacaggtgtcaccacctgactgcctacatcaaatgcccaggaaggagctagtcatttcatgtgtctggttcctggtcccttaacagcatctgttctggaagtacagatgaaaattctatacagacctgtaaggctgaccatagttttagcagattagcatctgaatcggtcagatctacctgctaggaacaagtcggcctcccctcccctaagctcccactgcagagggtaaaggacagcatcaagcaccccagccttctggagaccccaccagtagactccaggtgtgcttgcctggtgaatgaacttggccagagactcctggtgcctgct

SEQ ID NO: 24765 - DNA, 1162 bp, Mus musculus; identical to SEQ ID NO: 24764

SEQ ID NO: 24766 - DNA, 1167 bp, Mus musculus
gatgtttaaagttgcttctggttttgtttgtttgcttggtagacacggtcttaatctgcaaaccacacgagccttaaactcccagcaatcctcctgccttagccctgcaagagctgggattacaagtttgtgtcacctctgtggtccccctgaagcttcctctcctcctctccttcctcttcctcctcctccctccatcatcgaggaaggcagtatatctattagcccagacttccactctaaaagtgcaagttcaggcgtgtaccacacccagctctgattcaccagatggaaacaatggaaattttcatgactcttacgatactgagataaacaaattggactgcaggaggtgggaaaacagtcctcagaaatgaaaatagccaagcttctgggtagctgcccctcccacctgaccccagctctgcacccagctcacgttctccatcagagaaaatgcaggcgtgcagagatggtagctgtcctgctgtaatgtaactataatgaaataccatgataaaaaaacaggccggtagtggtggcgcacgctggtaggatttgctgaaggaggcagaggcaggaggatcacgagttcggggccagcttgggctacacatttgccaggcgtggtggcgcacgcctttgatcccagctctagggaggcagaggcaggcagatttctgagttcaaggccagcctgttctacaaagtgagttccaggacagccagagctataccgagaaaccctgtctcgaaaaacaaaacacacaaacaaacaaaaaacaacaggtgagaggagagaattcatttggcttacacttccacattgtagtccatcatcgaaggaagtcaggacaggaactcaggggaggaaacctagaggtagaagccaatgcagaggccatggaaggatgctgttactggcttgcttggcctactttcttatagaacccaccaccagcccaagaatagtctcatccacaatgggctggtcccttccctatcaatctaattaagaaaatgctttacagcaaatcccatggaagaactcactcagttgaggttccctcctttcagatcactctagcttgtgtcaaagttgccataaaattatccggctcaagccggacggtggtggtgcacacctttaatcccagcacttgggag

SEQ ID NO: 24767 - DNA, 1143 bp, Mus musculus
gcaattctggaaaaggctaatctacttcctcgatggtagggcctgtggcagccctgccgggagtataccctggcgtacaggtgggcccggtgcatccgctctggtacagttttgtgatgatcggattacacatattttccagttcttttcttttatgatcaaactcatctttctcagccagctggttggcctccagccaggaaaggacctcattgcatttatccagtattttctttttatcggactcgctgatcttgtccttcagaccctcatcacccacagcgctcttcatattaaaggcgtacgattctaaggcatttttggcagcgattttctccctctggccctcatcctccgctttgtagcgctcggcctcctgcaccatgcgctcaatctcctccttgctcaggcgacccttgtcgttggtgatggtgatcttgttggccttgccggtgctcttgtccatggccgtgacgttcaggataccgttggcgtcgatgtcgaaggtcacctcgatctgtggcacgcccctaggtgcaggaggtattccagtcaagtcaaagcgccccagcaggttgttgtcgcgcgtcatggctctctcgccctcgtacacctggatcagcaccccgggctggttgtccgagtaggtggtgaagatctgcgtctgcttggtggggatggtggagttgcgcttgatcagtacagtcatcacacccccagctgtctccaatcctagagacaggggagctacgtccaacaaaagcaaatcctgtactttttcagatttgtcgcccattaaaatagctgcctggactgcagctccgtaggcgactgcctcatcgggattgatactcttgttgagatcccgtccattaaagtagtcctgaagcagtttttgcacctttgggatgcgggtggagccccctactagaacaatgtcatggattttagccttatccatcttggcatcccgaagagacttttccacgggctcaagtgtgcctctaaataggtctgcacacagctcttcaaaccgtgctctagtgatggacgtgtagaagtcgatgccctcatataaagagtcgatctccaggtttgcctgggtgctggacgacagcgtcctcttggccctctcacacgcag

SEQ ID NO: 24768 - DNA, 2217 bp, Mus musculus
gactaagactgtatgtgtctggatatgactatggagtaatgtttacgatccaactctctgcccgacagggcatgcctttaggccccaatccagccctgccccctgttggactcacggtgactcaatcacaaatcacagtccccatttctcaggaacttagacccaggtctgggccatgggacttgcttaaggccacttacctggtattgaataattctaaaccagagcttacaagtaaatgttggctctgcttggatgcccagccaccctattatgaaggaatagccgttcctggaaattataccacctctactgacaacaaggactgtcgttggcagtatccaggtaaagggagactaaccttagagctaattcagggaaaaggactctgctttgggacaataccccacacccatagacatttatgtaatagcatccaggaagccccagacagggatgcttacattataccccccatcaatacatggtgggcatgcactactgggctgacatcttgcatccacacccaggctcttaacctcacaaatggattttgtgtactggtccagcttgcccctagaattcttcgttactctgatgagatggggaccagactatctccattcccagctgctcgagcgaagcgggctactgttgccgagatcctgggtgcatcagccttcgacttccaagatgagaattataaagtgttaagctctgccatagatgcagatttaatggaactagggaaatccttatccaagtccaaaacctcattaacttctctaagggaggccacccttcgaaatcagcgggaacaagacttccaatctctgcaacaggatggactgtgtaaacctctggagaaaaggtgctgcacctttgtggataacttaaagcatgcgagggagttattggctaaggtgaggaaacgtctagaagacaggaaaagggaaatggaacagggtcagcctgtttggattacagttattgcaactctgtctggattcttgggcctggtcatactcattgtgatatgcaagctctatgttgttaaccccctgatggattcatcaaggaccaggtctccaccatccgacacgtattaaaatgctaacccttggattctgctcaagggtttgagatggactcttaaggtgagagagagtgatcctaacttactccattttaagacaggctgctaggtcaggccttaagtttagtctcagaaaagccataaagaatgggcagccaagccaggcgtggtggcacacacttttaatcccagcacttgggaggcagaggcagacggatttctgagttcgaggccagcctggtctacagtgagttccaggacagccaaggctacacagagaaaccctgtctcggaaaaaaaaaagaatgggctgccaatccacagccaccctgacaacggggggtgggggtggggtagctaaagccaatttgaagaaagcccctatgaaagggcgctttttccttcaaggtacagaccagtccaaaatgtacagacacccctcactatgaacacaaacaatcctggtgtaaattacctaactacagttggaaatctaactggctttaaaaggaaaagagagcctgccgtctctttgtggttgccattttatatagatgatatatattgagctttggtctgttatgctttggaatgcttagtgcaagccctggttgccccagagacccaagtgatgttatgtgaccttgaccctaagttacttctggttggtgaataaagatgcctgcagtcgatagctgggcaggagagaccagggtggggtttagggttcctgagcttggggttgtaagagaagcaccaggagggcgagaaggtgaagggaggaggaagcgggcgtggattgggtgagttgtggaatgatggctatgtgggttggctaattggagttaagagcagcccagatggaaacatgaggaattagatgatggcttactggctggggagtaggcatactagtgtagaggatagatatctgcccagctcttgtgctgattaaggcttgttataaataaaaaggttgtctgtttcttttatcagggaagtaaatggtccaaggtagaaacccctgtggttctgcatttggtttctctgctggggggttggactgctgcttggggaggtgaaacgcaggggcaccaggctgcatctctctctccccactg

SEQ ID NO: 24769 - DNA, 1099 bp, Mus musculus
gatctgacaccctcttctggtgtgtctgaaggcagctacagtgtacttaaatacaataaataaatcttttaaaaaaacagacagatattatattacaactcattaccacagcaatgctacagttatgaagtagcaacaaaagtaattttatggtgtgggagggtcaccacaacatggggagctgtagtaaagggtctccgcattgggaaggaccactgagataagggtgtaagcctgtcataacactatcctttcctgttaggctgcccttggggccctgggcaaggccttgaaccccttggaggactggctgcggctgcacacctacctggctggagatgcccccactctggctgacttagctgctgtgacagccttactgctgcctttccgatacgtgagtcactgagcttggggagggacaaatgcgtgcccgttagacctccttacacggtgactacgataattttttggttcggtttggtttctcgcaggttctggacccttctgcccgccggatctggggcaatgtgactcgctggtttaacacttgtgtccggcaaccggaattccgggctgtgctgggagaagtggccctgtactcgggggccaggtctgtcactcaacagccaggtgaggaggatgggagacagcagagggcacaagggccccttttatcttgaaatcctggggccaccatctggtgtggaggctttgtagggtgagggtcaaagatgatcatcaagcctgaggcaagagctttagactcagcactcttcacagagagtccccagcaaccttgagtctgaatttctgtgcttctctccaggctctgaggtcatcgcaccccaaaaaacacccgcgcagctcaaaaaagaggcaaagaaacgggagaaactagagaaattccagcagaagcagaagacccagcagcagcccccgcacggagaggtgggggggccaaaggctgagcgggagtgggtggagccttgttggggaggctcatgtttgggtctgtgtcttcttctgaacagaagaaaccaaaaccagagaagaaggagaaacgggaccctggggtcattacctatgacctccctac

SEQ ID NO: 24770 - DNA, 1141 bp, Mus musculus
caccctcaactcagccatttctgacattgaggtgtgtctctgcccacagcccgtctccctctagtcttccccagcccaggcctggcccacttctctaaacacccatctcacaggtggataagaaggagctgacaggccgcaccctgcttcctgtgcctggctacaaggagaaggtggagtttggggtccttgtgtcctttgcctacaaggtccaaggctcaggtgggagctgaggacaccaggatgtgggttgggagaggtggggaggaggagagagctcagacacagagccttctgtcacctcagacagcgacgaggaggtggtggtggcaacaacccggattgagaccatgctgggagacgtggctgtagctgtgcaccccaaggatcccagataccaggtgggacggggacattcgtgcctgtgtcctgggatggctgctggctcaggataggctctccccgggtgagggcccagccctgtgtcaaccccactgtttccctccctgttaagcacttaaagggaaagtgtgtcgtccacccattcttgtcccggagccttcccatcgtcttcgatgactttgtagacatggagtttggcacaggtgagcaacggccgtggcctgttgggagaaaagactgaaaaattgtcttcagtcccgtaggcaggactggggctggatatgagaactgttcggacagcagagtggtctgagagctgtgcccttcggcacaagaggtgtggaagggaaccccagcatgcagtagaaccctggcacgccccgtgtcctccaggtgccgtgaagatcaccccggcacatgaccaaaatgactatgaggttgggcagcgacacaggctcgaggccattagcatcatggactcaaagggggccctcatcaatgtgcctccacctttcctggtgaggtgtcgggactgtggggacctgcgtgggaggtggagagctaacgtgggcattgccatgatgaagccttttccatccagggcctgcccaggtttgaggccaggaaggctgtgctggcggcactgaaggagcggggcctgttccgtggagtcaaggacaaccccatggtggtgccgctttgcaagtgagactggggcaggcgcacatggggaagggtg

SEQ ID NO: 24771 - DNA, 2587 bp, Mus musculus
catggcaggaagatgagcaagtctcttggcaatgtcatcgaccccctggatgtcatccatggagtttccttgcaggtggggtactcagtgggtcagctagaaacaactttgcagctgtggctagaacgatctgacacctcccatctcctccctagggcctctatgaccaactactgaacagcaacctggatcccagtgaggtggagaaagccaaagaaggacaggtaaggggtgtgctccgggggtgggctgcagcaggtgggcaggagtgggtgtaccccaggggtgggctgcagcaggtgggcaacctgaccaccctgctcaaccgccctgttcctctgcatcctctgtagaaggccgactttccagcagggattcccgagtgtggcactgatgccctacgctttggactctgtgcctacacatcccaaggtatggtctcccgacctccctcagttgcctgttttcttccctgcaacccgtgatctcctctaccttgggccttcagaggacctctctgagagggcaactggggtggaatcacagacatccctcctctaggtcgagacatcaacctggatgtgaacaggatcctggggtaccgtcacttctgcaacaaactctggaatgctaccaagtttgccctgcgcggccttgggaagggctttgtgccctcagcaacctccaaggtgaggatcttgtcggtggccatcggtgacagtgcctgtgcccacacagtctgtggctccctccactcaagtgtcaagactaaagctgctgtcccctgagatcctccttttagtcagggacagacaggtggaagttgatgattgatggggaagtctctgcagcttggggcccatgaggaatgcagattctcctgtgtcccactctactccctgccctggtagtgtgatggcctactgcctgacgtttctcttcccccaagcctgaagggcacgagagcctggtggaccgctggatccgcagccgcctaactgaggccgtgaggctcagcaatgaaggcttccaggcttacgatttcccggccatcaccaccgcccagtacagcttttggctctatgagctctgtgatgtctatttggtgagcagctggggcggggcctgggcacgtgtagctctgacctcagcttggccctgaaacttgaggtcaccttttggtttttccagtcctaatgggggcagcaggggagggggctccaggtgggacctggccctgagccttctgcctccccatctctaggagtgtctaaaacctgtgctgaatggagtggaccaggtggcggcagagtgtgctcggcagaccctctacacctgcctggatgttggcctgcggctgctctcgcccttcatgccctttgtcacagaggagctattccagagactgccccggcggacaccaaaagcgcctgctagcctctgtgtcaccccgtacccagagccctcagaggtatgaggtgtggcctggagggcatgctgctgccctcctgagcagtccttttctcccactctgccccacagtgctccccctttccccactctgccccacagtgctccccttttccccccgtctgactcacagtgctccccctccccccactctgccctagtgctccccttttcccccagtctgactcacagtgctcccccttcccccactctgccccacagtgctcctggaaggaccctgaagctgaagctgctcttgaactagctctgagcatcactcgagctgtgcgctccctgcgtgctgactacaacctgacccgcaccaggcccgactgtaagcctcagtccctcgcatccacctatcccctgacctccacggccccttggggagcccagggtctggctgtacctcggcttccctttcctctttttccccctcttcgctctacaggtttcttggaagtagccgatgaggccacaggtgccttggcctcggcagtgtcgggctacgtgcaggctctggccagtgcgggcgtggtggctgtcctcgccctgggtgctcctgcaccgcagggctgcgctgtagctgtggcttctgaccgctgctccatccacctgcagctgcaggggctagtggacccagcccgggagttgggcaagctgcaggccaagcgaagtgaggcacagcggcaggctcagcggctgcaggagcgccgtgctgcctccagctactcagcaaaggtgccccttgaggtccaggaggcagatgaagcgaaggtgtgtggaggggatggggtatgccagtgggtcgtgtgtggccaggcagcctgtggactcctgcacaggtggggttgtgtgtgctctggggccctttgtcactgtactctcaagaaaagaagcgctctagaggaagagggacttggaagcctgctgccctgacttcctggtcatcctcacccatctcatcaccctgggctcctctgctctctgggtgtttaggctccttgggtatggggtcaccacatacctcttttgcacccccagttgcaacagacagaggcggagctcaggaaggtggatgaggccatcgccctgttccagaagatgctgtgacccc

SEQ ID NO: 24772 - DNA, 1218 bp, Mus musculus
tttgccttttgaatcctgattctcaaagctagccaagacttaactgttcctctgcctcctcccaactgtcaatcactgggatgccaccagcctacctttgctgatccagaaccaaaggagaaaataatcctgctctcggggtagcttagagattgtggcagtgtatgtcagaattagcaagaggttcagagagcagcctggtaaggatggggtgcgccaagcctaatgctgagtgtgttatttttttcaggctggcagtgatggtgccaagattgggaactgccccttctcccagagactgttcatggtgctctggctcaagggagtcaccttcaacgttaccactgtggacaccaagaggtgggcccacttctgaccctctaaacatcctttgtgtggatgcacgtgcactgcatgcgcatgcgcactctcgtgaacccgtcttccttaaaccggttctctctctcgtctgggacaaatctctccattctatgtccctgtttctgacacacacacacacacacacacacacacacacacactcacacacacacacacatcccttttcctttcttgacgtgtgacctcttctccagacggacagagactgtacagaagctctgccccggtgggcagctgccgttcttgctctatggcaccgaagtgcacacagacaccaacaagatcgaggaattcctggaggccatgctgtgccctcccaggtacagggacacttggaaagaaaaggggagctgggaggctttgcagaacaaaggtcgaagaggggagacagggaggcagggggaagtaccccagaaaggacttcactttatccctctgccttccaggtacccaaagctggctgccctgaaccctgagtccaacacctcgggactggacatatttgcaaagttttctgcctacatcaagaactcaaacccagccctcaatgacagtgagtcttatgggtcaggggcttaggtcctacagggttggggcatctgtgagctcggctgtcagggagatggagaggatgttttcagacccccgctgagcctccattaacctcctggctggctggctgtctcattgctaagacttttggagtttagggtttgttttggttttttgtttgtttgttttttggtttttttgagattttatttatttcttatatacatgagaagtatttgtctgtatatctctgcatcaagagca

SEQ ID NO: 24773 - DNA, 1197 bp, Mus musculus
tcagctgtggagacctcaatgccctcttcctctctccaggcaatggcagcgctgactgatcacccctacgcctctctgaccctcccagatgatgcagctagtgactgtctctttctgcgtcctgggttgcctggtgccacacctttcctcctgcaccgcggaggtggggacctgcccaacagccaggaggtgagggagggaaaaaccgccccaccaaccagagaaagcagtctgtctttcccagtgggagaaaggaggggcccatcctcagaagcctgggtgggacccactgggaactggctagaggggggttgtggctctgttatcaaaacatccttggggtcctccctgcaggctctgcagaagctctctgatgtcaccctggtacctgtgtcctgctcagaactggagaaggctggagctggcctcagctccctctgcctggtgctcagcacacgcccccactgctgagggcctggatttggggatcccactggttaggaatagagctgtatagtgggtagaatcagctaatagaggctgggtagttgtggggagatgccccaggatagggaaggacttagtgtggaaaagaatagaagccattgggtgagtcctctctgtcaaaaccaataaaataaaattgaccttttagataagggctgtgactggtttctcgatgggacaaagggataggatggggctgaaatccaaaactggggtcggtgctagagagacagattctttagcttttttttttttttttttttttttttttggttttttgagacagggtttctctgtgtagccctggctgtcctggaactcagtttgtagaccaggctggcctcaaactcagaaatccgcctacctttgcctcccaagtgctgggattaaaggcgtgcgccaccacacccggctgattctttaacttttgttaaagacaatgtttgtgtagctgtcctggagctcactctgtataccaggctctcctcaaactcaaattcacctgtctctgtcttctgagtgctaggattaaaagcttgagccaccaccgcccagctggactctttcattttaaaaaccctctttatgggcttcctgactcacccctaccgtgccacaggactcaggtacaaagagagacaggagaccgtgtctgttgtggggaatgcaggcagggtggaaagggaatta

SEQ ID NO: 24774 - DNA, 1375 bp, Mus musculus
cagctttgccaagccctgcgaccctgttcccagggagtgtcgagaggacgaggtgtgtggtgtcagtgttggcacctcaggtaggactctggtgcgatggcccttctcgaggtggctcctctctttcctgcccatggctgccgccgcaacctcagcattcctcttttgtcccacagagcaaaaggaggaggaagtcattgagcggaaaggctgcctccccagagcccagtgccctctgctgggccatgcgacctactggtcacggtcctactctctccggcaccagtgctgtgagcaggacctatgcaatgctgccgcctcacagccaccccccaaccttcccctcatgactctgctaccccttgcagccatgatcggctggggagtacatgacttcctctagcccatgcgtccacggctgtcaacccaggattccagtgtcaccgtggacatgaaaacacctgcacagatgctgtggagacacgctcaggagcgtgactttgtataaaaacctcagtcaccgatcccagtacctctacagacccggttcctacagccagagttctgttccctgcatgcaagtggccgcaacctcacctcataagagacccccatatttaaacctagatgtcccaggtcagctaccctgcatgagctgtggggtcccaggcaaagggacagaagtgtcactggggctggtgagaaatagagttctgctagggggcatgtagcttggtacccgagggtctcaagaacagagggctaccttggggaaccataaagagtgtatttaataaaagggctattgggtagagatatagctcaatgatagagtgcttacctaccatacataaggccctgggttcaatcccctacaccataaataaataaataaataaataaataaataagctgtaaaagtagttaagagagctgtctgtgagcctggtaacagtgcacgtggtggtggtggtgaaacacacaagggtgcactttgagaatgaactacggtgggcgggcagaacaggtgtctccccgagccccagtatgtgctgtctacgcacaagagccttgtttcggatgtaggcacccattttaagagctcggtgattaagagcactggttgttcctgcagagaccctgaggttcagttctcagcacccacatgattcacacagatctgtaattccagtcccagaaaatcccaggccctttctggcctcctcaggcactgaacacagtgtagtccacagatgtacatgggggcaaaacaccagtacacataaaaattttaaaaaataaaattaaaaagccaggtatagccacacaccagtgcttgtaactctagggccaaatgaggggcagagaccatgga

SEQ ID NO: 24775 - DNA, 1330 bp, Mus musculus
ttccagtcatagttatggaaaagcttaggagatgccaggctcgccttgctcactgagctctgaatgcaagggccaagatgaatccctgggccctgctgaggttggggttcaccaacccatgttccccacagctatctggtggcacacaccttggggcgccggatgctgtacccaggctccgtgtacctgctccagaaggccctcatgcctgtgctgctgcagggccaggcccgactggtggaagaggtgaggccccctacctgctgctggccctgtcttctgaggggtgtggccccctgccccttgtgaccaggtctttgcatctctcttgcttagtgtaatgggcgccgtgcaaaactgctcgcctgtgatggtaatgagatagacaccatgtttgtggaccgacgggggacagctgagccccaggggcagaagctggtgagaggggccagggagccgaagggggtggtaggtggcagtagagactctggggtccccagtgctacagaacctttcctgtggaaccacagttaaaaatgttattttccagcttcacccaaggacctcttcatcagaaagctctgagagggaagtaggtagggggatgtagctcaggtcgtgcacgaagccctgggttcatcccctgtcccatatacactgagaattggattgtgtacctataatcccagcacccaggagtggagagaagaggatcagaaggtcaaggccagggccagggagatggttcagcgggtgcagtattggccatgcaagcgagaggacctgagttctgatcttgagaacctgtatagagcctggcatggtgaccatgagagctgtagtcctagctctcctgtgggagggaggcgggagacgccttgggcaccccctgccagctggcgtatacagcactgccacaggcaacaaagaccccgccttgaagtcggaggcaaggggacacaggggaggagtccttctcaccgccacacacgtgctgtggatcacgtttaaggtcttggctacatggtgagtttgcagtttaaagatgagaatatcatagccgactggggatgtcactgtagctagcgtatgcagcctgatggcagttcatcaccaaagtgaagtcaggtatagagagttgcctagtgttcgggaagctcacctaaagccaggcatggtgcactctgtcatccctgggctgagttcaaggcctgaccaggataaacaggaccctgtcctacagtaacaaagagtagatgggatggtgatgaaggaggcccaggcaagattctgagttccagtccaccctgaactacctagtgagaccctg

SEQ ID NO: 24776 - DNA, 1173 bp, Mus musculus
ataatccagctctctctcctatccccagatcccttgctcctgtcttttctcccccacctcaaggcccaagcattcataacccaaactggactttaccccttggtctttctgccctgctttcgatggctgagtcgtggcacacacagcagtgcttggcttcttcactgttttgattccttatgactcttgctttgtctccaagctctctgaaagtagctcagttctggttcgtaacgatagtttcctctcgggtttggtgtgctgctgcctcttcccctctgctgctctagagggcctcctctgcgtttgtgtgtttacatttacttactgtgaaaagagaggcaggcagagactaaagaggaacacagagaaggccctgccgagcagtcttgctttgtagaagaatcaaaagcccaggtttctgggtcagatgtatagatgatgggtagggcaaggctcagaaacaggtactagagaaactggaggcgccaccttgcaggtaaggtggggttaccctggaaaactaaacaagcggccaccccacccacgtttcagatgaagagctggaagacaaccccaaccagagcgacttgatcgaacaggcagctgagatgctttatgggttgatccacgcccgctacatcctcaccaaccgaggcatcgcacaaatggtgaggctctgctccttctgcaggaagggaaacaggtgcatgggtccgaggcctggttcctacctggcaaggagcgtggcagaggagagagggagagacccagagctgggctgaggagtgaatcctcactcagggtcccattgaaggtgttttaaggaagggagatgaaaccggaaaacgaaggagtttgcagggaacaaatagcaaatggcccctgggctctgcagactgccccacaaaggaaaggcacttgagtttgaggacctatctcgacagagagggggcttctagtcagaagtgggagacatgggggggggggaccatgaaatgagttgagattgcctcttcatgctcacccaccagtcccttctgttttacacaccttagttggaaaagtaccagcagggagactttggctactgtcctcgtgtatactgtgagaaccagccaatgcttcctatcggtgagtgttgaaagccagaagctgccttcctgtactcag

SEQ ID NO: 24777 - DNA, 1119 bp, Mus musculus
ttgaggctctgttcatctttttttttcctcccctataacatatttctttctctgcagatctaccccctcctcgtcccagttctgtgaggactgtggtgcccactttgaagactccaaccaccacacatctactgctcacctgctgtcactgtccaggagaccccagccctccaaccttccccttggggtgcccacttccagtcctggcttcaggctactgctgagaggtggctgggaaccaggaatggggctaggaccccggggtgaaggccgtgccaaccctatccccactatcctcaagagggaccaggaaggattgggttatagatccccaccccaaccccgagtcacacactttgcagcgcgggatacccgggctgtgtctgggagagagagagtccctcgagttgccacactgagtcagagggagaacagaaggcaagaagaaaagggcagagcctgggagcgagatctaagactgtacatgaacctcgagttctgactgatatggactggccctggtctgtcactcgctggacttgggcctctgacttggacacttggacttccgaacccttaggccttagctgttgggctctgattttagagagaagggcggagagttgggagataaataaacttccttccttgtggtttgtttactttcttgaatgatatagtagggaattggaacaaatctgagagtcacatagaagtctcacctgagccaaaaggacaagctctccgggtgacaaaagagagtccccagtcctgctggctgcattctacctgctccttgaatccccgcccccacacacacattaggaattgccccactttgtaaaacacccctctgagtatgtgtctaggccagtcaagtcagtgacaagtatcacaaaccaagtgtgctatgtgttggagaggggcgggcatagcttggttagagcacctgcctaacactgggaagaccctgggtggggcccctctccaagacaagatgcatccaaaagatgctgctgacattgggagaaaagccaaagatactttgctctgctctgcctgatacaaaccttgaacttgaggaagccagctgtgatgaagtgtaataccttgtggtag

SEQ ID NO: 24778 - DNA, 1131 bp, Mus musculus
ttgagagaccatgcatggctgcatgctgaagtttttaaatttccttccttttttcgctttttgtttgtttggttgttggctgtccgggaactcactctgtagatgaggctgcccttgaccacacaaagatctgcttgcctctgcctcctgagtgctgggaataaagttgtgtgccaccgccaccaggcactttttaactatcttaactgtcttgttcagtttaagggtaccctaactgtcttgttcagtttaggggtatcctacctttgtcagtgtgttatagttgcagcctgggatcatttcctctctttgtggaaatgaggagagcatttcctctctgtaaacactgtagatactgtgatccagtttctgccggtcacaggaatgcatagccctgcttttggggagccatttccactcttgtttgatctgcataaagctcaacagcagtaatattttgtgcctttggtgtcctgtctcttcttccaccctcagtgtcgagggggaacccaagctcaggccagtcagccacccccgcagacaccgcagactgtggcctcagagacggtagccttgaactcacaaacatcagaaccagtcgaaagtgaagctcctcctcgagagcccatggagtcagaagaaatggaggaacgtcccccaacccagactccagagcttgcgccctcaggcccagctcccgcaggcccagctcccgcaggcccagctcccgcgccagagacaaatgcacccaagtgagtgatgcaggaagcctttggggacttggactgggaaggctgtgaggagaggaaagtggttgccaggggtggatctttcagtcgtagtatagcggggtcagaggtcagctcatgtagataaaggtgggtaggcctggcagccttgcagaaggcagggtgatctcggatgcccctggagccgtggagcagaggccttgtctaggtttgtgctcctttgcacagcactgctgggggatgggagcactttgccttctcctcttggctgagagagtccctggggatggtaggactctgaggacagcgtcactcactggcctctgtgtccgcagccacccttcccccgcagagcacgtggaggtgctccaggagcttcagc

SEQ ID NO: 24779 - DNA, 2202 bp, Mus musculus
tccagcccaagttatcttttctttttttttttttttttttttttttttttaaagatttatttatttattatatgtaagtacactgtagctgtcttcagacactccagaagagggcgtcagatcttgttacagatggttgtgagccaccatgtggttgctgggatttgaactccggaccttcggaagagcagtcgggtgctcttacccactgagccatctcaccagccccccaagttatcttttcttaacaaagacactggaactgctcttatctcgcttttctccagcaggtctctgggggtgcacccatcgactctcagttacatcccaacagtggaggcttccgtcctgggacaccctcattgcaccagtacaggtaaaactagattatctacagacttggaatggagatagattgcaggggagagaataccaaagaacagtggattaagagtaacacctctcctcccccaattcttttcaggtcacagcctctgtatctgcccccaggtccagcccctccctcggcactgctttctggggtagctctcaagggccagtttctggatttctcagcactgcaagccacagagctggggaagttgcctgctgggggagttctctaccctccgccatccttcctctactctgcagctttctgccccagccctttgcctgacccacccttgcttcaggtatgaggtgggcagctgctagggcagcagagaggatgtttttgggggactcgacctgttctggtttctcttgtttcccaggagagcctggaaaacattatgtagttcagattataaatcttgagccatcacacccacctgagaattggccttttcctcatttcccaacaggtacgccaggatctgccatccccttcagatttttactctactcctctgcagcctggtggccagagtggcttccttccttcgggagcccctgctcagcaggtatctttgatcttcctacttcccttcgttttctgcccctggcttagtttggatttttcctacatggccttcctgttctaatgggctcactggggatttcttgcagatgcttctacctgtggtagactcacagctgccagtggtgaactttggctccctgccaccagcgccaccccctgctccaccccccctttctctgttacctgtgggtcctgctctccagccccccaacctagctgtgcggcccccacctgctcctgctgctcgggtcttaccttcacccgctagacccttcgcccctagcttggggcgagcagaggtaaggtgtaaagatcagtatttcaagtttttgaaggatggcaaggtatccaaagggaaaaagggtaaatggttcagacagcaagttcatagggtaaattgtttctctttccagctgcacccagtagaactaaagcctttccaggattaccgaaagctgagcagcaaccttgggggtcctgggtcgtcacggactcccccatctggaaggtaaacaggagtgggatatcggctctgcatccccagggactttttttgaaacatgggcaggccttgggtttaccctgaccgtcacctttcctcccttaggcccttctctggtctcaattcccgtctcaaggccccaccttccacctacagtggagtattccgaactcagcgcattgacctctaccagcaggtgaaggagaggaccagtaacacccctctccccccagcctaagttcggatccccttctgagctcctgaaggatcgctgacttactcttccatatatacctatcctcaggcttccccaccagatgccctgcgctggatgccgaagccttgggaacgggcagggccaccttctcgagaagggcctccccgaagagcagaggagcctgggtcccggggggagaaggagcctggattgcccccaccccgctgagggagttccccttgacccccatccccggggcttgtatatagattataaatatataagggggaaaggggtgggtggggaggggttgtgggtctggagtctcacttcccctcttctcctcccctagtcccctatccctggggccgtttgttaaaaaagaataataaaagaattttaaaaaaaaaaaaggggggaaagtcatgggtgggggattaactgtaatgttttacactaagtagtgggttcaataagttacctgttaattacttcagg

SEQ ID NO: 24780 - DNA, 1157 bp, Mus musculus
gtcccaggccctcaggaagaatccagagattcaggcacagaggccctaactccccacatctggaatcgtttacatactggtgagtgaagctggtgggggggtaaagattggagtggggcgtggtgatgtgaggtgggtcttagtttctcactgcctgcctcatggttggtgttctctagccacaagccgaaagagttaccagcctggctccatcgagccctggatggagcccctgagtccctttgaggatgtggcaggcacagaggtaaggagacgctgggaccggagtggcagggaggttactgagtgttggtcatgtttcttcacctgttctgaatagacatagcccttgaggccgttctcttggaattgtctcctttcctctgttggtatgtgacacttctcaggtgtccggtgttttacctagctccttctccacctcgcagatgagtcagtctgacagtggagtggacctgagtggagattctcaggtgtcatcaggtccctgcagtcagcgaagttcccctgatggaggacttaaggggtcagcagagggaccccccaagcggcctggaggaccctcacccctgaatgctgttcctggtgagagtgcatctggctctgaaccctctgaacctcctaggagacggccacctgcttcccatgaaggggaaagaaaggtaaagtcgatggatggatgaagaatgtcagcagggcccttcctccctcctgagtttgactgtcctttttttagccaatgtgctttgctttttcttggtttgtttctctgtcacccaaatacactttgtttcccaatctaggagctgccccgggagcagcctctgccccctggtcccataggcacagaacgatcacagcgcacagatcgaggcccagagccaggccctctccgaccagcccaccgaccgggctctcaagttgagtttggcactaccaacaaggtctgaatgggcttcacttggacatgtcctcgtttgggtatgaggtgatgacaagtgggatgggagtctgaattcaactacaatcttcccacacattacaggactcagacttgtgcctagtggtcggagacactttaaaaggagaaaaggagttggtggcatcagccacagaggtaggtgggaagggagctttga

SEQ ID NO: 24781 - DNA, 2072 bp, Mus musculus
ccgtgaattccgaagttaccgagagttccgaggagacgatgggcgtgggggtggttcaggcggaacaaaccatccttctgctccccgaggccgcactgccagtgagacacgaagtgagggttcagaatatgaagaaatccccaagagacgccgccagcgtggctctgaaacaggcagtgagactcatgagagtgacctggccccctctgacaaggaagcccctccgcccaaagagggagtgcttggtcaggtccctcttgcccccccacaaccaggagctcctccatcaccagccccagcccgattctccactgcccgaggtggtcgtgtcttcactccaagaggagtaccatcacgccgtggccgaggtggggggcggccccctcctgtttgctcaggctggagccctcctgccaagtctctggttccaaagaaacctccaacaggtcctttgcctccaagtaaagaacctttgaaagagaagctgatctcagggcctctgtcccccatgtctcgagctggcaacatgggtgtaggcatggaagatggggagcgaccccgacggaggcgacatggcagggctcaacagcaggacaaaccacctcgtttccgaaggctgaaacaagaacgtgaaaacgctgccagaggagctgatggcaagcccccttccctaacccttgcagcctctacccctggacctgaggagacactaacagcagccacagttcccccaccccctcgccgcacagctgctaagtctcctgatctgtcaaaccagaactcagaccaagccaatgaggaatgggagactgcatcagagagcagcgactttgccagtgagcgccggggtgacaaggagactcccccagcagcacttatgacctctaaagctgtggggactcctggggccaatgcaggtggggctggaccaggcatttcagccatgtctcgtggagacctgagccaacgagccaaggatttgagcaagcggagcttctcaagtcagcggccaggcatggatcgtcaaaaccggcgcccaggcactgggggcaagactggcagtggtggtggcagtagcggaggtggtggtgcaggccctgggggacggaccggcccaggacgaggggataagaggagctggccctctcccaagaaccgaaggtgggtaagagtagatggctaagtagtagtgtggttgctgggttgagggtgggtgccagggagttagagtttttttagtaagtcaggcatcagaaaggcactatatatcttccatcttggcagtcagctaaagagttagcagtccccatgcgtgttttgttctggttttctcaacacactgttgtgaacaggaagcttggaaagggttttatcaggagaagataggatgctagtagtgaagcgacagtagatgcttgacttacagaatttagtgagccctggaactgatgctctgctttctccagccgtcctcctgaggagcgacctccgggacttcctctgcctccgccaccccccagcagttctgctgtcttccgcctggaccaagttatccatagcaaccctgctggaatccaacaggctctggcccaacttagcagccgccaaggaaatgtaactgcaccaggggggcacccaaggcctaagcctgggcctccccaagcccctcagggctcctcccctcggcccccaacccgttatgaccccccaagggccagcagcgctatcagttctggtaagctggaggcaagcgggtgggaatgactccatccccaaaggtcaagtgctggagtggggagcaggagtttgtcatggggcccctgctattgggatctgcagagctggaaggactgggaggtggagtcgggagagcaggctagggtcagtggtagaatgaggtagatgctgacagttttccccttttccccagacccccacttcgaggagccagggccgatggtgaggggggtgggcgggactccccgggactctgccggggttaatcccttccccccgaaacggcgggagcggcctccccgaaaaccggagctgctgcaggaggtgagggatgg

SEQ ID NO: 24782 - DNA, 1185 bp, Mus musculus
ttgtagatagtagctaggcttgggtcagccccagctttgtaccacttagagaactaaggaagtggcatctcactctgcacgacctttccatcctgctctcccagttccgatgcctcaaccgctcagccgccggaatcgcagccactgccggcttcacagacgcctgcctccaaccagccgaaacgacccccaacagcccccgaggtacctggagaactcgaggggttggatgaggaagaatgacccttacgatacttactctgccctccctgtgaccatttgtccctttgctcccccagaacactccttcggttccaagcggggtaaagtcctgggcacaagccagtgtcacccatggagcccatggagatggtgagtgtaagagggttggagcatatgggagggaggcaggggccatgcatttttgaggagagatccttcgtcttgtgtccaaatcacccaggatctagagcctcccgcttttatgtacatgctcaggaagtgaccccatctggtgtataccctcatttcaacaggtggaagggcatcaaacctactgtcgcgattctctcgagaggaatttccgaccctgcaggcggctggagaccaggacaaggctgccaaggaaagggagtctgccgaacagtcgtctgggcccggaccaagcctccgcccccaaagtgagtagctgccctcagaccagggtcgcgcctgctctgtggaaaggctgcgtgctgggttactcacttccttccccgtctttctgatgcatccccttggcctagaccagtggtaacttatcttttcctccctctttgcgtttctaaactacagattctacaacttggagggacggaggtgggcgtggccctgatgacctggagggcccggactccaaacttcatcatggccatgatccccggggtgggctgcagccttcaggcccaccccagttccctccctaccgcgggatgatgccgccctttgtgagtgtgcctgtgttgcttgaagtggtgcactgagagccaggtgttaagggttaggacttagtctttggaagacacagaaagtagaccccaatgagatgggggtgggaggatgagggggtagaaggatacgtttaaagggctggtagactatatgtcccccctctaagcagctattgttgggccgttttgcagatgt

SEQ ID NO: 24783 - DNA, 1180 bp, Mus musculus
acttggttttctttgttgggatatgtcagggggaagggggctgtggaagccaagtggatggtggttgcttaagagactgtagtgttttacacaagccagagaaccaagtatttgggccctaaagagaatgcagagagcttctaagcttttgtctgaaaggggcagaacctgaactgcctactgtctggcccacaggcaccggctcgttttgggggaggtgcctgcaggacccaacgtactcaatgagcttccagcgcaatgtccgatcgctcggggccgactgccaaggggaaggatggaaagaagtattcctcgctcaacctgtttgatacgtataagggcaagtccttagagatccagaaacccgctggtgagggtcctgtcctgtaaagacgttcctgatatttgcaggctgagcatgtgtgggatataggctttagagctctccaacaaaggcaactaacagaccagatgaatactggagacctctcagtttcatcttcagtgctgaagggggtgctgggctttgggtgaaacacagcttatcctcctacaaaggcgtgtttttggttccctgtccttggacacgtaagaatcggaggcaaagtaatgtggtggatttgaaaaggtcttggaccagcttgccccccgcaggctcaggatcaaccatcccacagatgattatgctgtatctcacctttcccaggagagcttaagagattattgagtaatggaatggtttctgagagaagcctatagtgaaaagatggtagggttgtctaaacgggatttgttgacgggacgctgttaggtctcccgtgtgaggtctttttgatcctttttctctccaccgtttcttcagttgcccctcgacatggcctgcagagtctcggaaaagttgccattgcccggcgcatgccacccccagccaaccttccaagcctgaaagccgagaacaaaggcaatgaccccaatgtctcactagtgccgaaagacggaacaggatgggcaagcaaacaggagcagtccgaccccaagaggtagatagctgtgggacttcctgaggctcgtagctttgagctggggagtgtgttaaggcatgagactgagagaagcaccttctgcacctagtttgttagatgactaagaattgaaaccttaaactttgatggagagaaaa

SEQ ID NO: 24784 - DNA, 1259 bp, Mus musculus
tcccatcgtctcctacacacccccttcagccacgcagcctccgggtggcacggagctttcagctggagcctctgctcaccgaaactctacatgtcagtggcaggagagcgagagagggacagtcaggtgcagggcctgtccagaagaagaacaaacaaacagcaccatgaatcggcccttcccaacctccaggagcgggggcctttggcacctcagcccccagtcccctcctcctccccacccatacctccttgcgcccatcggagccttggttgatgtgagctggcagcagagaagcactgaggcacgacggcagaaggcagacctgcgagcagcggatggcagccgcggaggccacgggagcctgaccagatgctgaggaccaatccagcctctttttctgttcccggttttttcctgaaactaatgtgctgtaccccattttccccatacttgttgggggaggaagtgtcctgagtggggtggtggatttttttttctctcattttttttaagttgagggttatgggaactgtcgaatgggaagctgtactgacaagcgaccacgtgggtgtcagagctgagactgagcagtgggtccttccacccctcctgggcccttcccttgagaagatgatggctttctcttgggctgggcttggggcagaattaggcagctgtgggacttatttgaggagcctgtcttccggaagaggtttctgtgaccctgccttggtccctggctctgtgtggagagtgggaagtccagcctggggttaactgtcgcagtgtttgctccttccttcccttcaagggttaggggtggggacgcttattttttatgaaatgtaaggtgatttcctttccattgcctttccacttttgatgctaaaagattgatttattagaactgaagagaaaaacagtgcagccaagcaataaatctcacggctgctgccaggaaggagatggagaaaggaagagaagccatgccctttagttaggagttagttagaaagcaggcaggctcagtgatggaggtgtgagggcatctgaggggttggggactcagggtcaggtcaggaggagctgcttagggtattgcctgataccaggagagctgagaagagggcaggctgtgctgagttagggctcagagaggtgacctggcctgacctggcctggcctgcctggccatggcagctgtgggtgagggaggctgcattcttgttgtctgggaccattgtccccgaccccac

SEQ ID NO: 24785 - DNA, 1159 bp, Mus musculus
ctcagccacctgggagctggggtcagtgagctgctgatgactgtctgttatagtgtccattgcaaccttctggtcttgaggacatttgctaaaggacagctaagtagggcggttgtccctgtcctgttctggtgacattactgcctctcctgggtgttctggcatgctctccccttgagcaccatgccctgttatctttcctccatttccacctggcaactggcaccttgctctgtacagagctcccatctctaatcattgtcaattgggcttaaaagtcaattgatgtggatgctaaccagatctagctggaaagagacctcagcagagtcttctttgtggtggggaggggttttcagtcttctctctcctccccatccttccatggggtgtattggagatcagcgtcctccacccccccaggtttaacccccccactctgccctcctcctgcccccacccctcctccccctcagcctatggagatcttcgtggatgacgagaccaagttgacgctgcacgggttgcagcagtactacgtgaaactgaaggacaacgagaagaaccggaagctctttgatcttctcgatgtcctcgagttcaaccaggtcagtatcgagggtctgtgtaggcgagagcactgcagctgtggcagaagcctgtgtagaagtagcctgtgattgacaggccgtgtaggtgaggaggtgaatcggtggatggagcaagtcccaagtggaagttgggtaagagctgaggtagagtacttgatgacgtcagtaagtggagcagagctctgcaggcacctggcacttgcctaagagctgtggggctcttggtattggaagaggatcctttggttctctagactgtagttctcattcttttttttttttttttttttttaaagatttatttatttattatatgtcagtacactgtagctgtcttcaggcactccagaagagggcatcagatcttgttacagatggttgtgagccaccatgtgattgctgggatttgaactctggacctttggaagagcagtcgggtgctcttacccactgagccatctcaccagccctgtagttctcattcttaacatgttgagaggtggcctcacccttgtgtgctggtcttgtgggtttgaggtcttgtgtcc

SEQ ID NO: 24786 - DNA, 1593 bp, Mus musculus
agcacttttgttcttccaggagttcccaagttcatttctctatgtcagctcccagtcatgtagttacagtggcggaagaagatggtccaatgtcctctgctggccctccaggcaccaggcacacatgcacaagtgtgtgcaggcaaaccccacacacttgaacttaaaaaaacaagactgataagctggtgcatacatcatcatgcccgtgctccctcaggtggtgatctttgtgaagtccgtgcagcgctgcatcgccctggcccagcttctagtggaacagaacttcccagccattgctatccatcgtggaatgccccaggaggagaggtgggttggaggcgcgtgtgtgcctgcccgtccatctgggtcctgtcctgtggaggaggcagtgtggagagaagagagtctcaaccctctcatttactctcacaaaggctctctcggtatcagcagttcaaggattttcagcggaggattcttgtggctaccaacctgtttggccgaggcatggatattgagcgtgtgaacattgctttcaactatgacatgccagaggactcggacacctacctgcacagggtaagctgcccgcccaccccacttcccgtgtgtgctgagcaccccccctctcctttgtcttccctgggaggcttgcagtctaacccttctccttccaggtggccagagcgggccggtttggcaccaagggcttggccatcacatttgtgtcagatgagaatgatgccaagatcctgaatgacgttcaggaccgtttcgaggtcaacatcagcgagctgcccgatgagattgacatttcctcctacagtgagtaccacctatgtgtgtgtgtgtgtgtgtgtgtgtgtgtgtgtgtgtgtgtgtgtgtgtgcctgcctgtgtgcgcgtttcccattttgtatcttactgtgacttttttctccagttgagcagacacggtagaggactcgcgtggtcagtctgctgtagaagaggacacgggtcaggaggagacactgccgccccacccgacaccgacgcctctgcccaccctatctatgcttctctctgcgtcaccaccactcctaaacctagtcctgatttatcagagttgtttgtttgtttgtttttgttttttaacaaaactaagaatgaaacaaccgtgtctgtggtgtctgtaagtgctctgttcatggcttgaaccagggtcattctgagggccgtgagccgggttgtggggcagcgtcattgtcttctttctaaggtggctgtggacagggaggctgggacactgctggggcccggaggtaaagagagcaagccccacgtcctggtacctcagctccttcagctgagtttcttgtatctcccaggtatctaagcggggcctggtaggccatgcctgagcgtgtgtgcacaggcatgtgtgcacaggcgtgtgcgtgcatgcgcattcacgcgcgcgcgcacacacacacacacacacacacacacacacacacacacacacacgcatactggcagcttagctgtgtaaagagcctggagtccctagctggactaagtgtcaaccagggcaggggctggaagcct

SEQ ID NO: 24787 - DNA, 1145 bp, Mus musculus
gggaatttccagtgtcaagatcttccttgaactctcacagcttttcttttcacaggtggaaaaggaggggactatgctctggctccaggttagtgtggggacaggattgttctgggggacattggagtgaagttggagatgatgggagctctgggaatccataatagctcctccagagaaatcttctaggggcctgagttgtgccatgaagtgaatacattcatgtacatatgcatatacatttgttttgttttaccctaggctcccagagctctgaaatgtctctccgagattgtaaaggtgacactctagggtctgattggggaggggcaatgtggacatgattgggtttcagggactcccagaatctcctgagagtgagtggtgggttgctggaatgttgtcttcacagtgatggttcatgactctcattctctagcgtgaagacagctgcctggactgtactgagtgacagacgatgtgttcaggtctctcctgtgacatccagagccctcagttctctttacacaacattgtctgatgttccctgtgagcttgggttcagtgtgaagaactgtggagcccagcctgccctgcacaccaggaccctatccctgcactgccctgtgttcccttccatagccaaccttgctgctccagccaaacactgggggacatctgcatcctgtaagctccatgctaccctgagctgcagctcctcacttccacactgagaataataatttgaatgtgggtggctggagagatggctcagcgctgactgctcttccaaaggtcctgagttcaaatcccagcaaccacatggtggctcacaaccatctgtaatgggatctaacaccctcttctgcagtgtctgaagacagctacagtgtacttacatataataataaataagtctttaaaaaataatttgaaagtgaccttgattgttaacatcttgatctagggctgatttcttgttaatttcatggattgagaatgcttagaggtttttttgtttgtttgattgatttttttgaagaaataaatggcagatgaaggaacttccagaatctgggtcactatgctgtgtgtatctgttgggacaggatgaggctgtggcagctgagtgtgaacagggctgt

SEQ ID NO: 24788 - DNA, 1145 bp, Mus musculus; identical to SEQ ID NO: 24787

SEQ ID NO: 24789 - DNA, 1179 bp, Mus musculus
accatcaaagaaggctctcaactaaagcagcagatccagtccattcagcagtctattgaaaggctcttggtgtaggccgtggcctctgccctttcctgtctactgccaccctgtttgtgtatcatattgtctgttagcatgtactattttcaaccagttactattatattgtactacatctgcgttttatatttttatttttgtcttaataaggttatttttcaccatctcttcattctcttctaccataaaaaatgaaatgatagctaggacaggtgaaaggcagaatgtcaccatttaacaacaggaagaaccaggagaaacttaagccagggacagtgtatactttcatctgcaaacttattccactgggcagggtaggatgacagtgaccctggtcccttgtgcctttgctataagagctccataaatgttactgacactgaggaacttcctttgggtagcagtctctccctccccttatcatttgaagaaatttgatgttgggcctatgtccgggagccatttattaatgtcctgtgtgtttttgatgtatgtagtctgatactctcccatatctggggcagtatcagttcaaagggattctgtggagatcgtggcaatttgctggaacttacagcagagacagtgctagcaggaaacatcctctccttggtaaatggggatgtcttgtggaaccatttgatggccgtgttgggagcccttatcctgttcttcccacagcatgggtcaggtgtattctccctcacatgaagaaagtgataacatgttcattattgagcatcctaataaatatgttcatatttcgttttaaatgaaaaaaaaaaaagaaacatagtaaaggctgtatttcattacattggtatagatctgtgtatattgatacagattaaggttatatttccttaggttggtatacctctttgtgtactgatacaaaattaaggttatatttgctctaatgggtatagaattttgtatactgatagaatattaagagtatatttgcttacatttatagatccttgtatattgatagaaaattgacattcatttgattgcattaatatagatctttgtatattgattcaaattaaggttataattggttgcataggtatagatccctgtatattgatacaaagtaaggttatattt

SEQ ID NO: 24790 - DNA, 1197 bp, Mus musculus
ggtcattggagtgaagctggagttgttgggtgctctgggaacccataatagcttctccgttgtaatcctctggtggcctgtgtcagatcttgctatagatatatctttgtatatatttttccctaggcagggacagctcccagagctctgatatgtttctctcaagattgtaaaggtgacattctatggcctgattgcagaggggcactgtggacatggttgtgtttcagggactcccacaatcccctgtgagtggtgggttgttgggatattgtcttcattgtggtggttcctgaccctcgttctctatcatgaagacagctgcctggagtggactcagtgacagccagtgtgaccttgggtcttcatttttctttagagaacagtgtctgatgttccctgtgagcctatgggctcaatgtgaagaattgtggagcccagccttcgcctacacaccaggaccctgtctctgcattgccctgtgttcccttccaccgccaaccttcctggtctgcagtggaaactaagggttctttggaaagtcggttggatggcgttgtgctggggcaaacacatgaaggagtgtttccttaaagtggatacaggtgtgaaatcctaaggccgactcctgaaggaacatttcactgaagcagacacaggagagaggatgttctgttaaacaagcatgtgaaaggatgcgtgatgaaggattctttgctaaagacacacttatattggtctgccttacattgtgtagtggagctgcattggtcggggcgccatagagagaaacgcacccaaaaattctgatagtattctgcagttgatgcttccaaggacatgagcttattggatgcctgtgctgaggcaagacgcttggaggacacatgatgactggagagtataaataggactccatggagtgactgagacagagtttgccttgctggtacagtgtgtgtcttgtgtcttcactgttcttcacttccataagagaggtacagcaaagaacttctcctggtattcctgctggtccttcctgctggccctagctgaggcctggctgtctctgctaggtcctatcacttctgttgctaacctgactctactgaactgaacaactgctatatccctgaggtgttttcaagtggatggagctgccactgctgacctgtgaattgaactgccaacgtccag

SEQ ID NO: 24791 - DNA, 1197 bp, Mus musculus; identical to SEQ ID NO: 24790

SEQ ID NO: 24792 - DNA, 1323 bp, Mus musculus
tgggctgaaatactgggttcacccatatctaggactctagacgggtgggtaagcaagaactgaggagtggccccagaaataattggcacacgaacattcaatggatgttttaggctctccagaggatggctgagtgggctgtaaggacaggccgagagggtgcagtgccaacaggctttgtggtgcgatggggcatccgagcaactggtttgtgaggtgtccggtgacccaaggcaggggtgagaggaccttgaaggttgaaaatgaaggcctcctggggtcccgtcctaagggttgtcctgtccagacgtccccaacctccgtctggaagacacaggcagatagcgctcgcctcagtttctcccacccccacagctctgctcctccacccacccagggggcggggccagaggtcaaggctagagggtgggattggggagggagaggtgaaaccgtccctaggtgagccgtctttccaccaggcccccggctcggggtgcccaccttccccatggctggacacctggcttcagacttcgccttctcacccccaccaggtgggggtgatgggtcagcagggctggagccgggctgggtggatcctcgaacctggctaagcttccaagggcctccaggtgggcctggaatcggaccaggctcagaggtattggggatctccccatgtccgcccgcatacgagttctgcggagggatggcatactgtggacctcaggttggactgggcctagtcccccaagttggcgtggagactttgcagcctgagggccaggcaggagcacgagtggaaagcaactcagagggaacctcctctgagccctgtgccgaccgccccaatgccgtgaagttggagaaggtggaaccaactcccgaggaggtaagtgaagggacttggctgggctggcagaggcagcagtgaagggaattgggaacatgtagggtagccaccctgcctgccaaaggtggtgatggctgccgggcctcctgagaagcacgacgcagtgtggactagaacccagaattgcaagaatcagaaaccggcctggattgtttcggcctggcccttgtcatgtaggtcacctaggcctggcctgtgtcccgacacttgcttcatgccatcactgtctgtacaccagtgatgcgtgaaaatcagcccccccccaaaaaaaaaaacatatcagcccctctggggacttggatcacagtcggacccaggaacttggccttaaggttaggcatggctgggggggtaaaaaatggtgcttatcctggagttattgttactgaagaggttgggtgtgactg

SEQ ID NO: 24793 - DNA, 1154 bp, Mus musculus
agctgcggcccctgctggagaagtgggtggaggaagccgacaacaatgagaaccttcaggaggtgaggagtggcaggatgtgtgcaatgtctgccaggcacagtcccttctgctgcttccattcctggcttgaaactcctccctctccaaccggagctcgcaggagaagttctgtgtccttattctgctgctatgaattggaatccagagccttaacatttgctaatcaatcaggctctctccttctgagtcaccctctgcccccaccagcctgacaatggtccctccccagaaccccgtctagtgctggtgaaggctcagacctaggtctaccagccccttccagagcccctttcagtaacccctggctctggggccacatccagtcaatgctcccttagcacaatcccttagcggtttgttcttcagtcccatctcaaggtggggctgttgccaagtcaaatactaaagttgctcttgtcgcccccatcttcccctgcccagatatgcaaatcggagaccctggtgcaggcccggaagagaaagcgaactagcattgagaaccgtgtgaggtggagtctggagaccatgtttctgaagtgcccgaagccctccctacagcagatcactcacatcgccaatcagcttgggctagagaaggatgtgagtgccaagatcctgccctgtggtacctggatgtttccctgttcccattccccaccccccccacccccccacccccaccgccgccaccgctgactgcagcatcccagagcttatgatctgatgtccatctctgtgcccatcctaggtggttcgagtatggttctgtaaccggcgccagaagggcaaaagatcaagtattgagtattcccaacgagaagagtatgaggctacagggacacctttcccagggggggctgtatcctttcctctgcccccaggtccccactttggcaccccaggctatggaagcccccacttcaccacactctactcagtcccttttcctgagggcgaggcctttccctctgttcccgtcactgctctgggctctcccatgcattcaaactgaggcaccagccctccctggggatgctgtgagccaaggcaagggaggtagacaagagaacctggagctttggggttaaatt

SEQ ID NO: 24794 - DNA, 1199 bp, Mus musculus
tttcctccctccatctggaattgtcaaagctggaccaggcagcctcctacctacagcaactgatggatgaggctcccagtgccagggagctctgagccccactcacagcccagcgagcattcctcctcagacctgcttgctattggtgcaatgggacctcagaggtgacatggaccaccttcctcattctgtaggagggagcaggtcggaaagtgccacgattcgagaatgaggaggagatggagataaaaggataaaccccaagcacgcaagtgtgagcctttactgccctgtgccccgctcgactgtctcgcctctccattgcctaacaacacacgcacaatttagcttcattttggacacaaagaagaatggaagtaattttcccaacttatcaaaaggagtttagcctagctgatcaacaactcaggctgcagcgcctttctgttacagtagcaaagtttcaaacctggtgactttgacaagtgctcctgtttcgggcagaagtacagggtttgggctccgtgtctctcctcctttcagcctttttttccctgccaccctgacacactgaccacatccaaggtccacttgagctgcccccatgtgtctgcactcttcctgaagagaaggcttcctgatttcctccctctggggtcagtgggcaagacggccagtttcaaagccatcaaatgcaagggagaaaaggataaaagggagccatgctgtgctggggtagcaaaggggccaggtcaatcttagaaagattcagtgaagcaaagacttcggggaggggcaagaaaatgtcccacctagaaggaacgctcagaaaagctgacatagcacattcttggcactccgggtaccaaggaggctattgggggcggagagcatgcaaggggaggcccagagatgaagagcgagtggtatggtgaactgtgctggttactggctgcctgccactcgagcctgcagtaataaagacgtctgtgattacagaggttagcattgaaagaaacatggggtctcgtgaagcgttggacttccctaacactaactacttctgtcttgttggaaagcatcatcacatggccagcatagctgcaaaggcaggcaggcattctttagaagccaggtttccagctaagatgtgcatagctcttaaccaggcctatgaaactttacaagcctggcctacc

SEQ ID NO: 24795 - DNA, 1176 bp, Mus musculus
ttattgtgttttgagacaaggtctcactatgtggccctggctggcctgtaactcacagacatacgcctgcctctgccttctgagtgctgagatcaaaagcatgcatgtgccaccacacccaggcagattattcttaaatataatttaaaaagtttaagttattctattgttttgagacgagtcccgttacctaacctggaccagcctaaaattcaatgatttcctgtgtctcagcctcctaacattaggactataggtgtgtagggtccccttttaccaaatcgctctgtggttcctgtataagtccctcattcctgattcatcctgagtgagggaagtctggttaagcctaaaagccttccattctgcctagatgaggaacagcctcttttctaagcctgcgcatcaccaaggccccgccccgatttctccacttccggttggccagggactcatgttgtaccagtgggattgctctaggtagttaggtactaaccgcctcagttccctaggtctcacacagctgtgtccccttgggttcccgttctcactacctcttctctttcttctttcttcccagatgtggtgaacgactcctctgacaccttcccaccagccccctggtggccacctggcccgcctcccaccaacttcagcagcttgggtgagctgtccttgtccttggttcctcctgcctccccaccccccaccgccggtggggtaggatctgctgtggtgctgaccattctctcccatcagagctggagccccggggtcaacagccagtggccaaggcggaggggagcccaactgccatcctcattggctgcctggtggccatcatcctgctgctgcttctcatcatcgcgctgatgctctggaggctgcactggcgccggctgctcagcaaggtgggcggggctgtgtgtgtatgtgtgtgtgtgcgcgtgcgcatgtgcgtgcgtgtatgtgcatgcacgtgcatgagtgtgtatatgactatatacgagtgtgagagtgtgtatgtgtatgagtgtgttgtatctatgcatgtgtgagtgactgcttagcaaggtgggcagggcagtgtgtatgtgtatatggggggcgcacacatgggagcaacacattgtgtgtgtgtgtgcatgtgagtgtgtgcacatgtgtttgaatgtg

SEQ ID NO: 24796 - DNA, 1145 bp, Mus musculus
caccgaaaacgcagccgaagggtgctctaccctcgagtggtgagtatcgcccgagtgggcatcaggaggtcgcgtcgccctggaacttgtaggtaacaactaggcgcagggaccttcgatctgacgtttccctcttttatctgctcaggtccggcgccagctaccaaccgaggaacccaacattgccaagagggtcctctttctcctgttcgccatcatcttctgccagattttgatggctgaagagggtgtgtcgcagcccctggctccggaggatgctaccagcgccgtgacacctgagcccatttctgcgcccattactgcgcccccggtcctcgagcctttgaacctgacctcggagtcctcggactatgcgctggatcttaaagcttttctccagcaacatccggcggccttctaaacgcgatgggtcacagtccgaagaaacaaaggcaccatggatgggtacctggtgcgagagaacgtatcccaaactgggatttctaaggcaacgctaactcagaacactaccgccaagagacaccgcgggtcctggctaggcccactggggacggacagagactttctccgtgtctaattaatatttatgtatttatgtatatcctcctaggtgaaggaggggtgtatgtaatatttattctaacttatgcaggggtgcgagatatgcctccctgctgtaacacagatatttattacgatttatagggtcggtaagacagagttgtgggagggaggacccgggtggtaggactcccagcttggggattagtctggggggggtgtaataagattaggggtaacactccgtcttccagcacttcaactctgtagtctgttgtaaggctttggaagacccttgggaatccggcctttgatgtcttctggttgcttctcaggggcagctgcaggagtcttgggtccatggattgtcagagggcggctgtctggggtcgcctagtatgtatgttctgtgaacacgaataaacttgatttgcctgtcattattatctgcagttctcgaagtgtatcattcaagcgggggggaggggggagtggcgggaggatgtgactaggtgcccagtcctcaccctttcttgggtcctgaactctttcttggagttaca

SEQ ID NO: 24797 - DNA, 3285 bp, Mus musculus
gggaggcatgccttaggacttgagacattgaggcctcgttgctcttccctgtgcagttctgggaggtgataagcgatgaacatggcatcgaccccaccggtacctaccacggtgacagcgacctgcagctggaccgaatctctgtgtactataatgaagccacaggtgagggcagaaatccccacttaacatttattccctgtcccctgtattggacagtgagcccagatgaatgcatcactggctgccctggaactcccatagatcgtctacctctcaagtgctgggtttaaggagagcatcaccacgccctgtttttccacacttctaagtatctattacccctctgcatggttcccatttttttttccctagactcacaccctaagggactaaagattagctctactgccaccaggtggtagtgcctggaatgacaactttagtgctttgtggctgatctcccacccagaggtaatgcattgctgatccgtcaaacattgacttgaattcctgcaggtggcaagtatgtccctcgagctatcttggtggatctagaacctgggactatggactccgttcgctcaggtccttttggccagatcttcagaccagacaacttcgttttcggtgagttaggtggaatcgatttctatttgctcaactgaattattccagtcgttgaaagattaagaagtatttgtgtttctctcatatcttagtgattaaaccttttcccttactgcattccaggtcagtctggggcaggcaacaactgggctaaaggccactacacagagggagctgagttggttgactctgtcttggatgtggtgcggaaggaggcggagagctgtgattgcctgcaaggctttcagctgacccactcactgggtggaggcactggctctggcatgggcaccctgctcatcagcaagatccgggaagaatatcctgaccgtatcatgaataccttcagtgtggtgccctcgcccaaagtgtctgataccgtggtcgagccctacaatgccaccctgtctgtccatcagttggttgagaacacggatgagacctactgcatcgacaacgaggccctctacgacatctgcttccgtaccctcaagctcaccacgccaacctacggagacctgaaccatctcgtctcggccaccatgagcggcgtcaccacctgcctccgtttcccgggccagcttaatgctgaccttcgaaagctggctgtcaacatggtgccattcccacgtctccacttcttcatgcctggctttgcccctctcaccagccgtggaagccagcagtaccgggccctcactgtgcctgaacttacccagcaggtcttcgatgccaagaacatgatggccgcctgcgacccgcgccacggccggtacctcacagttgccgccgtcttccgtggacggatgtccatgaaggaggtggatgagcagatgctcaacgtgcagaacaagaatagcagctacttcgtggaatggatccccaacaatgtcaagacagctgtctgtgacatcccaccgcgtggcctcaagatggcagtcaccttcattggaaacagcacagccatccaggagctcttcaagcgcatctctgagcagtttacggctatgttccgccggaaggctttcctccactggtatacgggtgagggcatggacgagatggagttcaccgaagctgagagcaacatgaacgacctcgtctctgagtaccagcagtaccaggatgccaccgcggaagaggaagaggatttcggagaggaggcagaagaggaggcctaaggcagagagccctgcatcagctcaggctgcttagatccctcagctttctccaactgccctttgtcctccagtttctttctgctgcctctgtcttgtatttgttttgttctgttttctcattgggggtaaatggtgcctggcacatggcaggcactcaataaatatttgtttgtggaatgtctcctttctctttccactctgacaaacttagatttctgacattctggttgttaccctgtgcttcctactggtatcttttttttttttttttttttttttttggtttttccagacagggtttctctgtatatatagcccaggctgtcctggaactcagaaatccgcctgcctctgcctcccaagtgttgggattaaaggcgtgtgccactatcacccaacaagtatccatttttttaaattattatttgactgtccagttaatattccagaatattctccagaaacctgaggtctgctccagatcctgtgtagaacccagcccaattctaagaactcggatagtaaccatcatcttaaagcaaagtagtggatcagggatgctaggtagagaccaccaggaagagaagggggtggggttttccagtcagggccatttagaatccacctatgctttcagtcagcagggctttgttttgtttttctcctgcctcatctctcagcctcaggagaggtattaacagtattatctccatttatatcctcccagctgtcctgagccaaatctgccattggaagtgtcttccctgtattggttctcctttctcggagagatgggggttgggggtgcggcaaggtcttggtcttggtctctgaacactcccaattcccgctgaaactccacacttgggaaagtatgtttccacctgggtctttcagacactgcccagatgggctgtcaccacctctgccccatgctcctcctgcccttggcttggtcatttcctacctttctatttcgtgttgtacctgctttttttttttttttcatattgaaaagttgacatcgccccagagccaaaaataaatgggaattggaaaaaggctgtgaggctgtgtgctcattcaggggtagttaaagctgctggtggaggaaccggtcccaggttgaattatactgttcccaagtgtcttagtcaggattttacctattactgcacaagcatcatgaccaagatgcagctggggaggaaagggtttattcagcttacatttccacactgctgttcatcaccaaagaaagtcaggactggaactcaagcatggcaggaagccaatggagcgatgtttcttactggcttgcttcccctggcctactcagcctgctctctaacagatcccaatactaccagcccagtgatggtcccacccacaaggggcccttacccccttgatcactaattgaggaaatgtcttacagttggcattttcgcaacggaagctcctttctctgata

SEQ ID NO: 24798 - DNA, 1136 bp, Mus musculus
acagggtttctctgtgtagccctggctgtcctggaactcactctgtagaccaggctggcctcgaactcagaaatccgcctgcctctgcctcccgagtgctgggattaaaggcgtgcaccaccacgcccggcttctctagttcttaatttttctgcttcatctcagatgcagggattatagatatatgccaacatgcttttatcaaatagatttttttttccttattggtagtactaagaattgaacacttggcctcacataggctaagcaaacattctatttctggcatactctcccacccctgaatattgttacatgctttagaataactgataggaaatcatcacctcatggttgttcacatctttaatcccagcacttgggaagcagaggcaaggggatctctgagtttgaggccagcctggtctgattatgtgtttcctttacagatcatggaaagcacccaggtgattgactgggatgctgaagaagaggaagagacagaactatccagtggctccttggggtatagtgtggagcctatagggcagctacgtctcttcagtggaactcatggaccagaaagaggtcaggagatattgggaactaaagtatgattgtgggtctttcttagaagaagttggaagttggagggttggtagaaccatttatatatatgtacacacacatacatacatatacatacataagtacatacacatatacatatgtatataaataagtatgtagtgtgtgtgtatatatatatatgtatatatatatatatacacacacacacacacatacacatatgtttcaaaggggatatgaataactgtaccactaaggatgccaaagaggccacctgagttgactgttcgaggctggttctgggattttcttggagtgattttcttttgtcaagagaaaatgaagagcttcaaataaaactacaatgtggggggtgaaaagatggctcagtgattaagagtgcttactgctcttggagaggtttaggttctcagcacctacatggtggttcacaaccacctggagctctagttacagggggcctgacactatcttctgacctcaggataccagcacacatgtgatagacatgaattcatgcaggt

SEQ ID NO: 24799 - DNA, 1094 bp, Mus musculus
acaaagcctaatgtcaggccacggcggtcctccaggatgaccccctccccgcattcctctgctgcccttaagccaaatactacctgccccacaaaccagcctgctgcctctagaccaacatcccgacccactcggggcagggcaaataggtcctctaccaggaccccagaactgattgtccctgtagaccctgaactccagccttccacctccacagaacagcctgtcatcccaaaacttacgtcccaggtcactgagggcagggtacagatgcctgaaccacttctcacaggtcccgagatccagtctcccacctccacagaacagtctgtcaccccagaccgcaaacctcgggccactcggggcaggccaagtaaatctcccaacaagaccccagaaccacttatttctactggccctgaactccaacctcccacctccatagaacaacctgtcatacctaaacccacttctcgggtcactcggggcagaccacgtaagtcttctgtcaggaccccagaatcagttgtctccactggccctgaacttcagcctctcacctctatagaacagcctgttatccctgaacctagggccactcgaggtagaccaagtaagtcttctatcaagaccccagaatcagttgtccccactggtcctgagctgcagcctcttacctctgcaaaacagcctgtcacccctaacctcacatctcgggcctctcggggtagatcaagtaagtctatcaggaccccggaaccagttgtccaaactggccctgaattccatccatccacctccacagaacagcctgatacccgtgagccctcatctcaggctaggacacgtaggtctgctgtcaagactcctgaagcgagtgtccccacaacccctgaactccagcctttcacttctaaaaaacagcctgcccctaagcctacagctctggtcactcagggaaggacatataaaccctccactgaagattgtgaatcagttgggccagtggcccctgattttgagccttccacctctacagaccatcttgtcacccctaaggttacagatcagagcttaacactacagtcttcacc

SEQ ID NO: 24800 - DNA, 2278 bp, Mus musculus
aggtatattgtatcatcgtaactgtttggggaatgtgaataaggcctaaaatgttttggggaaaaaagggaacttttttcctaagatagccagttttttagttggctcacctgagctgggtatggctctctaccgagcacctgccatctgcccagctgtgctccgaggaagctgctccaggctcagtgccctgactctacctcctgtccagaagccagcattttctctttacttcccggggttctactcaacatgaagcagctcccaggagtgcttggttgagaagatgagggtagctcatgggtgtggctaggaaaggctttagttttgctgtacttgctctgctttgcagtgttggcagttagctgtggtcatctccagtagctcagtgctcactctgccttcttggtggcaggtttctgtgtggagacacaatggatttgaacttgcacttcatttattattattattaatttagagtaaattgtatttgttttttaaagttggctactttccaggatgtggagaaagtagaactcatgaatactgctggtgtttggcttgtcctctgcagtaaacagtagcaaagttatttcaaagtaagcagagctagccgtgggcattgcctgtagccccagtgcttaggaggctgaagtaggaagctcaccagtgccagttcagcctgggctacagcgtgagagtcgggcgtggtggcgcactcgggaggcagacgcaggcagagctctgatttcaaggccagcctgggctacagagtgagttctagaacagtcagggctgttaacagagtaaatcctgtctcgaaagagaaggaaaaaattttttttggtttgttttttgccattttctctggacatgtgtaaggtgagtcagtgctcgttgtgcctgcctggtcactctatgacccagcaagactgttctgtaagcaaaaaaaaactctgttttgtttggttttgtttcttcgagacagggtttctctgtatagccctggctgtcctggaactcactttgtagaccaggctggccttgaactcagaaatctgcctgcctctgcctcccgagtgctgggattaaaggcgtgtgccaccacgcccggctgcaaagaaaacttttaaacatgcatttggtatgtaatcccagcagtccctgtaaaggctagtaggatcagaagttcaagctcatcgtggatttttgggtttttgttttgtttttccgcccccaaggtcagctcagtctaaactgcaaaagattcaaaaatgaaaagcacttgatgttttatctttttggttgggctggggcttgaacctggagcttccttcctttatgcatgctaggcaaagcctctaccactaaaccttattcccagcccctcacctctttccaaatatagaaaagctgaagatttttgttcagcaaggatgagcatatatactgtctgcacagaaagcaatgttcagacatgaagtgaaaacacagtatttgaaggtggtcaaagacaccctaacacaagggcgagacaaaagggacaggtttgattccacctgcataataatatataaagtgtggtgtgaattcacaaaggtaagagcaaattgatgcttgccagaccatgagtacacagaagctgttcaaggggtctagtgttcccctgtggggagttgaaagacttggaatcagaaagaggaagtgattgtacataatgcagaatattaagtactaatgtataaaagggttgggttttttttgctttatgaatttcacttcaataaaaaagttgcttactttatattttcctgcagtgaattatgtataagcttagagaactattggtggttggcacaaatgaggcccaactcatgacaggcaattgctttacaactcattcacaccccagttatatgcttgatctttaaggtttttcttttttggtggtgccgggggttgaatctaaggcttcctgaaatgctgctcaaaagcttcaccgctaagcagtagtcctagaccattgttcatttgatgcctgtggaggccagaagtcagccttggatgtctttcctcgggccactttgtttttctttgagatagggaatctcactgggacatggggcacccttaggctgggctggatggacagtgagccttaggcatttgcctccctagagcttgcattatgatttaaggaggaaacaggttaaagagaaaccacacatagtcaactgcttgtttcccacctataagctcttctgggaccacttcacag

SEQ ID NO: 24801 - DNA, 1200 bp, Mus musculus
tgacaaaggaggttcaagacatcacctcgagcgaagtggagactgctgagcagagacccactgaaagctggaaatggaccctaaactctgggaaggctcgagaacggacgacctgggacatagatacacaaactcagaagccagatcctccagcatcttcagagaagcacccaggaccttctggtatggaggctgaagaggaggctgagaaggaggaggcggaggctcagagcaggcctctgagagcccagcagaacctctgctctgggccctcccccctcccaccagagcactctgggacggaaggctccagacagcaggaagaggaagcggcagaaccccggcccccaacaccagcccctctgtctcccccaccctcggccccaactgccccccaaccctctggggatcccctcatgagccgtctgttctatggggtgaaaccaggaccgggggtgggggccccccgccgcagtggacacaccttcactgtcaacccacggaggtgtgcgccccctgccagcccagcccctccagtcaaccctgctacagctgatgctgcagggtctggatctgggaagaagcggtacccaactgcagaggagatcttggtgctggggggctacctccgtctcagccgcagctgccttgtcaaggggtcccctgaaagacatcacaaacaggtaagagagctaccatgcctgactgggtagaagtctctttctagttctgactggatggcttttttatatgtgtgtgttcttgtcttctattctttttattcctgccgactcccttcctccccctgcacacacccttcctctgggtagccttcctttgccattcattttggagccccaaggattctgttctgcactcaactgctgtgttggggtgtgtcgttttcgggtgtgccctgcctgtttcttctttccccactctctcggtcccctctccttttcttcctctgggcttttgacccagttaaccctctggtaagagagaaaagataacgtacctgtgaaggcgtgtgaaaataacccagggggacagagaaggttgacggagaagttcagggaagttggaatgaaggtctcagccccagaaggaggagggggtcaaagctaatggaggacattccagaacagaggtggggggtgggttggggtgatggaacagagctggctgaaggaagaagga

SEQ ID NO: 24802 - DNA, 1165 bp, Mus musculus
cttccttccttcccgtacctgaagcttctggagtctggatgattcagagccgacagacctggcagggagcctgcctggcagggaagggggttgagcatattctgacttgcttttcccatcccatttctggggcagagccagtagcctaaatttacccctaactcagggtgtttcccgtgggtgacctaagagtgagcatcaagtcctgggttggaactcagaagtgatctggaattgagatggagcaccccctagccctgcagccttccttaactcccagcaactcccggggacctacagacacccctttttctaggtcactaccccttcgtttacagcttccttctctcttgatcacagcctggtttacattaccccccccccccagctcccagtcccacctgcgaagtcccaggtttacaagccatgcctacccacggagagcccccgtgggaccctccaccttcccaccgtttcattgagagtgacttgggaaggtgtgtggccttcttcaactttgctcagtattactgtgcctcggtttcccccaagagggaaggctggggatcctaaccctgaaccccatgaaagttatttaattctgtttctctgtgtggttcatattgaattgaactgcagcgtgggggtgctaaggaagtgcttcgcttccctggcgctcctttgtcagctgcctgatttgtatcgtttttgtaactttccataataaaatggagctcttttcaactctcttgctgccttcctttgtttctttttttaaaagattttgttttggggctggagagatggctcagcggttaagagcactgactgttcttccggaggtcctgagttcaaatcccagcaaccacatggtggctcacaaccatctgtaatgacatctgacgccctctactggtgtgtctgaagacagctacaatgtacttacatataaataataaataaatatttaaaaaaaaggagccgggcatgtggcgtgtggtggcgcatgcctttataaaaaaaaaaaaaaaaagattttgtttatttcatgtctatgagcacactgtagctgtcttcagacacaccagaaaagcccataggatcccatcacagatgatcgtgacccgccatgaggttgctgggggttgagctcaggacctctgga

SEQ ID NO: 24803 - DNA, 1199 bp, Mus musculus
taagcagctgaagtctgtcctgtcttccttgcaggtctttctcaggctcacgtaagcgcatgtcagggtcagtctgccctgctagtgagaagtagccaggtgtagaccaggctggcctcgaactcagaaatccgcctgcctctgcctcctgagttgtttttttgtttttttttgtttttggaccgggtgtctttttcttgtcctgagtcagtggggaagaggatcctttttagaccacacaattaaaattctgatttgagccgggtgtggtggcacaagcctttaatcccagcacttgggaggcagaggcaggcagatttctgagttcgaggccagcctggtctacaaagtgagttccagggcagccagggctacacagagaaaccctgtctcgaaaaaccaaaaaaaaaaaaaaaaaatctgatttggaagtaaaggaaccctattgatttctgctccctcttacaggtactggagattgaaagcagctggcttttggaagtggctccccactactataaggccaaggagctagaagatccccatgctaagaaaatgcccaaaaaagtcggcaagacacgagaagagctgggctagagagtgacatggaccaaaccttgcagctcttttttccttccatactttaatatctagtaaataaaattatttttggaatgaagtgcatgggaactctggaacccagagaaagtgacgtgaaaacctgccttatgtcattgcttaaactttattatttacaagttaaattacacagcagctttacccagcatgatggaaagaaggaaggagagtggagggtggcggctggctctggacattctcgtccacccccacctccttttgtgcgtagcagtcctcagtgcagcctttcacccacgtctgcatcaggccttggagcacaggtgtaagctgggctctggttctgacagccccagggccaccagggctcccaccagcagctttttcacaggcgtcgacggtgagtgtgaaggcatcagctgcagagacaggttaatggaggctggggaggaacacagacatgttctaccctttacccctcccaacactcaccttgtccaggtgatggcgacagatgaggccactggaattcaggtagaaggtggaaaaggcatcgaaggtcctgggaaggggagaggcatcgtgcagagggaggtaagcta

SEQ ID NO: 24804 - DNA, 1163 bp, Mus musculus
gagactagtcagttaacttgtcctcgttactgtgctgtgaaatgccttcttggggaaagggtgtccctgtttgaattaaggaccattaaattgaaagtgccgtttcacttggggcgggggtgggggagggtgagtggaagttagaagaccctaaagatagattactgaggagccaaactggttatactctggaggttgagggaagaggattccaagctcaaggactgaacctttcctgctgagttgatgccttcttcttccacctagcttcccaccctcttccttcgctcccatgactacactatatattcaatggatgtggaattcatcaatgagatcctgaacattcgtaccaagtgagagttgggacgagggagggagaagaggacccatgctaaataaatacttgggtcttgtcccagagaaggttctagctgcttcctgagactgttcccccacaccttggcagaatcagttttggttctgcagtcctgatattcctgtccctttattctcacaggggccggacattttatgttatgtccctgaccctttgccgcttcctggtttggaactattttgcacagtttcggttggagattttacagctgacccgccaccctgagaactggaccctgcaagcccgctggcgtctaataggtctgcccatacatatgctcttcctgcgtttctacaggcgtgataaagaggatctttaccggtaagagggaaggggccgaaactacagtggcttccctaatactgctggtcttccagcagtccttaacttaccctgatttggctgtcatcttactgagggtagagatttttagtctatctttttaaattttaaaataacatgtttgtgtgcatgtggtagtgtacattagagcaagtgagtgtttagaagacagcctgtgggaatgggttctgtcctccaccatgcacaccctggggattgaactcaggtcctcaggcttgcctgcaagtacctgtacacaaccatctcaatggcccagcctgcttttcaaaaagttagtggatttttgtgtctgttaagaactcagtggcgggctggtgagatggctcaacaggtaagagcacccaactgctcttccaaaggtcctgagttcaaatcccagcaaccacatggtggctcacaa

SEQ ID NO: 24805 - DNA, 1219 bp, Mus musculus
gaatccccccgtcctccttagtaaatacacttgtgagattgtcttgagatgagatggggatcacccttgtgctaccccgacttctttttccttcatagcaagagcttccttccctgcttccatgcccagggtgtagaaggacccttctcctggccccctattcccccattagatcaggtgcctcaatgtgtcccctaaagtccttgggagcaggacctccctcctccctccctccttccagattccttttccctctcagtgttgtctcaataaagtgtgggttcttctgtgttttctaaattgacattttcagcgaaaaacatcttaaggtttcagcttcgtttgtgcttcatgctcttcctggggtctcagtgctctttgtccctcttagattcagctctgagatctgtagcagagctcaaagcctccagcctccttctgagtctctgcctttccccatacttactgctggttctattctagagttgcagtaactgtagacctctctactaacttggaagccataggtcccctacccccagtaacatatacctccttccctggccagccttggtaagatgtggatttgctaggagcttgggctcactagcctcaggactgtttctggatccctctcctactctttgacctcatcatgtctgcaccacaaaccccacagtgctctctgaagacaagtcctgcctaagatcaagaatcctcacagggagcccgatggtggtggtggcgcacacctttaatcccagcacttgggaggcagaggcaggcggatttctaaattcaaggccagcctggtctacagagtgaattccaggacaaccaaggactatacagagaaaccctgtctcgaaaatccaaaaaaaaaagaaagaattctcacagggtactgggcatggtggcacaagcctttaatcccagcccttgggaggcagaggtaggcggatcctggtaagagtttgaagccagcctacatagcaagttgcagtccagccaaggctacagagtgaaagcctgtcaataataataataataataataataataatagtccaacagggtcaaccatctctaaaaactaccctttcttccttgctactgtggcctgaaagttcttttatttatttgcttatttatttatttttaaagatttatttattgttatatgtaagtacactgtagctgtcctcagacacaccagaag

SEQ ID NO: 24806 - DNA, 1160 bp, Mus musculus
actttgaaacgtttaaaggcgacccgtactgattacaccttcctccttttgtgttccttttaccccaggttgaattttctcggagaaagacaggccggccatcaggaaaacaaacaagcctcagcaacatctaaacccttgaaaggatcctgagaggggggaaagggaaatcagccaccagcccaaccactcgtgtcttctgcccctccccacctatcttgcccaccccaccagcccacgctgcttgggacttgagatctgtggccgaaggaccgtcaccacataacttcaaaaataatcaaccaccttccctgcccaaacctacccaatctcactcatccagcatttccgttttggaatccactcagactttttttttcaacgaccccctctccctaaatggagttgggcgggggggaaatgaaaactgagttggtctttactttttttaaaagagactttttgatccaatgaggccccacaagtaactgagtttgggtcctggttggttgctttattttttttcctccaaaattttacccctcccccctgagcccgaggtgctgacgtcgcaaaaaaattggatagtaagtgtcgaattttcaaaaaccagccttgaacaagaaatcaacgtttcccgttgtgaaaccaaaaataatgagaggaagaaatgagaccatagaacaaatgtagagtactggagagaaggaccaatcgggtctcttaaatctccattaaaggtcctgtgggtctaaacagtctttgttctctctcccctaccacctgcctcttccctgctgtggagcaggcaagggagagggtgaagggagggccagccagtgaggattttgacggttaacccttgataatccagcagatttccagactgccagagcataagcctttgcgataataaggaggaatggttaccttcctctggttagcagtcttcaaaagggttaatgagctcacatacaaaagatggtggatcttgtggcccagaagtcccacttctttgtgtgtgagacaagcagaacgcctttcaatttgccagattaataagcaatctgtacataaagattgcagggtaaggagatgggcagagaaatattagctggctatgtctttaaagtgactgttaaatcctctctattttaatg

SEQ ID NO: 24807 - DNA, 1160 bp, Mus musculus; identical to SEQ ID NO: 24806

SEQ ID NO: 24808 - DNA, 2337 bp, Mus musculus
cagcttcattcgcaggccctgtaagggaagcttttatcctccgtccctcccacttcagagtcttccgtccctaggcacccgtttctctttcttgcacccatttattcccagcccagttctgatgtttgtttctctctgagaaactctagtatttggttctctttgaaaattttgagataggcctagtagcaaccactcataaactcaggactggggaggctgagacaggaggatggctgtgaattcaaggccagcctgggctgcagagtgagactgtgtccaaacaaagaaaagagaagctgggctttgggcctctacctccatcctgctctcactcttgcttgtccttgcagaccaacggggagatgaggaagaaccatcggctggtaagctggccttgggaaccgaggctggaggtcaggcaggaagcaggactcttgactgaccactcccctctcctcttgggcagaaaatcggcttctttaaccagcagtacgcagagcagctgcacatggaggagacgcccactgagtacctgcagcggagcttcaatctgccctaccaggatgcccggaagtgcttgggccgctttggcctggagagccacgcccacaccatccagatctgcaaactctccggtactgtcattctggggtgcttgaggaggtgacctcatcagctgttcctggaagctgaaggggtttacagcacagatggggagcctccatgtcccaagtacatccatagggttggccttctgcaaggtgggtgacaggagtctcagtacggttccttttgtgacaggtgggcagaaagcccgagttgtgtttgcggagctggcctgtcgggagcctgatgtcctcatcttggtgagtgggcaatcagagaagggttttcgggtcagagctggaaatgcagctgctgcagtgctctgccataggcctcttccttctccacaggatgaaccaaccaataacttggacatagagtccatcgatgccctgggggaggccatcaacgactacaaggggggtaagtgctcagacagaggcagctggagctgctgggcctcttcctcttccactcctgactccctctcttgatttgttcttcctccaaagctgtgatcgttgtcagccacgatgcgcgcctcatcacagaaaccaactgccagttgtgggtggtggaggagcagggtgtcagtcagatcgacggcgactttgatgactacaagcgagaggtgttggaggccctgggtgaggtcatggtcaaccgtcctcgggattgagctccctcctggaagctgctgcaaccagctcctatggctggagtctaggccgtctcccctcatccacctagaagcctgctgcaaccagctcctacggctggagtctaggccgtctcccctcatccacctagaagcctgccatggctgctgccagctgcagcagccacataggccatgaaggtggcgtgttgccttgatgtgtgtgagagcatccatccgtgtggattgtgtccttctcaatgaaggactgtgttccccttgaggtaactgagctggcttgcccacactggctcagtctcttcagaaagaggtgacctttgctgtgctgggttcccctcaggcctagttaaggtggcctcttgtctcaagacctttgccactcagaactgaccctggtccctccttttggaagggtactactgactcactgacacaaacagccagaacctcagggctggaggcaagtgtctgagacctggactgtttcaccaaagatctggtgcctgtggtcccttgtctcgtggggacttgagggcaggaaaggagaactctagaactgaagtctcctttacaggggaggaaataaagtagtggggtgctgacaccatgtgcctgtggggtgcttcctgggctttttgtgtccctccccagccagtgcttgtcctccctgtgccctcatggttgggaaagacaccagaccaaccctgtgaatgaaatggcactccaccctttgctcgggaacccagtctgctgatgtaagatctacagagcatgctgggatagagttacacctataactcacaccctggaggtgtagagagggttttaatggctctagtgagtttgaggcaagcctttagaaaatagagcccttccatagatctggtaccagagatatacatagagtagatcactacacagctggcagagtcaactcatccactcagacactgggtggaaatcatccctcacagagaaaaagcatgaagatgggaccagagagaagtttctactgtagatgtcacctaaagcccctagttacagtgggg

SEQ ID NO: 24809 - DNA, 1211 bp, Mus musculus
gcccctaaatttctttactctgctacaatcaagaactcttccctggactgtgtggaacactgaaaagactgggcgtggggctgacgggactggagcctggttcccgggtgtccctgacttactgttttctctgtttagcttgggcagagaaacgtggttataaaacggccaaggcagctcgaaatgacgtgtacagagcggccaatagcctacttcgcctggcagtggatggccgcctcagcctatgtttctaccctcctggttacagcgaacagagaggtgagagcccacgtgttctccacggtccctactgaggggtcagcctcagggtagacctcaaggccagccagggctactctgggcagttctggtgatagtttactgatgtgcaaatgggtggctgtggggacttgagggcatgcaggaactttgtcagctctgcaggtaggcaatcatgtgaggggtgcgtgccagcatttgaagacttgcctttgccttcacctctgccccagctcgtttgctcagacatctgtttgtgttcctcaggcacctgggagtctcacccagagactgcagagctggtgctgtcgcagggcagggtggggccggcaggtgatgaggaggaggaagaggaggaggaactgagcagctcctgtgaggaggaaggagaggaggaccgggatgcagatgaagagggagaaggagatgaggacaccccaacttcagatcctgggtcctgcctaacagcccgaaacccgtatgccctgctcggggaggatgagtgctgagccccacctggtaccacgtccccctcagcagctttgcttctgggctgagctggaggtgtcttccctttgccaccctgattgtgaataaagattgtctgctttgtagccccttccccaggtggcctgaggtgagagcggtcggtgtgggctgaccgctgtgggaggctttttgcctttcttcttcattctctttgggaagcagagctatctgaggccgctgcccactctctcacatagcactttaggaatccccatggacagaggaggtctatggcaggctcacctggtattagccctcctctccttcacttcaacagagtcctgttaccccctgttgcctggccttggttttacgagcgctttgtgggtgaaggagccgtggaggtgtgtcaccacggaagctttttatagggattttctaga

SEQ ID NO: 24810 - DNA, 1209 bp, Mus musculus
tcctcagaggacacaggtttcagtgaagagcctgggctacgcttgcttatattgtgtaaggcttgctgctcttttttttttttttttaagatttatttatttatctactatatataagtacactgtcgctgtcctcatacactccagaagagggagtcagatctcattacggatggttgtgagccaccatgtggttgctgggatttgaactcaggaccttcggaagaacggtgctcttaagcactgagccatctctccagccccgcttgctgctcttagctgaagagaggcacaactaagcactggcattgctgttgaccctggtcctttctgctgacttgggctgaggcttggctgtgtctgctaggtagtgccactgctgctgatctgtgtttgatatcctgactctaccgagctggactgctggcgtatccgtgaagagtttgtgagtggattgaactgctactgctaacctgtatggggtagtgaaccatgagaggaagcctgataaggtcgagctgggcttggatttgggaagccatggaaggtaggaatttggaaaactctgttgctaaatatgatttgaactgtacgacctgggccaagaagtttcagtggagaagaatttctcggtatgtggcctacagactgtttttgcagtatttcggtgaggtgaagaatctgcctgaggctaaggtgaagagtctcagattaacagcactgacaaagaagtctcgaaaaagcccagcagagactttggttaagattcatgaagagcaacgagcatgttaagctgagaaaggaaaaacacaaaatatacagttcaagtattaaaggggcaccaggaagtgaaatggagataacagattaagggatttggggcaagatcctacccagcttaatttagatccaggcaaggtggtacaaacctttaatcccaggagacaaagacaaacagatctctaaattcaaggccagcctaggacaaagcaggttctaggtgaagaaaagcttaaatccaggcatggtggtacatgcctctaattccagcattacaggagacagagccatgaagatctctgagttcaaagtgaatctacagagcaagttccagggaagccaagcttaggcagaacaggagttggaaaatagaaagctggtaatagaataagggggggagaggatgttccagccccagaaagcagcaga

SEQ ID NO: 24811 - DNA, 1206 bp, Mus musculus
ttttaccattccctcttccattctttgactacctcacttatgctattgaacatcacataaggatgaccatgttgacccactggctcatgtgaattccatcttggcttctgagtctcaaaagaaaatgtgtatttctgtggtgaggggaccagctctacttgcaggtcactagtgcagtgacagttgtagtgtcaaacagacacatagttcggtgtcatcattgatttaactgagtcttgtgtagatttcagtgtgtcttgttaattgtgtgattttttttaaagatttatttatttattatatgtaagtacattgtagctgtcttcagacactccagaagagggagtcagatctcgttacggatggttgtgagccaccatgtcgttgctgagatttgaactctggaccttcggaagagcagtcgggtgctcttacccactgaatcatctcaccagcccaattgtgtgatttcttaaatcttccacacagatcccccaaaggcacatgtgacccatcatcccagacctgcaggtgatgtcaccctgaggtgctgggccctgggcttctaccctgctgacatcaccctgacctggcagttgaatggggaggagctgactcaggacatggagcttgtggagaccaggcctgcaggggatggaaccttctagaagtgggcagctgtggtggtgcctcttgggaaggagcagaattacacatgccatgtgtaccatgaggggctgcctgagcccctcaccctgagatggggtaaggagggtgtgagtgcagagctggggtcagggaaagctggagccttctgcagaccctgagtttgtcatggctcagagctgggatcataacccccacttcatttcctgtacttgtccttcccagagcctcctccatccaccggctccaacatggtaaacatagctgttctggttgtccttggagctgtgatcatcattgaagctatggtggcttttgtgttgaagagcagcagaaaaataggtaggaaagggcagggtctgagttttctctctgtcctctttaaaagtgtagtgggctcattaataggaaacaaatccacaccccacattgctactgtctccacctgggtcctctgtcagttctgggaacttcctagggtcaagattttccttgaactcttacagtttttcttctcacaggtagaaaaggaggggacta

SEQ ID NO: 24812 - DNA, 1158 bp, Mus musculus
gcctctgaaatgttgttataactaccttttaaaaacagaatcagagccaggcggtggtggcacacgcctttaatcccagcactcgggaggcagaggcaggcggagttctgagttcgaggctagcctggtctacaaagtgagttccaggacagccagggctacacagagaagcactgtctcgaaaaaccgaaaaaaaaaaaaagaaggaaaaataaaaacagaatcaggatagattttatctttggcacctacttattactgtgattttttttttgttttattcttgagttcatgtgctctgtgtgtgtgtgtgtgcaacttgcagaaattggttctctccttctaccacaggagttatagtgatctaactcaagttgtcaggcttggcagcagatgccttgaccccaaggccatcacactcaccctaccttggggtttttaaaagaccaattggtctgtgactatgggtgccccatattctgaatctgtctgattatttccccgctctgtggtttaacttggtgctattaacacattctctgtgataatatagtgtgtgtgtggtttttttttaattgcctgttttccataaactgaaagctaaatctaaagtttttgtgaagttcaatcaagtcaaacatttttggaaaataaacttcataggtgatagtgtttgtttttattttattttttttatttctttgtgtgtatgagggggattattttaaatgcctgcacgtttgtctgtgtgtcacgtgtctgaagaggccagaagaactggagttatagccagttgtgggctgctgtgtgggtgctaggaatattgaacctgggttctctggaagagcaggcagtgctcttaacttctgggccatctctctagtctcacgtgatggtgcttagctcacatggttcctcctcgggagacctgtgccagactggctggcttggttacgtggtcaaggtgaacactggctctctccttcctccaggcacattaggaaataatccactgtggcattatagggtctactccaaacctttcacctaatggctctgatgtctgttgatgacaattttattgttacgttggcagttgcagaaggcttatattttctccccactgccttgatccctgaggatcttgatgattctaaa

SEQ ID NO: 24813 - DNA, 1173 bp, Mus musculus
ccacgtgtaagaggcaccctggggcagattagaactcaaagctggtatctaaccccccaggctttggacttttctctcttgtccaatgtccctcaggggctccctccttagctccaggcattgcctcttctctagattttttttttatcagcctctgggtcacttgtctcctctccctcaccccgtttctttcttccccttcaaggggcgcatcagactttcccagcagccagcccttccacatgtgcatgtgagttgtgagtggagcagctgagagtgctagggtttgtcagcagtgtgtctgtcccctgatcaaccctgggagtagctactatacagaggcccctgtctgtgcctgagagctctgcctcggaagctgccatgatgaggagtgctgaggagagagatccacttaaaaccactacccagaatgctggcgtcagcagattttgtctgtattcaggtttccctggagcaaagcgccggaagcttctggaatagtccttaacagccatggtttgacaattgtgcttgttttccaaattgtacctctctgcgaagccagcctgccctctgccccaaccccctccaccctactgactaatgtagtgcccatcacttactaacatgctgtggtgatagtaatcattttcatattgatttttttttactctcttgtctgcttccctctgctaggatgtctgcactacacaggtaggggtttttcttcttttttattgctacctctagcttctagaccagtccctgcctggcacaaggaatcactaagcaaaggtttgtggaatgagtgaaaagaagcagcaaatcggtcaacacagaactgtggaggtttcagtctctccaaagaatcctctcacaagatatgcccgtcctctctgacctgggcacttgtcttcctttcatgtagacagcaccactgtcttccttctgcacaaggggtttttttctccgtgatccttgctgcaaagcagtcatgggatgctcgggttctctcttgtgctccttgttgccatttccataccccaggtcgacgagcgacctccaggatgaccttcctccctgttcctattgcctcctgccaccattccccaaggagcagcccggtgggtgactgggttgcaactagttgcagcttagagcttagtagtccat

SEQ ID NO: 24814 - DNA, 1141 bp, Mus musculus
tcgtcgaaatgtgagtgtgggtggcccagtgtccctggccaccatctcactgttgctttatagctctatcgagttcttggttggaaagaaaaataggtgggaataaaactatgcggtaccaactgcctggagttaggggtgggggcgggggcaagccatggcagaatgggagtcaggtttttccgactctctcttgaattcctgggggaagaggctaaggcagctggattccagaaaagtagggagaggttttcacacagatctggtggaaatgaaactgactgaacactgctcttcatccttcttagctggctttctctctctccattcaggctgctgtatttatgagaagcctcgggcctttggcgagagctccaccgagagtgatgaggatgaagaagaaggctgtagtcataagcactgtgtacggggtcaccgcaaaggacggcgtcctacaaccccagcacccaccccaaccactcctccacagcctcctgatccctctaagccccctccaggacctatgcagcactaaatccctctcaccattcatgtgtctgcctgccccaaatatatccatctgacatggggactccacccattgcctccgttctcctgcccccttcttccgtctcctgagtgatagagaagaggaagaggagggtggatacagatcctggaattctgacttgctgctgttccagaacccaggcttctgggttctcccagcccctgcttccctacagtttgctcccatgcctgggatccaggcatcttggtcccagtctatcccttttgttctcactgccaaactacctgtcctgggatccagtatcttggccacctgcaccctcagcttgagtcccaagcacttcaactgggttttcaacggtcccagctttcactgccagggctccaatcagatgccaggcaatcttgcaccccagttctgcgtattaatcctggcttatggttcttctactgatgcagttttcctaaatcttagttcttgcctgtgggatgtaaggttgtgtggagactatagggttccctggcccttctgctcctcttaccccttatggctctccaaaggagttaggagaggtctttgtcattcacacctaatggaaagtggaaccaa

SEQ ID NO: 24815 - DNA, 1199 bp, Mus musculus
caggactggagttaaagatggttgtgaaccaccgtgtggttgctagggatcaaacctagattctctgcaacagcaacaagtactcttaaccagtgagccaaatctccagctcccattaatcatttaaaattgctccttttattctttaaatgtatgttaagtatattgaaaatgtttgtgtgtgtgatgattctgatatccgatgtttctgaggatctgatactgccagtttctgctgaccttttcatggtactgttttgctttgtaatttttgagtgtgaactccaggtttctcacagtgtggatgaatgcagcactcccagcatggatagggttctttgaggaagatctgtgccaccatgtccagctacagttttttttcttttcttatgaattacagtttagccttttctttctcttggctagtgattttctgtcctagggaatctgcgtacttcatagtaataattagatatcagttattagatattctttttggttaaatataacgagtcttcttcctccataggtttcaggaaaaggaagattcttgacccttttttctggcaacccagcaacaatcctttccttctctcggaagtgaagatactcgtctttgatgcctccttggtcccctccggctaccatgctttgttctcagaataagatcgtcgacccagaatactcctttcccttttgaatttactaaagttatttttctatgaagccttgatgttatgtgtgttactcttaatcatttattctggtcaggctggtgatatatgccctgtaatcccagcacttcacagatacagtgtgagctatatcacgacatgactaaaaactaaaaaataacaataatcggtcttattccaaaggaaatttaggtgaagtagagatatagatataaaaaaagaaaaaactataataaaatgatggagtctggaatgaggtttttatgggtctaagagattccccatgaccataaacaaattaataagagtctttattaaatactcatggcaccaagattgcaattgagagcattcccaagaagcagcatcaaagcttataaagttagaaaccaccagattacatatattctgtctacacataggcagagtctaattttagcatatgtcttgcagttagttgtcttagccattgagcagaataggtaaatttgattacaaaagcag

SEQ ID NO: 24816 - DNA, 1196 bp, Mus musculus
gggcacaaatactgcttaaatccccaaaacaatgcacaatgcttaaatttaccaaactttttttcagacccccccccccacaaaggtacatgtgagccatcaccccagacctgaaggtgaagtcaccctgaggtgctgggccctggactgcttccctgctgacgtcatgctgacctggcagagggatgaggaggacctgacccaggtcatggaccttgtggagaccaggcctgctggggatggaaccttccagaagtgggcagctctggtggtaccttctgggaggagcagaaatatacgtgctgtgtggagcatgagggactgcctgagcatctcaccctgagatggggtaaggagaagtttgagcacagagcctgttattaaggagagactcctgagtagagtctgtgctaggagctggggattagatcccttgaactcttccctctctttccctttctctcttcctagaacccccacctccttggcctgtggttggaataactgttggtgtagttctccttggggttatcatcattggagcactgattgccattgtgaagacgaggaagaagagagcaggtagggaagggattgtatctgagggtttacatagatttgaagccctacatggaaatgtgttcattgctcattttattacattgagactcatctatgtataagtgcttacccaacccaggactctgtatagcaccttttgttgttgttgttgttgttgttgctgttgttgctgttgttatttttgagacagaatctctctacataacccttggctgtcctggagctgactctgtagtttaggctgctttcaaactcttgagatccacctgcctttgcctcctgaatactgggattaaaggtgtatgccaccatgcctggctgcactagcccttttgtacagtccagggatctggggaggggtgttcctctaggacatcatcatcctgcatccttcccagtcattctcttgccctatgtggcaagataactgtcccaggaatctgctttcatcttgtatttctaccttgtaccatcctgtcccggctcttgagtctctttacacactaggaaatcacctagagtatagaaaggaaccagagagctttgtcgctttcccaaacatttctacagctggataccacatgagttctcagctccacctgctgaatgaccac

SEQ ID NO: 24817 - DNA, 1216 bp, Mus musculus
tgagattcagacctggtgacaaatgtctgtaagactagcacccaggaggctgaggcatgaagattgaaagttctttctttgggacaaatatcccacagcccccatcctacccagtttggatcccacctacctggtgtacagtatctacctggatctccttcatcttaccctcaccatccctcagctccactgccatactagctgtcctgttggtaggacatcttgggttccccctttgtgctttgttttgtattgtattgttttatccccgtgggcaccaaactctcactatgtatgtagttgcggatgatcatgaattccttatgtttttgcctccccctctcatgggtatttgcgggtgggggttgggctcactaataaagtaatttaaggatagactcaaaaagaatctcaagatcgttttcaggacaagcaggctgtaaagtctcagcagcttcagggaagagaagaatggaggagagagggccgttataaactggcatgggggtaagacatgtagcagacaagcagccacgtgacaaggaagaaggctttaaagaaagagtagtggagctgaaaatgttggagagaagaccctgagtgttgaggaaattatgcttagaaaagagacagaagaaaagggaaaggactaattcaggaaagtgggcagatttacaaacctccctgactgtggccagcagctactgcactagggccaggaattctgggagaacaacgatggtatctcattagagcattaattattctgcctctttcttttgtgtggattaaggtgagcatgccttcctaggtgtgtccctaggtcaagtaaataaatgatcttgccctactggaactgtaggtctctatccagcccagagattctgttctcttgccagctatttgtgccctaatacttagtaatatcatccttgtataaagatggattgaaggagaacttttgataaaggacaaagacatgccatttccagctcctgtgagggtagagctgcaaacctgccaaccactttgataagaaaaagacctcctggaagagctgctttctttagagactgtagaagtatataaagtctaaaatataaagtagcacaatggtccctttgtagggactctgtgtagtccagctggcccggaactcgcagagatcagcctgcctctgcctctacctcccttaacttacattttaatattttta

SEQ ID NO: 24818 - DNA, 1853 bp, Mus musculus
ttttttttttttttttaaaccaactgtgtaaggaacacctggaaatagaggagggggtggtgcttcacacagaggactctactaatgtggacacaaatctgaggcagggtctccaggaagagggaacgggcctctgggagggcactccatctttttcctatacaaatcctttcttcatgttttttgaccctgttccaggtctgtctgcaaccatacccctggaatattgcctgaggtctaggactaagagtttcctctggaaccaaatcgttctgcattctgttctctgcctttatcctcccagagatggagaaggatgttaactttattatttttatcattttatctccaccccttaacctcaagtcccagcactgaaagtctcgaaaggaaacagagacctagtccctccctcattctgttaaacaacccagcagctgggcacagcctgagtccttggctccactgtggcgggagtcctgtatcttgcatcggatctggtggtgtttggcttttgtattctgtccctggatatgaaggctcaagtttggagttttggatttttctaagattaaaaaaaaaatctgtgaggctctaatgtcccatataaaattttgtgtgtttaaaaggtaataatgtctatacgttggaaatcagtctagggaattttcagatagcaagagacttttatcctgtaaattgctaacttcgtcttgtacttgaggtgatgatactcagtgggagagaaaataactcagggctgatgacaggtccaggtccgtatgtccttacatcctcagggcaaaatactttattcccacttgggactgttccttgttgtgagtactgctctgacaactggcatcagtggcctcaaaccttgttccaggattctcatacctcttcccaagacccttgctgtcttagactgtgaagcagggaggccatgtactaccttctcaccgattttggtaggttctcacactgtacttcaggatgggctggcactcactatgtagctgtgatggctaatcttcattgtcagtttgtcagtttgcaattctggagatgtctctgatgtttccagagattaactgaggaaaggagagcctgcttgaatgtgatgacaccaacctatcactcgggggggcccaggctgaacacaagggaggaagagagggaagccagatgaggggcagcatccccacactctgctcctgatgcatggagatgtgagtccagtcacatgctccagctgccatgaactccaccgtgctttccttccaggatgggatataaaaatcaaaaaccaaaacaaacccttcttgacttaagttgcttctttcagatttttgttttgttttgttttgtttgttttatatattagggagagaaatgagggatacaatgtctactcccataagtctttctgcattggcctgagtgctggtcttgcaggtgtaggggatacagccagcttcacgaatgactaatgttaccactgtgatcctcagctatgttcttgtagatgtgtggttagccccagcttattattcagaatctcagctcagatattgaatcttgttgagatgtccggggggaggggggggggagacaggggggggggggagggacggactcctgtaggcaggaaagttgaggctttctgtgcattttcattacttttgctttattcttttctcatgcaaaacatcccaaccctctctcccctcctccctgtatccctcatcaaactccactgtaaaacatgcctttaatcccagttcttggaggcaggtctctgtaaatatgaggctaacctggtctacaaagcaaggactagggttaggatt

SEQ ID NO: 24819 - DNA, 1801 bp, Mus musculus
ttgaactcagaaatcacctgcctctgcctcccgagtgctgggattaaaggcgtgcgccaccactgctgggctttaagttattatttatgtgtatgtgtgagtatatgtatctgtactgcctgcatgaaggagacttcagaagtcagaaaacgtgtgggtcccctagaactggagctagagataattgtgagccacagtgtaggtgctaggaactgaaccctggtcggctacaatagcagctagtggtctcaaccactaagccatatctctagccagttctttttataaagttttgcttacttatttgaatttgtgcacatgtgatttgtgcatgtatctttgcctgcttgagtgtatgtgcaccatcccatggaggccagaactgaagttacaggcagttgtgagccaccatgttgatgagaggaactgaaccttccttggtccttggaaaaaccaacaaatgttgttaactacttaaccatcctctacccttcccccatctttattttggcagggtctcacactgtaccctagactgggctggaactcactgtgtagctgtgaatgctaatcttcattgtcagattgactggatctcaaatctcacaggaaatgtctgtgaaggtgttttccagagactaaccaaaggaggggagagctgcactgtggggggagctgcactgaatgatttgggggcccagattgaagacatgggagggagaggaggaagccagatgaggggcagcatccccacactctgccccacactttggaactggaattgcttgtgagccacagcctgggtggtgagaatcaaaccaagatgctcttaacctgggccaactttctagcccctgcatttacatttctataagcccgcttcaaaagcatcatgaaatgctactgtaacctcctcaatatctgcatctattctgtgaccctcatctatacatatatttacagtgtgatatgtcatatttgagagaatattagtaattaagattggaataaatggatatgggtttgcttcaattagattaccaaggaaagcaatattacctgccaaattctcaccatggaaactgaattcacttattgaatttattgtaattcaattgtgacattttggaaacatacaagcttgatcatttttctttctgtttgtgctgtttggtttggttttttgaaacactgtttctcggtgtagccctggctgtcgtggaactcactcagtaggtcaggctggcatgtaccactattgcccagcctcatctatgtttctttggttgagaaagagtatcatgtaacccaggctggcctcaaactcatggcaaacctcctttcttagcctaacctcccacatgcttgttcttcagtgatgagctaaattttaagtatatttttaaaatattacattaattctgaaaaaatttttatgtggatgtggggagaagatcaagttgtgtgattctgatcgaaggttccgtcaggaaaacagttttaatgtgcattccatagacccagacaaactctttctcataaagaaatcaaacagtacaacagagtttttaatacggttttttgcttctttgtttcccatttgtggtaacttatacttttattggtttccttaaaactaaaagtaggccatcactggggaagagaggccccttggtattgcaaactttatatgccccagtacagtggaatgccagggccagaagcaggagtgggtaggtaggggggcagggcagggggagggtatagtgaactttcgggatagcatttgaaatgtatataa

SEQ ID NO: 24820 - DNA, 1110 bp, Mus musculus
gtttgtagcttccatttgggctagaacttccctcctcctgggaacaagcccagaactttccacaaataagatgggggaggagccagagccacccagggcaaggtccagggacgacaaggaggtcacagaagtcaaaataggtaaattgagcctgggagggaggacaaaaggaatgctgggtggaaatcgagaagaatgcaccaccggaagtttagcagtggggacattaatgcttctgggatgggtcctattggagacagggttaagttcttctagctcaagctctgcttttcacatggatagtgactcattgaaatattaggttctgaaatgtcaggttatgggaggcggagagaaaagggaagagagggaaagaggtagcgaaacatcttaacataaaatttttcattgtattgtataggtatgagtttatattttgcttgaaagtacacttgcatgtcaggttaaaaactatgtgtgttaggtttctcttaagattgctggagattttttcatttttccttttcttttttttcgagacagggtttctctgtatagccctggctgtcctggaactcactctgtagaccaggctggccacgaactcagaaatccacctacctctgcctccgttttttcgtttttgtttgcttgtttggaggcggtatgttttttggttctttggggttttttttagacaagatgccactatgttaccccgcctcaaacttgagctcttaaatctcataagctaagtaaacaccctgtcagtcactgagctacatcctcaggctttttctttagacgagtgttaactaacgtacccggagtgtctgtgtgcagtgtctgacattcaggctccatttttcctgtaccctctagcttcattttgggacaggatatttaagtggtttgttctgcatccgtgtgacttagtgatgaacaaaggtttgtccagtttctgctcaagcttttgcacctttccatggtcatctagtttctataatttctccaaaacttccaaatctaagaacagctaaaaattctggaggttagtgatttatgccattaagggttttttgtttgttttgtaattttaaacagggtctt

SEQ ID NO: 24821 - DNA, 1543 bp, Mus musculus
ctctgtgctaggtgtcctggaatcctctctaactactgagctatcctgtaactatagtctaagtctcctgtgctttcttggattttactttagctaagatgttgctccacggcccactttacttgtctgcgaagtgttccagtttttctttagtcttaccttattttatttgtgtgtgtgtgtgtgtgtgtgtgtgtgtgtgtgtgtgtgtgtgtgtgtgtgtgtgtgtgtgtgtgtgtgttttactgtgtagcccaggcaggcgtggaactcactttcagctgcctagtacaaggaattacggaaattgagtcacccgtccctcccaccaccccctacccccatcccccactcccattccccaccccaggagtaaatacttatcttaggaaatggaatttcctagcgcagctgagaccagtgaagaccaacagtaggcgggacgagaaggcgtggcattcaggcattgggcttcttcagatctaaatttctgaccttggcagacagccacttgagatgtgttacctgcggacggagcagaacggaagcagagggacaaagtagcggattcctgacttctggcaagggccccttcctgggtttcacgccgctgcgttctggtcgaggctggaacgcgcgcccagccctttgtgtggctgtggtccgaggctacggctcagaagccgagcgctgggaacggcaggactgccgagcctcaagtagggctgtcgagcgcggtgagagcgtgcggggacccgggtggagccgctccctcggtggagccacgagggcccgacacctgggtgggagaagccgcctggctccgcggtggaaaggctcacgtggctgaaacctcgggggattagagtctgggaccggggctgaccgggcaaagccggcgggcatttcttgtcagattgtgcgtgagagcggcggggccacagattttagagagccggacagacggggtgtattgtggcaagtttgcctgatcttcctgtcttagcttcctttgtgctattggggctgactcctcagatttgtgaaacaatgaatgggctttagttggaggagtgcactcagggttgagagacgtctgcacagtccctccagaaatttacccagtggaagggtgaggccaggcctggcccatctcccatgccaggggggtgggagtcgggagggacgggacctgacctccggccaatcaacagccaagtcttatttagtctcttgccttctcagggctcctgcaccaggaaagaacaatcagaggtaaatgagtgaggaggtggatggaggtacccaacacctgtcagtctccttaatcagcctgtatctatattaaagaccactccctgctttgtgtgaatgtgcagcagctcctgctgctgttgttgatgatgttttatgctttctgtagcccaggctgtcctagaactcccggagatcctgtctcagccttcctagtgtttaggtaatcgtctaggtcaccacgcatctttatgctattgttaagacttgttgataaaggggtctttgc

SEQ ID NO: 24822 - DNA, 1139 bp, Mus musculus
aagtcagaggatgaagagacaaaactcagagtggtatgtgacgcattcaggtatgtacttttcagtggtactgaatctagaattaaactttactttcccgtggatcacacatcctagaatggatgacttaacgcttattcttgaggtttgtgaaaatggagccaatttacctctcttggtactgcggagaaggctctaccacagtgcaggaagctagtaactgggtgctacggaggcacttattccttactctctccctttgctgatattatctatttttcttaaaccttagatttctagaagtgggcaccaacaaattgtggctagaagcagtctggaatagaagtcaaacgcctaggaccagcctggcattaccaaacaatggcagctaggaaacaggtaatcagagccctgaattctatggcctgggctttgagggaactaaagctgtcaatcatgaaaggagaatttggacagttgaaccatcaaggaagacaaccttttttagagtagatacttttgttataagaagcagtatcaaattctggggctcatgtaggaaccctccaactgcccagtgcctgggaaatatagagtcccattagccttgggatccagaccagaaggctctaaaagtagaaagagacaccactaaagacatgctgctccatggggtaggtagtatgttagctgctctatagaagccccaaagaaagattatgggtggaaagactggggagatggctcggcatgttgtaaagtacttgttgcacaaagttgaagacccaatgtgggatcttcagtctccacattaaaacaaacggaaggaagacagacagacagacaaggtcagcagaataatcccagaggctttctagccagatattcttgttgagttgaagagcttcaggttcagtgagagatttctcagaacacaggtagagcaaaatagaggacttaacatggagagattactagtgaaatccaacagcagaaaggagatggtccggtaaaggaagtggcaggccctagattctcttgaaccttggttcatgttgaggtcttttacccacctgtggatctggtagaaccccagattgtcccaggccaaacaacagaaaaaaggaattgcaagatct

SEQ ID NO: 24823 - DNA, 2567 bp, Mus musculus
gaagatgcctatgaaacttttactagtcagtagtagtagtagtagtagtagtagtagtagcagcagcagcagcaattattacattttcctatttctagcctatgaagcccaagggtgaatggctgcattttaaaggttgggaaaagggaaagtggcttgtactgagcacaaaccttgtgcaggcattctcataatgaactgtgtattttccctcctctactataggaagcaagaagaaacctcaagaacctagctcagatctgcaagataagaacgaggagcaggagaagtcctccagttgcacaggggtattcaaaggtggaccattctttttctgtctgacctgtggcaaatgtttcaaaaagaacaccttcctctttaatcaccagtttcctgtgaggtcccggaggctggcagtcacaaatccacaaagccgcaaaggcaagggctacaaggctcagcatcgtggagagaggcctttcttttgtaatttctgtggcaagacttaccgtgatgcttctggactgagccgtcaccgacgtgctcatttaggttataggccccgttcatgccctgagtgtggaaagtgtttccgggatcagtctgaggtcaaccgtcacctgaaggtacaccaaaacaagccagcagctagcaaccaggctggcaaccaggctagcaaccagaggctgaagagtagggttccacctacaacacctagatcccaagcgcccgccctcaagtatgtgaaagtgatccagggaccagtggccagggctaaggcacggaacagcggagcctcgaccctgaatgtcagatccaactctattacagtggtccgttcaagagaaaagatctcttgtccctattgtcacataacgtttaccatgagaacctgtctcttaacccacctcaagatccacttcagacgtcaacccaaccagcacttctgctgcaaagagtcggcccactcatccaacacactcagaatgcaaaagatctacacttgccccgtctgtgacagctcctttaggggaaaggagagcctgctggatcacttgtgctgccaaagaccaatcagattcagtaaatgctgggaaatcctgggtcatttgctcggctatcttcatgaacccgtggtgctgggaaatatttttaaagtaagggactcctcgggaaagaggatggaatccaggaggagaagacggaaacgtgcctgcactgagaatcctgaaacagaaggcctgtctgggaaaggtagggtggctccgtgggaaatggagggtgccaccagccctgagagtcctgtgacagaagaagattcggactgatttctgacttcacacctacccatgcacgacaccccccacccccaccccttacccccaccccacaaaataaatacaatttttaaaactaaaagaaggggaggggaggtcaaactgaggtctttgtatttgtttttttcctgaagacttgacctctgccatcaggaggcttgaacaggagagaagtggatgatgaaggaaagagacaaggaaagaaaaagaagtatgcacagagaaacttgtattattaattagcacctagcttgtttgtgtctggtagaccaccaagtagtaatttttgggggaaaaaaaccacattggttctcagagaaataaggtaggagaaaatgagaggcaggggtatgaagggcacgaaggtgtggaacataggggagcagacccagttctcagcccttgcttctcaaggtcctcccaccaggctgccaaagcaagatggtatttctctggtcggtattcttttgaattttagctccaggttttggttcaggtgctcatattcataccctggctcacttagctttccccgatattgtgggctcttctgttcctgacccccccccccccacattgatattcttcccagtcaaggctgtggtcttggaagaaatatccaccatttgcagagttgatgttctatagttcacaatgatgaagtgctgcgtatcctggttggcagaatcactcctgtattactctggtgcataggtgtctcctgatagactgcctggccttcaccacagggtgttttctatagtcagactaacatggtaaaaaagatgtggaagtcaaaaattagaggaaggagctgaggaaagacagttgagggagggaaatcaagttctactcggtatccagaatgtgtctgtagatgtagattggaatctgtccacagcaaagaggccaatgggaaatccccaaggacctgctgggctctccttccgctccaggaagacacaaccatcactcaaaaggggtttcctggaaagacagacaagtgactttaaaaacctctgccagtaggttctttttatgaagtccttgaacctaggagatagaaagttcctaggggtcatgtgatctctcccccaaccgcctggttggtcttggagggaggtgaggttcgggataactattatggagaatgttaaagggggctgcagaagtggaattctggctcaggggcactaaaggctattaagtcaacaggtaagagtggctcag

SEQ ID NO: 24824 - DNA, 3186 bp, Mus musculus
agtagtagtatagaccagccataataagaaaagcaaatctggtcttgcatccaggtttacgtccatccacacatttcaaaggcagaagagtacccactttactgtgctgttgagcagtatctgttttgtgtgcttatagctccatcttgagttcctacaatagaaatgctattttttttttctgataggaatgtgaatactgggggggggggtagggctggggagaacggggaggtagggaggcacagacattgcacacctgatttcctgtggagcaggatgcttgtgaacccagacccaaacctaattctctgtactccctaggggaaggatcctctacaacttgccttttttcttattttcctgtctctccacagtccgaatctgctccaagtcttatttgaccctggaaaatgggaaggttttcctgacgggtggggacctcccagctctggatggagcccgggtggatttccgatgtgaccccgacttccatctggtgggcagctcccggagcatctgtagtcagggccagtggagcacccccaagccccactgccagggtgaggggaacagctgcctgcctgcagctgatgagggtgcctgccctagaatgggagtggggtgggagtgggtagagggaatggatggttgctatgaagaatgtcggggaggagtttgggaggatgcaggtgaaacctatctttacaccacccacctgcctcagacttggttccacggtcctttctgttgggcttccccccaccctcctttcctttagtgtgttcttcctgatttcaaatcttggaccttttttatttttccttcattaatctcaactccgcccccctcagcttcttaaagttaaaaaactgctctccccacctccctggaaaaaactaccctccccccccaccccccgtagacttagaacatcctctgtatcactcttctaggactggtcctttgctattcactctataatggaattgctgtaaatattcagaattaaatcatacattacatttagaaaaagtcggtgagatatgggattggaaacatggaaaaagcaaaaaaattggggcagaatgaccagaacagtgataattcaagggcagatggaagaagactgagtcttgtgtatactttaacaatcttgatcattccttgagggaataattgattgcttttgtgtttgctacccccttgcttgcctctttgctgtcttttctgcaaacgtctcccttttctgggcacccaaactcttgtatatatatactcttctctcctggaatgaattaagcttcagggttcttcattttgactaagtccttattttgagctcttaagactgtgtgcatatgctaaccaacctttggagaacttactaaactaaggtatttaaacagcacttatttaaaaccaattgttttgtaatttgtcttcttaaagagatcataggtttatatatacgtatataatattcaagctctacaaaactcagctgcacccgaccccctttacttgctggaacaaattctgttgtcctttgaataattgaagaaaacacgagtcctgacccctagccccgccttgctcttatcctcaggcacccttccctcatcgcagtctccgctccgcatgaacaggtgtgggagggggctggggatcaggcctgggaagctgggcgcccctggtaactcttctctgatccccgtctttcctgctgccagtgaatcgaacgccacactcaggtgagatcagaaacccttccgcgtgcactgccgcccccatcccctcactcttcaccctccaccagcaggatatctttgcttaggttgtgggtgtcctgttactcatgtcccaccacccattctagtttgaggccgggccctcctctcctacctgtttcttgccgccaaatcgcggttttccgcgggtcgcgctccctcccacttccctgcttggccacgctcctccgggtcgcgctcctctcggactcagctttctagcgcgaagcccggtagggggcagccgcgcgccggaggatcccagatctctccttcgtggggttccttcagacctcggggacctactcttgccaccccctacccaggttttacctgcgaggttccgtcgaccctgttcactggtcccacccatgcgagcctcgcatcctctgtagaccctttctcccatcacctttcttccagccttccctcaactacactatccttctcctaagctgcacttctccataccagttctccccttctgcaaagcctttcccatcgctctcgctcttcctacccttagttcctcgctccatcttcccatatccccctttcagaactgtcaccttcctctcctaacctacccaccctcgcttcccctctttgctctgtgcttatcctctctccttccaaatccttatcctctcctctagtctccttaggcagagacccttcccttccttgcgctctccctcttctcccctccccttcgggcctcggcactggctcctatccccgcctccagcccgtgacgtcaagcccccctcctagctccttttctccctcctcccttctgtcggtcggtcagtcggcgaggagagtccgcggtggcgggagcgagcgtctcttggccctaggaagcccacgtctctgccttccccgggctctggcccctcctccccaatgagaccggggatggaggcgcctccccgacgccctcccagaagccttccccagaagaagtgtcccccctgagctgcccccaccccaaggaggccgcccccgcccctcctcgccatgggcccggggggaccctgtaccccggtggggtggccgctgcctcttctgctggtgatggcggctggggtggctccggtgtgggcctctcactcccctcatctcccgcggcctcacccgagggtccccccgcacccctcctcagaacggcgtgcagtatacatcggggcgctgtttcccatgagcgggggctggccggggggccaggcctgccagcctgcggtggagatggcgctggaggacgttaacagccgcagagacatcctgccggactacgagctcaagcttatccaccacgacagcaaggtagtcggggtgagggacagcgtggccggggtggtgggaggcgagggctatggatcctctttgggactgt

SEQ ID NO: 24825 - DNA, 1253 bp, Mus musculus
ctcccccctcccccctttttttttctaatggactcgtcaaatgtcagggcccagcaggaaaggacagggtgcagagcagacaccctactgatcttgttcttgttctctgaaattgaaggtggaaatttcattgagggagctgcctagggatctgcagagaacgtatttgtatttcctgagcagatgttcagaccctataaacatgggatgaggtggggtacagagatgaccaaagagagtgggcttagggttgtttgagaataagcagaagtgggagacagcagagtatgtgttaatatggaaggaagggcatgcagttttgagtagggccaacgtgccagatgcaagacaagagaaggacgcttaaggcaaaagcaaagtctagaaatttgacaggaagaagaatgcggtgctggcagtgaatagttaaggaaaggcactaggttgcccaagacactaggcaatgtgagatgtgtatgtgtgtgtgtgtgtgtgggtaaggggcttgggagccaaccttcatttcctccttcctccctcagtgcgacccagggcaagccaccaagtacttgtatgaactactctacaacgaccccatcaagatcatcctcatgcccggctgcagctctgtgtccacactggtagccgaggctgcccggatgtggaaccttattgtggtatgcaaggcagggggtcacttccttttgggctgggttgagtagaaagctcatggctatgttctagaggactcgggagagggaccactgccaggactcagcctactttttttttcttttttctttctttcttcttcttttttttcgagacaaggtttctctgtgtagccctggctgtcctgggactcactctgtagaccaggctggcctcgaacttagaaatccgcctgcctctgcctcccaagtgctgggattaaaggcgtgcaccaccactgcccgaccctctggtagaatttcttgaagggctgtgaggatccacagatgtgtgtgtgtgtgtgtgtgtaaatcacttttcccaggacaaagatggggaagtttagagatctgggagaaaagtcagggccaagaaagcagtaaggacactgctagcatgctcagtttgcacggacacttccccttcttctgcctcagctctcatatggctccagctcaccagccttgtcaaaccgacagcggtttccaacgttctttcggacacatccatccgccacactccacaatcccacccgggtgaaa

SEQ ID NO: 24826 - DNA, 1185 bp, Mus musculus
atgagaccgaagcccggaaagttttttgtgaggtggagatggaatctggaccagggaggcagggctggatgggctttctactggtggtttttctcctgggtcctcctcactgcatctctgctcaaattgatagcaaatgaccagaggtgataatgaataccaggcctgtctgtaggcctgacttcgttatttgtctatgttcagacacacacgcacgcacacacacattctcattttattgctttgtgttttaactctgtcttttctgagtggccaaaggaggcattttgttgagactctcctatgatttgaagattatatagtggatttcagtgaagatttttttttaaatcctgatctttgattcttaagggactaaacagtatgtaatgagctaacactacttgccccagaacaaaaacaaacctccaatgcttccctccctactttgaatgcaggtctataaggaacggctctttgggaagaagtatgtctggtttctcatcgggtggtatgctgacaactggttcaaaacctatgacccgtcaatcaattgtacagtagaagagatgactgaggcggtggagggccatatcaccacggagattgtcatgctgaaccctgccaacacccgaagcatttccaacatggtgagggaacatcgaaggagagggaagaggcaggggttgagaatagcaggggagttggggatgggaaggggcctgtacccatcttgagcttgtttgcgtcatgttctacctgtgcttgatttccttgggcgagagagaaaaattgtggagcatacagtaggcttctgatgagcggaagggctgttaccatggaaacaaggagcagttggtgagaagtcaagtgagggagagaggcgttaatggtaatatagtcttgtacatgaagcacacttttcccagagagcttcccttgagcactgatgtgttcttatttattgctattatttattattgttgttgttgttatttttgtgtgtctgacttacattagtacctcagagggttgcttaatattccctttcttgttttcttttcttttctttctttctttcttttttttttttttttggagacagagtctatgtagctctggatgcctagaactggtcatgtacactaggctttcgtcaaactgacagaaatcctcctgcctcta

SEQ ID NO: 24827 - DNA, 1150 bp, Mus musculus
ccctccagacatcacaggaatttgtggagaaactaaccaagcggctgaaaagacaccctgaggagactggaggcttccaggaggcaccactggcctatgatgctatctgggccttggctttggccttgaacaagacctctggaggaggtggccgttcaggagtgcgcctggaggactttaactacaacaaccagaccattacagaccaaatctaccgggccatgaactcctcctcctttgagggtgtttctgtgagttacagcagcttctgttgtgcaccccatgaaaagggagatgcctggaaggtccctagatacattttctcagttatctttctgtcagaatcagtaaagccgtcttagactatggaggtgggacccccccaaaccagaaagccatacaaaatatggcagtgaaaagaattgctctattctagtgcttttcaagctggtcaaggtgtttacagtttaaaaaaagagaacgacttgagaattcatctcctcattccttttaaagtaaggaaattagtgcccagtagggtttggtgattgctcctgatcctctctcggggggactctctaattcagatcttaagatgaaggaagcttcttctccaaagaatactgtttccagaatctagggtatgtgcatctggggtgtgtcctacatgcagcggacggatgccataaatagccttcattcagaagctcaattacatcaaaaacagaaggtttcggagtccctgatgttctcttttcctcctgcttttatcccctctgccttcctccacatgtttctcctcagggccacgtggtctttgatgccagcggctcccggatggcatggacgcttatcgagcagctacagggtgagcccgggtgtgagggggctcagggaggggcaggcagggctgggcagggactgggctgagggctctcttggaagaacattgatcagcctccacagattgccaggtacattttgcctacattgcattgtgttcgtcaggcttttaaatactgataaaaagaacatgggtaggatctttgcagtgattctgttctttcaaaggggcatacaggttaaaaaaaaaaaaaaagcagctgttctttcttcccagtggctttagttttagtcccagaagttgcct

SEQ ID NO: 24828 - DNA, 1120 bp, Mus musculus
tccgtctcagttctctccagcctgggcattgttcttgctgttgtctgtctgtcctttaacatctacaactcccacgttcggtaagtttctcttctgacttgatccctggcctggctgactctccaaatactgactccatactctctgaagattgtgactctcaaggccacatgtcatagagagtggtgtgatgactcaccagaaacgtaaggggcacgaggcaagacccttgcttcaaagcagtcagctagaaaacccaaaaacattccagtagggccttatgctgcagaagccctgggctcccctaggtccagtcctccgttcagcagtgttcttatcctgagtgttctttctgcctgtccccagcctgtctcctttttctgccctggggatagggtcgtgctattgatggcatttctggagagccgagcctccctggaggagatggggtaattctgctctttctcccaccctctccgcctctgccctagttatatccagaactcccagcccaacctgaacaatctgactgctgtgggctgctcactggcactagctgctgtcttcccccttgggctggatggttaccacatagggagaagccagttcccatttgtctgccaggtgagtagatggtgggccaattgcagaacatggctttcctagccctctcaggagcaccttccctatctttcctctttccctgactagtgtctcctttcctgcctcctagtatcaccctctggtctctctctggctctggctctagctctggctcttctttctgggtgccagacctattccattctacagttctctggctgttggcaaggttgctaggcatgccttggagaggagaggggtgacttacagaagacaaaaaaagggatctgcatacagaacctgtgaacaatgatgacttgtctgtggtgtatgggctgagaaacaaaactgtgggctttcccgtgggatccttggttggagtttaaaatgttgaaggcagaatccaagcacatagagtttgggtaagggacatagcatctcagagggaggaggcctctgggactgggcttatggagtttctggtactatgaggaaaagctggcttcaatgatgtttg

SEQ ID NO: 24829 - DNA, 2252 bp, Mus musculus
aggagcaggagagcgaaaggggaagggttgagtttcagtagtggtagcctgaggagagggaggaggctctggagatttcagcctttctgaggcaaaaaagaagtctttggcagtagttagggggaggccattgtgaaccattcattgctcacagtgttactgtgtccatgctgtagttagggaccgcgcagtgctgggtgggggtggggaatgaccttccaactcatctgacataatcttcatttattctttctcttttcttttaaaatcacttattttctccatccattctcttggcgctgttatgttctgtggcttcctttgttcttccctcgattcacattttaatttcctttcttacttgtacatctcgtttcaatgtctctccctcccctttcctcctcccataccacatcaccctcctcccacactcccaattgtgtttcttcctccagaaagaggagcgtgtctctgaactgcgccatcagctccagtctcggcagcagatccgctcccggcgccaccccccaacacccccagacccctctgggggccttcccaggggaccctcagagccccctgaccggcttagctgtgatgggagtcgagtacatttgctttacaagtgagggtgtatcgagaaggatgaggccagcaggggagggaagggtgtggggagtgggtggggaactgggaagagggtggagaacaagctccaatccccctcttagaaatacatgtcattctgtgcatctggggttatctgggtcttcagtactctgggaaacagatggttttctttctttccatataattttatatcaccacttcacagttttgtttgaaccctgcttggagctattcactcatgactccagaggggcatctcgtttgtctcccataggctgtcttgtatagttgttactacagcaactcctgtcatttcagcagcaggggtcttcctacattatcagggctttctctccatttctcagcattagaatctccttccatcatccttctcctccatgtccctgtgtcttcctctccttaaatgttgcttcttccaggggactcaccacacacacacacacacacacacacacacacacacacacacacaccatatcctctcctctcctaggcagctggatgtgtttctgtgcaaatatgttcttttctgaatgctgctatcacttgtgtttgcatatgctgcacctgtgagtgcacagtggttgtgggtgtgtgcagtggtgtgcttgggtaggcgtgcatgatgtgttgagcacaccaagctgtcttcctcatgtgcatatgtcatggttgtctatgttttacttgtgtgcctccttgcattgtgtattttttctttgcattttaatatcactatgtagtgtgtgtgtgtgttgccctgactcgtgtcagggcaggcttcctgtctcagccttctgagtattgggattacagttgtctgcctagctgatgtcctgtcttctttcagcagaggcatgtgcacccaacatgcacatgattaagcaggctcttccccagtacgtgttttctgagccatgcataccctctccttggccttaggtttactctcaagtgttccctctattctcatgcgtcccactttgggtctgtacaatcatctctcagaactactgcatcttggttttcttttctttgttgtcattattattatttttcagaactaaggggaaaagaaatggggacaggttggaggctgtttccagtggatagtgggtgcacatttgatcaaatgaaggcatggacagatggactgaccgggcgggaggcagcatccctttcacactgtggtgtctcttgggggaaggatctccctgaatctcaataaagcagttaacagtgtgactcagcacctcatccactgtcctgtgaactgagtgggctccaggaagcgagaagcccaggctctcaagattggagttaatgaaaaggctttgaagcagagaggtgcaaagagctgtgtgattgttccatgcagggattagtggggcagagcgggatgagatgaagggctcgattagtgagtgatggcattagtggttaaaagtgtgggctctggagtcaggcctgcaccacacgcagaaatgttccctaatccctattctccacttttatgatctgatgatagataacaataatgatgattcatttctctgtggagtgcacacaagaactaggctaattatgcatcccaatgcctg

SEQ ID NO: 24830 - DNA, 1102 bp, Mus musculus
gtacgcataaaatcaatctttaaaaaaaaaaacaaaaataaaataaaaccttaaaaaataaatacgatactttatatttacagggaagggaaaggaattagagataaagtcaatgagatgaagcgtatgaggacgaggatgaattaatgaaaatacaggtagattacatttgattcatgtggtaaggtttttgcatagttatactcctttactgaacctctcttctttgtgtcttacagtctgtcatctactacagaggcaggataggtctgaagatgttagggaggaaaacttaagcctacaaggcatgcagatttcccattcagcttactgagagtgtgtcagccgggcttcacttccttccagagcagcctcctgaatgccctctttacttccttgttccttagggtatatatgagagggttaagagaaggagttcccacagcatagaagagaccaaagaacttgcccctctctcgagcataaggattcttgggctgcagataaacagcgatgactgagctgtagaagagagtgaccacaatgaggtgggaagagcaggtcccaaaagctttcctgcgcccctttgcagagcttatcctcagcactgccctggcaatggcaccataagagacaaggatgaggctcagaggtacaaccaagatgaagacactggcaatagccatttgtatctcattataggtggtgtccccacaggacagtcgaatcaaagcagggacctcacacacaaagtcgtcaacctgatggtggggacagaagggcaggcgcagagtggatggcgtctgaactactgactccactaggccaatcgtccaggccacagctgccagctggcaacacaggcgagggtggatgatggtggcatagtgcaggggctggcacacagccacatagcggtcaaaggccatcactgctagcaggatgcactccgtcgtccccagagataagaagatgaagagctggacaaagcatcccaggaagctgatggtcttttcggggccccagaggttgaacagcatctgggggacacaggttgtggtgaagcagaggtccaagaaggagaggttagagaggaagaagt

SEQ ID NO: 24831 - DNA, 1204 bp, Mus musculus
gtcattttattttagggggttccattctgaagaatttggcttacagagtacctgtgctgaataagacaatcaaaaaggttgcttgattcaaggcctgtgctataatgaggtagaatttctaaaagaaatcttcccaaggtaatggacctgcctttgttgcccaggtaaatcagagactggccaagatattagagattggttaaaagttacattgtgcatgcaggccccaaagctcaggacaggtaaaaaaattaataaaaccattaagggatccttaccaaattgacagcggagactggcgctatgattagatagctctcctaccctttatgctcttcagggataaaaacacccctggacagtttagactgacccccctataaattactctacagggggccccctccactggtaaaaatagcctttgtacatggtgctgacatgctgctttcccagcctttgttctctaggctcaaggtgctccagtgagtgagacaggagcgaaaaagcagctccagaaggcctactcaagagaagaagacctgctacattagacgtctccacacagaaaaccttaagactccggtggaaaggcccttatcttgtactcttgacgaccctactttctacctttatgggacctcttttgattttgcttctgcttttaattataggtccatgtgtgttaaataggcaagtcacctttattaaaacagaaatgagtgcaatgtggcttttagttttaagacaacagtaccatgccctaaagtaaaggatcaagtatgtcaggaaaaaaatagtgtctagttctaagattagaactactaacaagtagaaggggggaatgaaagtataacaacgtaaaaacagaattctaggcctttaggcccaggcttgggaatgtggcctttgtaaaggtatgctaatcaaaaaagagagcaacattcctctacccacccgcttcctgggttcaaagagtgctcattcaaagaaagtcaccctggccattaccagaacctgcaatgcaaatgtgctattgttagaggctcttagaagctgtcttgagagttaacaattaccaggtattccttgtgactcttgtaactttacacttccttgtgactcttaactggtatctttggtatcttccaacaacgccctccccacttccttaagtttcggtttctttaaatacccccttacc

SEQ ID NO: 24832 - DNA, 1194 bp, Mus musculus
ttgttccagccatctatgtttgtcagagtcagtttaaagaaaaacaaaaactgtgagttccttgtatgaaggtatgagtatgaagcctgagttgcattttgagaacacaatatgtagagatacataagctatgggaaatctgccatggagagatggatgtaggaagtggatttatccaaactagaaatatgagaggttgcaggaatagggccatctaaaccctttgaaactgaaactgaagccccatgtctgagacagagctacaggatttggtgtttgccctgctggatttcattgcttggtccaatcttccctcactatgtacacattcctctctattgaaatgggaaagggtattctgtgccattgtatactgaaaagataaagcttgatttctgattttacaagttacggcagtggagagattaatgtgaatgtcaggagagactttggacaattggacagtgtacgggctgttgcagactcttaggatcattgaagttaaactaaatgcattttcactgggatgaccatgagcctatagtgaccagaggtagaatgtagttgattgaatcaagaaccatctacatatgatgatgtctttgaactcttgtctctcctttgtgtctttcattggggacctcatgcaaacttctaggagctttttacatttcttattgggaatggaacttgggtatctatagactcaatccattttctgtttgtctactgtgttgtgattgaaactgatcagtcaacttattctcatgccatcatcccttcatgacatgatagactctatccctaaattacctaagatacaatagaagcaattgctattcagtgctaagctgttttgttatcctgaagtttaaatttttatttatttatttttatttatatgagtacactgtagctgtcttcagacactagaatagggcattggatcccattacagatgattgtgagccaccatgtggttgctgggaattgaactcaggacctctggaagagcgctggtgctcttaaccactgagccattttagttttgttgtttttgaagatgaagtttctctgtgaagctatgcttgtcctctaagtaggtttgtagatgagaaggctagcttagagattctcctcactctgtctccagaatgctggtatcatatgtgagtgtcaagtccagcatggcct

SEQ ID NO: 24833 - DNA, 1529 bp, Mus musculus
ttgttcttttgtattaggaacagttatgttttgaggagcaagagacgaataacataagctgtgattaggaagtgtcatgtttagggaacaaaagataaaaaaaaaatggaagtatttttatctggtctggtatttggaagtccccatctcccctagagcctggagagataaatttagcttgaccctatgatgaaatggaggctgataaaatatctaggacaagtttcttttgattcttcctaatgtttgcatattatagtcatcttcaatgacataaaaggatatatattggaggaaaaccctataaatgtaatcaatatcataaaccttctccagcacatagttacctactaatacataaaagaacacacacttgtgagaaaccctatgaatataaccagtgtggtaaaggcctttcacaacacagtcatctcctaacccagaaaagaatacacacagagctgccacccagcaggagcagcatgtgtgtgcagcatgctttttgccatgattgtgtactgggtccacctggcttaagcagaagggagctaacccagcgtgtggttacagtcaatgcagtctgtcctatccacaaagtccgttttaacctcaactacctgagtcagctactgaacaacaaaaagcagagagtctgcatggtgcatttgaggaactcaaggatgttggacaacagaagcactctagaagagagagctcatcaaagacttgcagaagagatgctgaatacccctgacagttctttgaagacctttcagacaagccctataccctagaggactatgatgtctcttttgagagtggcatgctcatcattaagctgagcggagatctagggaactacacagtcaacaagcagagcccaaagaagcaaatctggctgtctttccccttcagtggccccaagcactatgactgaacttggaagaactgggtgtacacccatgacagcgtgtctctgtgtaagctgctggccagagagctgactgaagcattaagcaccaaattggacttgtcttcattggcctattctggaaaaggcacttgaatgcctgccaagttcaaagacatgaaaaacatatcaggagaagacccagcctccttctgtaattgattgtctggtttgccatgcctgcttctgaggatagtcacactgtatgtgacagctgtgaaaaagtgtgttacctcgccctctccccaaaaatgcacactggaaaggaaccctaagcatgtaaccagtgtgttagactttgcatttcttagtggtctccaaatacataaaagaatgcatattgtggaggagctagagaaattacccaaggagctaaagggaactgcaaccctataggtagaacaacaatatgaactaaccagtaccccggagctcttgactctaactgcatatgtatcaaaagatggcctagtcggccatcactgcaaagagaggcccattggacttgcaaactgtatatgccccagtacaggggaaccccagggccaaaaagggggag

SEQ ID NO: 24834 - DNA, 1138 bp, Mus musculus
tgcaaatgaaaacgactttgagattacaccttacttttcttttggttttggtttttgtttcttatttatttttacctttttatttttattatttttaatttttattagatattttcttcatttacatttcaaatgctatccccaaagtcccctatatcctccctctaccctgctcctctacccactcactcccacttcttggccctggcattcccgtgtactgggacatataaagtttgcaataccaaggggcctctcttcccaatgatggcctactaggccgtcttctgctacatatgcagctagagacatgagctctgggggtactagttagttcatattgttgttccacctatagggttgcagaccccatcagtttttgggtacttcctctagctcctccattgggggcccggtgtttcatcctatagatgactgtgagcgtccacttctgtatttgccaggcactggcaaagcctcacaggagacagctatatcagggtcctttcagcaatatcttgctagcatatgcaatcgtatctgtgtttggtggctgattatgggatggatccctgggtggaacagtctctggatggtccatcctttcatcttagctccaaattttgtctctgcaactccttccatggatagtttagtccctattctagggaggaatgaagtatccatgcgttggtcttccttcttcattttcttgtgttttgcaaattgtatcttgggtattctaggtttctgggctaatatccacttatcagtgagtgcatatcaagtgacgtcttttgtgattgggataacttcttacacgcgttctcgcgaccggccaggaagaacgcaacaagccggaatcttctgcggcaaaagctttattgcttacatcttcaggagccagagagcaagagagcaagagctctattgcttacatctttaggagccagagcgcaggagagcaagagctctattgcttacatctttaggagccagagcgcaagagcgcaagagtgcaagagtgcaagcgctttattgcttacatctttaggagccagagcgcaagagcaagagcaagagcaagaggagctctattgcttacatctttaggagccagagagcaagagcgcaagag

SEQ ID NO: 24835 - DNA, 1354 bp, Mus musculus
gtaacattggtaacaaaaagttgacttaaaactggtaactctgggttagagtaattcagaacatgtggcatgagccaacccatgggaacaggtctctaaagatacgcctgaattgggtaatattctgtgtaattcttatcctagaaatctgatttataaaagataagatttagggtagtgtctttgagatatattggcggctacaccttcttgtgtttgtgtgcaggaacagacagccaaactttgtagcaagtaatgtttttagagttcatttttaaagaaaatagattgttttcactgttaaaattgggttttgcttctcaaaattgtagttgtattctcatgttacaagaaaaattaaaagcttctcccgaaccggagccaccagctaaatcggctcctccaaaatctataaagcctcctgagtggcctagtccacaacctttccccttatccacagcctcaacccccgccgatgggaatcctgaacccctcagggtgacaagaggaggaccgctgcgggtacatgaaactgcaaaacacagagtcctggcggactctggtagacccgcccaaacttttaacccttcagtactggtcattttcctctgctggtatttataactggaaaattaaccaccccctttctcaggatccccaacgcctcacagggttggtggagttccttatgttctctcatcagcctacttgagacgactgtgaacagcggttacagatgctcttaacaaccgaagagcgagagaaaattctgttagaggctagaaaaatagcccggaagccaacggcggtctacacaactacaaaatgagatcgacatgggattccctttgactcgccccagttgaaactgcaacattgctaaaggtagggagagcttaaatctatcgccaggctccgatctccaaggtgtctcaaaacaggcccactactttggctaaggtaagaggtaatgcaggggccaattgaacctccctcaatgttccttgaaaggcttataaaggagttcaggcggttcactccctttgatcttacctcggaagcccagaaggcctcattggccatggcctttcataaggcagtcagctccagatatcagaaagaaacttcagagattagaaggtatattacaagaaagagacagttatgcgatctagtaaaagaggcagaaaaagtgtgtgtgtgtgtgtaaaagagaggcgggaggcaaaagaaagaaaaaacaggagggatcgtagacaagaaagaaatttgccacagtggtaggagaaaaagaaaagacaggatctagacaggaaacctgggcaactgaagaccgagcctcagctaaagaggc

SEQ ID NO: 24836 - DNA, 2016 bp, Mus musculus
tgggacagcaaataactgtagtgacatcccacattcttgaaagcattaccaacgctcctgtgacacatcagagctttttgttgtctaaatgagtgaccttcgcttcattccacctgctgtcccactgtgtgagactgcacctactcatcactgcgctgagattctggcagaagaaatgatctgaattatcagatcagccttggcctgagggtacgagctggtacactgatgacagtagcctcgaggttaaaggtaagcagaaggcggggacagcagtatggtggtgaacagaaagcaagtgatctaggccagcagccttcctgagggacgtcggcccagaaagctgaacttgtgactttaagacaagctctataaatggcaaaagaaaagtctacactgacaacaggtatgcttttgccactgtacgggacaatatacaaagagggctgttgacgtctgcaaaaaaagacctaagatgctgtggctaaaaaaaatcagatgacagatctaaccgccaagcaggtggctcaaggaacaatgatcctggcagtcaagaagtctaaagattattatgacatcagagagaccagctttagatacaccgctgaacactatcaagctatggacagtatttggcttggcctgggggccaagaaattcaaaggtgtggttaggtcctttgactactatgttacaggactctctgacttggcagaagaagtagtcaaaagctgcaaggactgtgctatgacgaggtagaatttctaaaagaaatcttcccaaggtaatggacctgcctttgttgcccaggtaaatcagagactggccaagatattagagatcggttaagagttacattgtacatgcaggccccaaagctcaggacaggtaaaaaaaaattaatagaaccattaagggatccttaccaaattgacagcggagactggcgctatgattagatagctctcctaccctttgtgctcttcagggatagaaacacccctggacagtttagactgacccccctataaattactctacagggggcccccctccactggtaaaaatagcctttgtacatggtgctgacatgctgctttcccagcctttgttctctaggctcaaggtgctccagtgagtgagacaggagcgaaaaagcagctccagaaggcctactcaagagaagaagacctgctacattagacgtctccacgcagaaaaccttaagactccggtggaaaggcccttatcttgtactcttgacagccctactttctacctttatgggaccccttttgattttgcttctgcttttaattataggtccatgtgtgttaaataggcaagtcacctttattaaaacagaaattagggcagtgtggcttttagttttaagacaacagtaccatgccctaaaataaaggatcaagtatgtcaggaaaaaaatagtgtctagttctaagattagaactactaacaagtagaaggggggaatgaaagtataacaatgtaaaaacagaattctaggcctttaggcccaggcttgggaatgtggcctttgtaaaggtatgctaatcacaaaagagatagcgacattcctctacccacccgcttcctgggttcaaagagtgctcattcaaagaaagtcaccctggccattaccagaacctgcaatgcaaatgtgctattgttaggggctcttagaagctgtcttgagagttaacaattaccaggtattccttgtgactcttaactggtatctttggtatcttccaacaacgccctccccacttccttgagtttcggtttcttcctttaaatacccccttacccagctactcggggcgccacagtcctctacccctgcgtggtgtatgaccgtgggcccgagagcgctcttgaataaaaatcctcttgcaatttgcaacaagaccgttttctcgttggtgattttggggtgtcgcctctcctgagtcagaacgtgggggagtcctcacgttgtgggtctttcaatag

SEQ ID NO: 24837 - DNA, 1099 bp, Mus musculus
taaaagtcagcttgaggactcaggctctaaaaaaagctactctctgagccaggtccccacaggaggccagagactagcctcagctttacaatttgcatttgaataaagtacctagacttcccccaaaaaagttctgctttcctactttctcactgtccgagattttgtctttcaagcaggtaaatcaacattctcgaggcggaccagcagatgtacatccccgcgcccctagagcacacaggtggctactgttatctcctttccaaggacatttccagcatgtggctttcagtctgagttaaaaattaggtttaccaagagggctagaaaagtagatatttctatattaataaagattggtttttattttgatagacaggcttagtcccttagctgacctctgacttttcacccttgctgttactgtaaggtgtccttaggctgtaaaaaaaacaaaaatgaggaaaaacgacttccagctcctattttagccacaaatcgtggtgttactaacgacataattcttgcttagactttgctaattctgaggttgataattctcctttaagaactacacagcactcaaaactgtgcatactggtttgtaattgtacaaattcaatatgggcatcgcttggtacagaggtactgcaaaaaaaggtccagcttgaccatttctgagtttcctgtgagataaacccggtttaaaagaggttgatatcatattttggttaaaaatcaaaaatattttccggctctgcctcgcctccccaaaaggtaccgagagccacatgtgtgggtcttattaatacccacgggaaaaatcgggtccatgtccacccaagccaaggttaaaagcccactcatctacggatgagaaaatcatttgatcacctcagttaagcgttgccttatttaacttaatcaataggggggagagagattggagacatactattgaaagggcaagcccttcactgcctcccacccaaataaaaaagccaattggccttgtactacaagagccggtcaaactccttctccctgtttcccacctatcatccaaaaaagcggagaaatatcaacttagtgttattat

SEQ ID NO: 24838 - DNA, 1152 bp, Mus musculus
ctcttggtgtctgagcctatttcatgttgctttcttctgcaatctacacagtcttgagtccaccccatccctgggtgaagcacactgaaaggtttattgctcatcagaaactgtcagtggtcgttctgctctgccgggttgtattgataaatgggctattgttgagctgacttcagatacttatgtactggtaacttttgggtcatttagtctttatgttggttgacagattttataaagggattacaatgcagaattgcaccaagaaccactttcatatacgtattctcaggaaagatgatttcatagtatctcataaacattcttgaggtttatacagcctattttgatttattcacaaaatactctacttgtgttgagtattgagctaaagatgtagctatttattgtaaatatattgtaacacaagtagctaaacatgtagctatttattataaattagtgctcttattagcacctctttttaatattgtagatgtacagttggagaaatcacggatgccttgaaaaaagtatttggtgagcataaagctaatgatcgtatggtgagtggagcatatcggcaggagtttggagaaagtaaagagatcacatctgccatcaagaggtactgtgtgagcgttagtgagcttggggtctcatcttcattttaatacagttcccttgggcctgctgatggctcagtgttcctgttacttgtgaaatacactagctgactttttttttactaatctgttattcttataaaactaataattattaaattaaatatgtatattatatagctgatatataatagatgattaatctatttgtaaaatctgttatataacttattcataactaatgtaaatatacaatcctgtgccagtatgtgaaactttgatattttgacaaactatagattggatacacagtgaaaatctcacaggattataatggtgtttattcctgcctcccgctggtattgcacctagtgatgctggagccatggtcacagtcatgtgtttatggtgatgctgctgtacacctgtgctttgccagttatatacttacacagttatacacttaccagcatgtacactacatagtaatgagtgataacaaacaatgcatttgctgtacttttaa

SEQ ID NO: 24839 - DNA, 1666 bp, Mus musculus
atttcttcgaagctgaaataatgtttatttgagttaagcaaatttgtttaacaggattatgaatttctgtatgaagttggtgtttccaacgtctttggtcctggaacccggattccaagagctgctgtccaagtgcttgatgatattgagaagtgtttggcagagaagcagcagtctgtgtaacatctggatctttagttatgactgaagcagcagtctgtgtaacatctggatctttagttatgaccgaagaaggtagtggtaaatccgtttcgtcaggtaatcccagcagctcttagaatgcttgctttggaaacctcacattaaaagattctaactataaatgtgcagtcatgccaatacacatatttaaagaatctgagttcaaaaaaaaaaaaaaaacctctgaaaatcatttataccaaatatgttttaagtatattattctagaaaattaaaatggtatactatttagaaatagcttacaattcttataaataattgaacttttgttttgttttatcctttgacatggggtcttactatgtagcactggttgtcttgcaactaactctgtagaacagtctggcctcaaactcacagagatccacctgcctctgccttcctagtacagggattaaaggtatgtgcctccatgtcctgcaaattattaaacttaaaaattaaataaaattttaaaatttaaccgattcttccttcaatttagtgttgatttgtgtactagaaactcaagttcctgtgttaatttaataaaataatgacatttatcttacaagaaatagtggagggtatttatggatggatcctcagccagacctactattgcttcaataaaagtagtgtttatcaccccctgtacaatggaataggggacatggtagataggccttccaggattgtgtcagctcctcacatgggaatgatattgttaatgtcaggttcaaaactctggaaaagatgtgtgtgacgctctcttaaatgaatgttgatggacagatgcatttgctataatgacagtctaaatctattacataaagtaaatgaattttcagatctagaaacacgctgatctgtatacactttcttattaatataagttataaaaataaaaaaatagtctgaagaactcttgtagtgtgatgttacttcactcattgaaggaagagactcactctgtgttaacctaatgtattcagcgaaggtgaggtgagcaacaaggattcttttgtaactttctacattatagatcaaataatattggggagggaaaatcatataatgctgtaaaattaataaactatactatagtttaatttttagaccatgactcttaggagggcatcatgattattgttttctattttaaagatgagcagtttgacgtcaaggacaacaatatatttattgtgttatcttatgtactacttataaagaaatatatatttgataaatacgatgttcctgttgtgtgttccattatgtgctagtaacatgtcatgtactgtgttttatatatttacaatttctgacatttttctttgaaaagcacttagaaaagaatgtcatcaaaagctcctagattttatgtttgtcaagtattttttacctgaacctcatagtaatattcaataaccttaccatttgg

SEQ ID NO: 24840 - DNA, 4002 bp, Mus musculus
ttaccaccttgtaaaagcttttcttggtttagtggctctgcattctttctagtttctcttttgagagatttttcttttcattgtgtttgtgtatgaggtgtgtgtgtgtgtggggggggggcatgccttgaatttctttccatatttatttcaaatgcttgtgtgacttagcattatcctagctaaaataaatacatttggtttttttcttactcctttccatttaggaacttacattgttctattttctactgacattcagcagtatgagttttacactctaaggaattagagtttgatattgaaatctgaattccgaggctggaaagtacagtcatgtggtacagataggctaaggtaaaccttgctaaaggtattttgtgttgttcaatttatgttttcaggtggaaatagcaaagctgaagaaagctgttctgttgtcttgaggtggtgtggacccagtgttcctaatgattcatgaacttaactgacttgttaaagacagcagaaatggtggtgtgatgaagaaataagaggacataaactgtgacatctaccgaaaagttgggggtgacaggttttttttatatattttgttttgccaatatgaaaaaaaagaagaggccttatttcttactgtgctgggattgcaaacatttctattgtttgcttaaatactactgaatctgtataaaaaggaaagaaagttcataatagtttttttattgaaacttgtattatttttaaagagttctatactataaatatcgtaatatctttacaaataagctgtaagataaactatttgagaaggacgggttagctttatagtagagtcactgctttcctgtactgcatagggcatgaacttgtatacatacactacaccacacacacacacacacacacacacacacacacacacacacagacactttccttttagcttcttacccaggattacactgctgtgcctgtttgtctgcagtgctgtttgtacattgggtgataaaataggagttcctagttactaggttcctcacccatgcatatttaatcattaatgaaataataacaatccaaattctagagtgttctataatgctcactataggattcattaaaggaagctatttaaattgtactggattaatcttgagaaaataggagctttgttctaaattcatgtggcctaagaaatctaaaactgtcatgctaattcttatttgtgcctagacaccgcagcacatgtggaatatgtaaacaccagccatattgttatattcttatgctcattctacagtcttaaatattactcatttcattatcttgtattcattgtacccttcctttaattttcactaatgataatcttaggaaacaaacctaaacccagatattttcagaattccagaatgaggttctatattggaaagctattgtgtaaacactcaggttttacaggcataatttatcgaatagaacaaactaagtcctagagatattttggactgttacttaggtaaagtgaaaaagagtattagtaattgaccatattgaagatcattccacaatggatgttgagccatttatttagcatcacaatcaacagttgaacatcttagactggctcagccactatcagggcggtatggctacagaccaagtgaacataaaaatgttgtatctgtagggcgacatgtttaaaaacacaaaggttaattttaaaaagtgaaatgtttttatttgttaaaaaaaagttaggttttaagctttactttagaaaatgaatgtcagattgtaaattatcatgcttaaaaaaacaatacattttctttacattttaatcttaaaatagaaaaaaaattaaagtcagatttcttgtgttatttcaagtaaaatagagctgaagtagaaaataatagaatgccagcacaaggttacacttgattagattctggggagagctaattgtacatagagtgtacattgtaggtgttttgacacaggaacttatatatcccaggctggacttaaccttgtgatatagcaaaattgtcttaaacttccggtttccctgcctctgcctcccaagtgctaggatgacaggcatgcccagtgtgcctagcctttttaaccatttcaactctgagctcatctaatgagaggttactgatgaccaaacttctccattttatttttaagtgattagtcaaatgaagtatttgcttcttattaatgtaatgacagtcctcagatgacagtggccttaccctaagtatcatctcctacttcccccacattttagaaatgatctcctgcattcccaaagggaggtttgtctccacccacactgctgggagggaaaggtctaataacagtaaaaagtaacatacacagtcaacagtaggggagtgactatgctttctggacaaataggtaacccatagatactagttaaaatgtaagaaattagaaaagcagataactaacagaaaagtgagtttatgtgttataaacacaaataagaaaaacagaagcacagccccttattgtatactaagttttcctttgcagtttggctccttcctgacccactgtgtcacaacctgacaggcgatctcagccccaggagcacatgtagtttaatgcttgtatgctatttaaaggtccatttgagccacgtgtagtgatgacatgcctgtaacttggagatttggggagagaaaccatgagtttgaggccagcctgtgctgtataggggccctatatccacaagaaaggaaacagcgttcctttggtggcggtgggtatttttagtccacacaatcagagtagccatgagtcatccctacacacttttgccatctcagtcagaatagagaagtcatactgtctgttttctatatgtctattttatgccctttacaaaatagttcagaaaaaaaaccaaacaagcttgaacttaattaaagggaaaaataattcctttaaaagagtaatttgccagtatttgcccttgatatgggaacttttactatttctaaagttaaagtcagaaaatgattaataacaacaacaactttacttagaggtaaatccctcttcccccaatattagtataaaagacagcattgaatctgtcattgccaaattattagtgaatgtatagttcagatttgctagtctttgaaacacagcactcctaagtttctaacaggattccaatgttattttggtgtgtttgtgaccactaagcttgcttcttactataaaggtattacctctatacaactgtacaggacttcacagaaaatcagaagatgcagagagagtgggcccggtcttaacagaggactccttacactcctaactgtgatcacagacaagaaataccttccgaagtgctctgtagatttttttgatgaatgttttatgcttgcatttaaacttgaaatgtatgagcagaatgagacaatctttacaatcagaattgagaagtgttacaattgaatggccttgtgctgtagcaataaaatgaccaagtgcaatgactttaataaaatcatctttcaaacgttgctgctattaatatttttagttaacaaaattctgtcgtttagcctaccttgccttctgtttgttaactgttatgtgatacagttgatgttttgacaatctaacattccaaagtccacatatatatcttaaaagtcttagaatagtatattcatttttttttacaggtgctgttaaaaaaggaaatgaaagcatgcttttccctcaaaaagaaaaattaataataaaagagaactgtgctgccgcctgtgttgttttttcctggttattgcttatcttagtccactttcctgctaaacacttatagatgaaagactctggcttattctttcagagagcagagtccaggatggcaaggcaaaaaggggccacacaggaagaactgagcttacatcctgattcacagcaagaggctgagagagg

SEQ ID NO: 24841 - DNA, 1246 bp, Mus musculus
ttaagcatgtctgcagtttgaaacccattacaaagtctggggtagaatttttaaggttggggctctttagatgaggaatgcttaatatatatatatatatatatatatatatatatatatatatatatatatatatatatatatacacacacacacacacacacacacacacacacacacacacacacacagcattaattgcttgtattcctgctgtaaaaatattatgacccaagaatgtagctcagttagtagagtgattcgctgttatacaaagccctgggtttaatctttggtactgtatgattggcaatctcaatacttgggggtagagggcagtatagaagtttaatatatgaagatttggaattaaaaaccatcctggactacatgtggtcctgtgttaaaaatgaaaaccagaacaaaacaatcttctgattgaaatataatattaaatataaacacaaacataatgagaatttttaaaaatatttttcagtcatctctttcaacaccttcaagtgcttctaaagtaaatacagctgctttcctaactccgttagaactcaaagctaaagcagaagcagatgatgggaaaagaaattccgtggacgaacttagagcccagattattgaattgttgtgtattgtagatgcactgaaaaaggatcatgggtgagtaactcttaattcctttgatgcgttccctaaaatacacttttaggctttgtgaactgaagccctaatctctcctaagtatgcaaatgcatgtttcaaaggcatttgtattatagcactttcagcaaagaccttggtgggaaaacttgctccagtaactccgctctagaagggctgtgtgcacgtgtgcactaaggcaggagctggccaggcataggtgctagttagttttgaaaatactgagaaaattgcattggggttttgggtatgatctagatcctcatgcttaactcttagaggattttgacccctatttctgttaggcttacgttaggtggttacaaaatgaatgggttccaacccacaagaaatctctagcctcccacccccaccctcgcaccccacactttcccgttagctctgaaagctcttgtttgtgtagtgttatggatcaagcccagagtgtgatgttaatgcactcaactaccattgacccatgtccacagctctgaaagttataaagtaggacacccccgcccatacacacacatgaagtattaactctaaa

SEQ ID NO: 24842 - DNA, 1116 bp, Mus musculus
tttcatttattatgtatataaaaatctacctgtgttcttatgacctggcacctcattaaatgcttttactaccgtttcattgtgtgtatcatactcagtaaggaatattttggttggttttaagtttttgcagtgtcagtaaagctgatgttaacatgtatgtagatttttgtgtgaatgtacattttagttcatttaaataaataccaagaaacaataccaaggatgaaataaataccagtgatcgctggatcatttggtaagtgtttcctcttgtaagcaactgccaaactattcccaaagtagctatacaatgttgtatttctaccagtagtgaaagattgttttgtgtccttggcagcatgtaatgttttctttgttttgaatttgtattctgggagttgtgtgatgctgtctcatgtttttcactttcctaatgacatctgatattgaacatcttttcatgtgcttatcaactatatgtttggtgaactgtatgttagatctttgtctgttttttttttccccccgagacagggtttctctgtgtagccctggctgtcctggaactcactctgtagaccaggctggctggcttcaaactcagaaatccgcctgcctctgcctcccaagtgctgggattaaaggcgtgcgccaccaccgcctggctgttttttgtttttttaaatcagtttttttttttaaattgagtttaagagttctttgtttattttgagtagctgcctttcatcacacgtagtttttacaaacaccttttccattgtgtaggtgcttatatttcttgtagaacagaattttattttcttttttctggaatttttttttaaagaaatggattaatatgcgtgtatatgatttgtgtgtcagtgctaggggtatgtatgtgattggaggacaacttgtgtaagttgattctctcctttcaccatgggttcaagttaccatcatactcaaggccatttctgtttctgtctttcctgttttatattatagggattttatattgtaggattgtatgtttttttctttatatttaaaactatgacttgtttagagttttgtttagcttctttagcctgttccaaagacacttta

SEQ ID NO: 24843 - DNA, 1231 bp, Mus musculus
gctctggcctcccacgccggaacccagttagtgtggccccaggtggctacactccccagctcaaaaaaagtaaagtctttaaaaagtgtattatttttattttaacttaagctagttaatagtgtctttttctcttctagcctttaatcctacagcctctgggatctagaactcagaatgtggaggtaacaaaaccagacgttgatggcaagattaaaggtaagctctaaaataaaccactatagtataaatacgcttttatattactaactcaacagacggacgtgtgacactgtactaattcccagaatagtgcatgagggtgagaattttgttgtgctgtgttttagattttagactctctctgaagtttatctattcctgatacatatcagacactgagtaatatttgagtgatagtgaaattttttcttaatgttgactatacgttttaaaattatttaacctttaattgcttattgagtatattacttagcacagaggcttaataagtacctgctacattaatcaacttgtaagtcacagtatttacattcttttgtttcagctaaggaatattgtagaacattatttccctatacaggaaccaatgaagatgaacttacatttagagaaggggagattatccatttgataagtaaggtaagatattttagtgagccatccctcacagcagtaccttcttgcattgcctgtggagcattaacttcagatgggctgggactttatttttgttttggggttctgggaacttggaacataaatacaagcttataaagtgattcttttaaaaggtttttgtcttgcgtattacttaaaattgatatattaaaaaccagtgatccggggctggagagatgtttgagcacctaagagcacttactgctcttacagaggaccagggttcagatcccaacacgcacatggttgcttggatccattgtaactctagttccaggggatcagataccctcttttgacttctgcaggcatcagacatgtgcatgatgcattcacacatgtagacaaaatatccaaatgtttaaaataagaaatctgaaaaagaaaaagaaatgaccagtgatcacattatgtattcctttattaactccaagaattgtacaacctaaatgtttattagtaagtaacaggtgtgggactcatcttcccttgtgaaatgggtgaatctatggcaggggtacacacgcca

SEQ ID NO: 24844 - DNA, 1195 bp, Mus musculus
tcctgtttcagcaaaggcaaggaagggatttctcagaggcaagatttgaatcttttactagcagtaacctcatgacttgtacataatgagcacctgttccatgaattacttatcaaacgttggttttcaggctgtcacatgcctttaatctaggggctgagacaagtggatctctgtgagtttgagaccaacccagtctacttaatgagttccaagacagcaagaaaagttttatgtagagaaaagtttattttcagttataaggttagtaacattgaaaactatttatttaaatgagatatttctagctgtgatgtcacatgtaatgctgataaggaaatggtgacagtgagcagtattcttgacaaaatttactgttactaaaaccctttagcatccatagcagaaactatatatttgaaaggaatttattgaatgttttttaacttatggaaattaagcaatcttgttattagtgagtataaatgatttattaaagaatttgttgcatgaggctatttctgtttagaaggaggtgcttgttagatggacttttgaaagtgaatgttttcagggctgtagaggtgacttggtactggctgctcttcgtgaagatctcagttcagttcacagcattcacaaggcacctcccacagtaactccaatcctagggcatccgacaccttcttacggctgggtgggggtgggggtggggttacgtacatgtggaacgtagacaaacactcaggcaaatgcccatacacgtaaagtgaacacaataaagaaatagacaaagacaaaattattttgtcgttgtttaactgaaggggaaaataaaattttataccacttaggaaattatatctttataaatgtttttacattttattcttttaaaatttatttctaattctgcctgtgtgtgcgagtctgtgtgcatgtgtgtgctggcacttgagctgcttggaggcggctgatttccaggagctgggatgatgggtgctgggaattgaactctgagtttctgtattcttaatttctgagtgtgcgcacactgtgtgtgtgtgtgtgtgtgtgtgtgtgtgtgtgtgttttatgcttatggcacatgtatagaggtcagaggacaacttttgggagtcagttttcttctactgtgtggatttcagggattagttaaggtaggcaagcacct

SEQ ID NO: 24845 - DNA, 1175 bp, Mus musculus
caaggaccaagtgcctggcagagcgtcagggagtgatgccggggtaaattaattggctccacagattgtttgtaatctctctgtgccaggccacttcctggttggttctcacaacaaaggatgaaggaggactccttcagtgtttccactcaccctttcccctctttccccctcttctttcaacaaaggaagatacgggagttcaggaagcaagttgacttagggcaggctagagtatcagctttagaactagccctgtgctctgtaaacaggggttccggcagctcacgtgatcttaggcactttaaatactctctgagttcctggtcatccaagggcttgctgagaggcgtgtctgaggaggtgtctaaagtgaatctgctgctgtctgagacagccaatggtccgaagactgtggctgttctcaaggtcattgttgctcctacggtcaaagtagaaatggcgtttcctccttaaacgattgactttaccggacacgctgggactctgagctgtaaccttgtaaaaagttggttatttgcagtgcttgcagctgagtccatgattattctgtgaaaaaaagacagccgcttggctaagttcaagggtattcaagggctggagagatggctcagtggttaagagctcttccagaggccccgagttcaatttccatgtctgaaaacagggacagtgtactcatataaataaataaatcttaaaaaaaaaaaaggtcttctatgaaaaggtatttgcttgctactgagggtaggttaggaggtcacaaaaggccacctagctagggtttactaaactgggaaaacaggattggcagggctaagaagttaagggtggggatggaagaaaagaaaagggttaaagataaggcctaggaaacagttggctgggaaatgtagcacaagaaaaagataagctcgtggcagcaatgtcgttttggtagggaaagaatgtgtgtggtactggttcatgcagtcaactgggcgggaactggagtcacccgggaaaacttaattaagcaactgtctccatctgattggcctgtgggcatttctgtggagccattttcccccttccttcctactttccattccttgcttccttcctttctatttatcctatatatcctcctcctccctcctttgcttttcttattt

SEQ ID NO: 24846 - DNA, 1141 bp, Mus musculus
gatgtcaagttggtgtggtacccgccagatcttgaacagtggtgatgacctgttattgctgttgctgttgctgttgctctgttcgcctctgctcctctatctgacacctctcttatttctttcagcttggattcctcagcaccatcacagctcaaccagaacaaaagactctgagtctccctggcacctaccgccatgttgaccgtaccactggccaggtgctaacctgcgacaagtgcccagcaggaacgtacgtctccgagcactgtaccaacatgagcctgcgagtctgcagcagctgccccgcggggacctttaccaggcacgagaacggcatagagagatgccatgactgtagtcagccatgtccatggccgatgattgagagattaccttgtgctgccttgactgaccgagagtgcatctgcccacctggaatgtatcagtctaatggtacctgcgctccccatacagtgtgccccgtgggctggggtgtgcggaagaaagggacagagaatgaagatgtgcgctgtaagcagtgcgctcggggtaccttctctgacgtgccttccagtgtgatgaagtgtaaagctcacacggactgtctgggtcagaacctggaggtggtcaagccagggaccaaggagacagacaacgtctgtggcatgcgcctgttcttctccagcacaaacccaccttcctctggcacagttaccttttctcaccctgagcatatggaatcccacgatgtcccttcctccacctatgagccccaaggtaactcaaccccacgaattgcttgcttgaggaaggctttgagcccagtagagtgagctgctaaccaaagatgttctcttcactttgctaaatctaaaaaatcatcccttggaggagggaaccttcattttttgtgtggctaattaaatttggcttctttggacttaatagaaatattgcaactcagagggtttctattaggagacaacagatatctagaaagtaggttacatcaaactggcaaataaagaacttcgagaaataaggacagtgtgtgaccttatgtaaatcacttaaccgactcagtgctgggcctgaatgagtgagttgagtgattttagttgtttaaggttcctttcagatt

SEQ ID NO: 24847 - DNA, 1845 bp, Mus musculus
aggctgaggacaaactggaccgcctcttcgagatcattggggtcaagagccaagaagccagccagaccctcttggactctgtgtacagtcatcttcctgacctattgtagaacacaggggcactgcattctgggaatcaacctactggcggggtgatttcatttcgtttctgacttttgtgttttggtgtgtatgtatgtgtttaacagagtgtatggccggtgagtttgggttctttctttctttctttctttctttctttctttctttctttctttctttctttctttctttctttcttccttcctgaaagtgaatgtataaagcctttacaatgtataactgttggaaaatgcccaccactaaatttttttttaagttccacatattctccatttttgccttcttatatatatcttcaacactattctgtgcactttaaaaacttaacataaacgcagtgtgacttctcccatatgctgggtcccgagactctcaacttcttaaaaacctaatggcatcttgtgactcctagaagtagacataagtctttcaaccttcacacctactctttctgttttaattattattgctatttgtcttattgtttgtgctttacaagcgttcttgaggacggagggaatctacgaccctgttgatgactgtaactctattcgactttgagttgtcttcttcatgtcttgttatatagttcatattcatggctgaaacttgaccatactccctagcgctgattgtatggttttcgtctggacaccgtacactgcctgataacttgtgcacctcttaacgctactatgctctgggctggagaatgaaatctttaagtcaccaggacttgctgtttcagtggcttgacacctgggccaccaaagaactcgatcttcatcttttagggacacctctgctgcaccttggaaagccaaccttaagtgccagtggcactttatgcccagctttgctttgaaagatatctttcttgttttttttatccttctctttctctcttttttttaaaaatacacatagtcaataggtccagtctgccctcaaggccttgctgggttttcttcatcatccaatcactttcattaaaaatggctgcagctgtaagaactcttgtctgataaattttcaactatgctctcatttatctacctgccctctgatgctcagtcgtcagactctaatgcaaaggtggacgtcggctgcctttgcgtgggcgggcttagtggtgaggaactgatatcagaaaaaaaatgccttcaagtatactaatttattaataaatattaggtgtttgttacttgtgtggttttggtatatttactactgaactttcgcctttccctctgctcaggttctagccctgttcatctcttggggaaggatgtgtgttctgaaacccttctcctgtccaatctgtaaatcatgaatattattagcaaaagtcccttttggagaggtacttggaggttcactgcacagggctctgataagcactgccaagcctttcctagtctttcggagttaaaccttaggtaacttgatacctgtaggacgatctgcacacattcacaggcttctagccaaaacctcactgtccctgacgaactccagagggcttggtcagcagtgaggcggatgtggtcctgtgttggtgggatatctcaagctcactgcaggttttcctaagcttggaccccacctctgcggaattccaatgatcaaacgctagcaactttaacatcctctttttgtgagaacctggaagctgatactgtgtatactgtgaccccccacgtcaacaactgggactgtctt

SEQ ID NO: 24848 - DNA, 1373 bp, Mus musculus
gaaaaaaaatatgacgagagtataaagctgcaaggtcagggttttgaacttgacctttgtggctcttgaatgtgccttctgtgcagtcgagtggtcagccatgtaaaatggagttgagtgtcttctgccctggcagcagctgcgtgctaagggcagagcagctccagccctgctactgctcgcttgctcgcctgactcatcataactccgagaaccagagagttgttgggaagcactgtcatcattcactccctccacagctgggtcctcagagccagagctatcaaaacagcctacatgatgtccattggacaacagaccactgcttcctggtactggggtgatctcccgcattctgacaacgtaaagcaaacttgattattgctcttgagacgcaagatgggtctaaagtatgcagtgcaggtagacaccgatgatccgtgatgactctcgacacttgtcagtcatcttagatttattgcgctgaactggctcactgtgaatttccttaaagtttgatgtctggagcctcattgtatttgggttttgagaggcatttctgtactgcgtacataatctatgctcttggtcacagaatggatgttttaagaacaggataggaatgattttgttcataagtgttctgatttattttgttacatgcagtagagatactaaaggttgaagggttgatcaagtaaaacaatagagaaatctctgcttatttcaatttccatttaagaaagtaacaaactgcaatattcgctttgagaagaagtaggtgggcacttaggacttgtctccagcagagttgaagacagtttagctcccacagtgctgcggatcccagcacaatcccagtgcggtctccttcccctggctgcaccttacacttggtgtccatgtgtagaacagacttttataaaggctgggatgggaagggatgctctgccagtgtcttagtccttgcagcacatggatttattttgtattttattctgttctcagaatactaaaactagttaaaatgttataaagtgcttattcaggagacaagaatagtatttgtttaatcaagtatattatcatattgaactttctgctagttcgtttgtatccttgaaaaacaaaaactaaagcccctggctgtagttttgctctgagaaaaccttcttagtaaagataggctttgacatggagatttagtgtttgtgttagctaaacctgctctgctttctgttcaggagaaaatatttggcttccaaaatatttagctcttggtgatagtacccaaagataatgggaacgtgtttgtctgtgtacttgttggtaattgcactagtcagctcagaatttagtaccttgactctcta

SEQ ID NO: 24849 - DNA, 1174 bp, Mus musculus
agccaaagaaatcactgtcacgctgctttagaggctagaagtctgagcccaggcctgtctcttgctgggagagcaaagcagttccatgcctttcctggccttcagtggtgactagcatttcttagtactctctggctcttagatgaaatcactccagcctctgccttgtcctcccatgtccctaagtgtgtctgcttcttcccaaaaggacaccagtggtgttagggactaccttaaccacctcaaactacacctgaaaagaacctatttccaaataaagtcatgttcactagtgctagaaactatctttttttaagaacctgctgaacttatgataccatctaattgccattatatcaagccgcaagaccagttgtgtaacatgcattacctgtgtagcctgggaataaatgcctttgaatgggatagctaaatcatcccatcccaggcttagggaacattgcaaatgaagagtcagaaagaacataggagcccaagaaaagttagagtcgtgtggaactctgacttccagtcatgcatgactgttgcattctgcaactcagaaaactgtgcttgcctgcacacgatctgtgcaagactgaacccagccatggagaggtgagagcttatgtgacccttccctctctgaggatttagagaacactaatggatgggggcaggggagagaaacactatttgtttcatgatgtagcctctgggaaggtgccggtgatcctgtaaataaaccttcacccttggttctgtaaacagccataatgaatactcattggatcacacacactcccgaaaaagacataaaagtagaagaggaacctacctaggataagaatagggattaatgagagaaagcggggcaaaaaaagtaacgggatggattctatgctcaaatacattatggagttatatgaaaatgtcagaacaaaacccctgttatatctaattagaatgtgcttataaaaacattagaaaggcagcagcagtatatgatccatcgtcttgtgagtgagttatcatgttgagctatcatgttgaaacaaactgaaaaaaagaacaaggaaagcagtccggcatgacacctgtcaagtgataggtccacaggcttgccatccttccctctttattttcaatgtctttgaaaaacactactggagaa

SEQ ID NO: 24850 - DNA, 1233 bp, Mus musculus
tagaaagccagggcctagtcagatccaggaaaggccatcccaccaggatggattgccagccccatgctgctactgtatgtttggaggagcaagcagaggacagtgtggcttcggtgtcaggagtggcgttagcacaggcctgaccatatggacccacatgggagggaattgggcttttattttaaattgtggaagtcatgagaatactcttaagaagaggagtgacaggtcagccatgggagtaggttcattgctgtggccatactgtggaatgtcttgcctgggtggaggacaggaagccagttcctctaggagccttgatgcagtagtggaaacttgagggtcctttggaaagtcggttggatagtgttttgctggggcaaacacatgaaggaacgtttcgttaaagtgggcacaggtgtgaaagtctaaggcagactcaggaaggaacgtttcgctgtagcagacacaggggaggatgctttgctaaagcaaggacaggtgatgaaggactctttgctaaggacactgtgtattggctcggcttatattgcgtggttgagctgcatgtctcaggactccatagagagcaacactccaaaaaccttgtggtgtgctgcagttggttgccgcttccaaggactagggctgattgcactcacatgctgaggcaaggcacatgaaggatgtgatgtttggagggtataaataggactccacggagtgatagagacagagcttggcttgctggtacagctagctgtgcaatgattgtgggcctcacgtcttccctgatgagaaatgcacagccaagaactcctggtatttctgttggtccctcctgctgacttgagctgaggctggggcctggctgtctctgccaggttgtgtcacttactgttgctaacccaactctactgaactggactgctggtgtatctgtgaagtgtttgtgagtggaacgagctgccgctgcctgctaacctgtgaactgaactgccaatttccagacaacacaggagttggctccaaagaacctttctaaacaggtcccatttcccttgtatcctttcttttccactacctctggtgggtgatgggttacaaggaaggttaaagtgtttaataaccatcattaaaaataggaatggaaaaaattaaagttacaagctgcctgggtgaggacatggatgcagacccattggggccttaatggttagcgcaggaatggac

SEQ ID NO: 24851 - DNA, 1158 bp, Mus musculus
gtaagagaataagaaagttgaggatcactttacaagagtcactactaagttaattgtttgatttttacatatatctaaacatttaaattatactttatttcttatttagtgtatattcctgtgtcccgtgtgggtgcacatttaccgtggtgtgtgtgtttgggtcagagcacaccttacaggacttggttctctccttctgccctgtgaatgagacctaggtggtcagtcttggaggcaagcgcttgtactggccccaagccaggtgtttcagaaacttttgtttgttttgtttagacggaagctggttttaagtttgtggtaaccctgcatcagccacctaagttttgtaattacaggcatgtgtcactatgctctgctgttttagaagtttttagagactttattagttagtactgacagtgtgaattgacaaggaccaattcttctctacaggaaagagaatctcgtgaacatctccgtttagggttgttaggcctccccgcacctaagaatgattttgaaattgttctgcctgaaaatgccgagaaggaactagaagaacgtgaaatagatgatacctacattgaagatgctgctgatgtggatgctcgaaagcaggtgagaatcattaaaaagcatcatcagtatggtcagtatggtcatgcggctgttgagcagtggttctcaacccacgggttgcaacccctttggggttacatatcagacatcctgtagagcaaatacctgcattgcagtttctaacagtagcaaagctacaggtaggaaatagctgtgaaataaggttatggttgggggtcaccacaacatgaagaactgtattaaagggttgcagcattaggaaggttgagagcctttagagggaggcatggctgtcagtgtttctaggttgctactttgagtttttctaatattttaacaaaattcctcaaattatattattaacaataatatactcacataaatgaatgatcttatgcttagaatatcttaattggtttttttagatgtttgtatacatatgtttgtttaaacactgaaatttactatgctcttctaaacacaagaatgtgttttatttatagaagtgaagaaaggattgctttaatctagtgaagaaaggatgttaaaagcaaa

SEQ ID NO: 24852 - DNA, 1190 bp, Mus musculus
ataaagaattagtgataaagtcagactaaaacctgggtgttgtgacatttggcctcagctcatatcaggaactttgatttcttagtaccttatggtacagagatctggcatggataatgggagtagctcttgggtaatggcagtttcataaggaacccacagcactgttttccccttaacacagtctcaggtggcttcaaactcactgtgtaactgaaggtagccttgaactgctgattgccctgcctctccatcctaggtgccaggattgtaggcatgttgcattcacacccagtgacagtagcatatcttaacacatgaactttattcagaactcctgatgtgatgtgttaggtggacaaaggactgaaagtgccgagatctgttctggggcagttcacaactctcttgttttttttctgaaagattgtgtatacaaatcctgtctgtatcaagatttctgtaacagggccagagggaggattccactagcctttctgactgctatgcactctcttgtatctccaggaagctcagaacctcatggccttgaccaatgtggacactccattgaaaggtgggcttaataccccactgcatgagagtgacttctctggtgtgaccccacagcggcaagttgtgcagactccaaatacagttctgtctacccctttcaggtattgtaaaaatcagcatggtctgtagtttagaaaaacttcacttaagaacctgagcagcatgattttttttgagtaatgttgacagagattagaataactattaacttgggtttgcctttttgatgtcttctaattgggttgcctggtgtctttggaggttagatgagggtattggctcccaaagaactggagttaaggttgtgagccgccatgtgggtgttagaaattgaacctgggtcttctgcaagagcagtctgcactcttaacttgagccatctttctagccctgttatttatttttagttgttagctctgccctctatgggttatttaggctagaaatccccacagtccattatacttgtggatgagagcagaatcaagaatcatcggaagctagtctttgtatagtagttattgcttcctgtgaggctaaagagagcctaatttctattttcctgtgtatatcttgtctcttaaatagattgtaagctccttgggggcagggac

SEQ ID NO: 24853 - DNA, 1346 bp, Mus musculus
cttgaggtcagggatggtgattccaccagaggttcttttattgttgagaatagtttttgctatcctaggttttttattattccagatgaatttgcaaattgccctttctaactcagtgaagaattgagttggaattttgatggggattgcattgaatctgtagattgctttcggaaggatagccattttgactatattaatcctgctaatccatgagcatgggagatctttctatcttctgagatcttcaatttctttcttcagagactttaagttcttatcatacagatctttcacttccttagttagagtcacaccaaggtattttatattatttgtgcctattgtgatgggtgttgtttccctaatttctttctcagcccgtttatcttttgtgtagagaaaggccattgatttgtttgagttaattttatatccagctactgcactgaagctgtttatcaggaaataaatcttttttaaaaatatatttttacttttaaaattatgcatctgtacatgagtacgggcgccttctgtgactagaggctttggaccccccctagggctggagttataggtgagctgcctgatgagggtactgggaattgaactcagattgtctgcaaagaacagtacacgctctttaaccactgagctgcctcccagtcatctccttctgcttcttctatgctagttatcattaactgttaataagtttccatctctctctctttttttaaatgatcgtgtgtgtctcttataggaactctgcaggtactaacttaagatttgcttttcttcatttggaggtgtgtgactgaatgtattctctttggtaactcttctaggatgaaattctgaaagcagcggtaatgaaatatgggaaaaaccagtggtctaggattgcctcattgctgcataggaaatcggcaaagcagtgcaaagccagatggtatgtacctgtcagtaagtggaaaccaacatgatcccgattcccactgtgatgagtgagatggctcatttcatctcccccacccccaagagcatgaactgtgatatggagggaagtatggagagagctgcctttaaataaatgtacttaccacttgcttcctgtgtcttgagcaaaccatttttccttctctttaccctgcctgttttctcacagcttagcactgattgatcagttgtgaatccttgtccaggtgagttagtatttttatttgagagtaccttgtgagacaatgcagaatcttaggtagatggtggaaagggtcagatacagagcagaaggaagtggctcctaggctgcagtagtttgattcccttcctcttagcggcct

SEQ ID NO: 24854 - DNA, 1172 bp, Mus musculus
cttactgcgctgatcatgcctggattcctgtatatctgactgatccgtggcgtggggatctgctttaaaacaagttagttatgctccagaatacacatatacaaaaggattcattggaatgattttggagctgtcatagttgtcacacacagttacactattcaaaataaacacttgaaaatgatgtttgataactcccttctatagttttcaggactgtgatgactattcttcgttgtcaacttgactatatctggaatcacctacaacccagaaatggagaagagcacacctgtgagagattgtctgcttaaagtggatgaatccacttctagtccagacctttgaggtaggaagacacacatttttaatctcaatctcgaggtgggaagacacaagtctttaatccaaatcttaagagatgtcttttgtgaacatatgagccatactttcagctggatgtctgtataaggacgtaaaagaaggaagcttttactctttgtctatctgctcttgccttgctagcacatccattccctcactggtattacaacctacttctggattgcagcatatactgaagaccacctgagacatgcagccttgtgggactgagcaaccactagatttttagactttttattgttggattagctggactacagaggaaggagagagagattgattccataagttctgtgactctaaagaaccctgactaatacagattttggtaccagaagtggttctagagaagcagaagtataaggatgaatcttttaagtatctggaataggcatttcaattcgccggcaccttcagctactgaagtctctccagtcaccccctctcctgggagcttggagagtactgaaggcccatggtatgaactgtattacaaacttaaagagataaatgaatttgattatcctggctcaccaattgtgagcgacaatggattaggtgaccctgtatatgaaacttttgacagtttgggggaaaataaggaaaatgatgctgctggttggttgcttttagcatctctggataaactgataaaggataggaatgagctccgggataaaattaaccaactgcagaatatggtgaaggacaacaaagaacttaatgataaaattgaccatcttcagatgctcataaacaatctaaag

SEQ ID NO: 24855 - DNA, 1945 bp, Mus musculus
tatacctttacagttttacctcaaggatatatagactctcctgttctgtgtcataacttagttagaagggaacttgattgtctgactcttccacaaaatatcacattggtgcactatattgacgatattatgctgactggaccaagtgaactggatgtagctactcattggtaacaacagatatgaatcagaagataggaaaaattcaagaactgtctacaacagtgaaatccttaggagtccagtggtgtggggaatgcagagatattccttgtaaggtgaagaataaataattgcagttgaccccaccccccaccaagaaagaagcataatgtttagtgggcctatttggcttctggaagcattacaactctcacatgggtttgttactccaggccatatactaagtgacttggaaagctgttagttttgtgtggggcctgggacaggagaaggctcaacagatccaggctactgtgcaggctgttctaccacttggatgacatgatccagcagacccaatggtacttgaggtgtcagtgacagaacgggaatgctgtttggagctttggcataccaataggtgaatcacagaaaagacctttgagattttggaacaaggctctaccgtcatctgcagacaactattctccctttaaagacagctcttggcctgctattgggcctcagtggaaactgaacatttgacaatgagccagcaagttaccatgcgaccagagctgcccatcatgagctaagtattattggaccaccaaatcataaagtaggacatgcacagcagcaatccattatcaaatggaagtggtatagagctggagagaaagctcagcagttaagagcactgactgctcttccagaggtcctaagttcaattcccagcaactacatggtggctcacaaccatctgcaatgggatctgatgcccatttctgatgtgtctgaagacagctatagtatactcgtatacacaaaacaaataaatcttttttaaaatggaagtggtatatgcatgattgaacctgaccaggtcctgatggcacaagtgagtcacatgaagaagttgcccaaatgcctatgatttctgctcttgttacagtgcagtcttactgccaagcatacacctatagtttcatggggtgttccctacaatcagcgtactgagaaggagacagctagggcctggtttactgatggttgtgcactttatacagtcaccgcccagaagtagacagctggagcattaaaaaccctttttgggacaactctaaaagatgctgacaaagggaattcttcacagtgggcagaacttggccaaatgaatgattgttcactgattcacgtgctgtaaaatggattggctgaatagtcacggacatggaaagatcatgattggaaaattggtgagaaaaacatctgaggaagacatatgtagatgtacagaggatgtgaagatatttgtgtcccaagtaaatgctcttcaaaaggtgacttcagctaaggagttcattaatcaagtagataggatgacctattctggggacagtcaacctctttccctagccattcctgtcattgcccaatgtccacatgaacaaaatggccatggtggcataggtgggggttatgcatgggctcaatgatacagactttcactcatcaagactgacctggctacagctgttctgagtgccaaatctgccatgccaacatcagagaccaacattgaaacccagatatgatgccattacctggggtgatcatccagcaacctggtgggaggctgaccacattggaccatttcctccacggaaaggacagtgctttatctttactggagtaaatagtctggttacagatttgcatttcctgcaccataatgcttctgccaaaaccacaatttatgaacttacagattgccttatcc

SEQ ID NO: 24856 - DNA, 1123 bp, Mus musculus
tttttatttcatttgtgacccatgggaagagtctgtccatattgagggtgggtctttcctcctccattacatgtctctgaggaaaacaccctcagatacacagagtatgtttcttctaaatctagtcaaggtaacagtaaaggtcaatcaccagagggaccaagccatatccaaactatagcaataggaaacttaacaattccctaagagatgcatcccacagttttattttgagagatttactttggttggactgtttccttttgatcttgagcaattggctcccaaaacttagctcagtggtggcactgactgacaaggcaaagtactatccagttttactctcaaggtcacgcagcaggtctgtgaggcttttcttgcttggtctgacaatcaaagacagtgtatctgcacttccactttgactggggaatgtgccagacaggggtggtgcactttttagtgaccctatgggccaagttcccagtggatttggaacgggacagggaactcagagagatggctggtgtccttccaatgcaggatgatcccacagtaagcatccaggaggctaccactgccttgagaacctcaacactgaggttcctctacttgaactctgtaagaatctgtatgtgaaaggcaaacatttctgcgtgtgtacaaaggaacccagcctatgaatctcttaaactatcagccaaatagcccaatgcctaaaagtgcctatctctaacaaacttaagagtgtgttcagggggcaacagatagttctatcccaatagtaaaggcagtagtgtggcatggttatttggctacaaatatgaatgatagtaattctgctatggatagtcagagcacagctacactaaaatgagttcttcaatgggatttcaaataaactcagaattctacatttgagccagactcagaaacttacagtgaccataagggagagaacataaggagatgcagagactaagtgagccttcaggatgatgtagctcttcgtgaaggaaatacaagtggtcccagagagatgttggtgctgtctataggactccttaaagcccacatggcattatcacataattagaaaacaaaacaaacctccctctaatgg

SEQ ID NO: 24857 - DNA, 1220 bp, Mus musculus
gaggggggatgcgcactatagatcagttctggcagcctatctgggtgcagcatggtcctggccccacatgtgtggtgcaccacagcgacctgtggacacacagccaccaaagaagggaaaccactgtgcttcctcaggctagatactggccctttgggtgcccagttcatttgaaactgtccttataaaactagttaaagtgactaaacaacaaaagaatccagtcgttctagagctgcaggagaagcccctgggtagccagcgaagagcagaggtcagatgggaggcccgggggcttggggtgtgttctgataggaagcccgggggcttggggtgtgttctgatgggaggcccgggggcttggggtgtgttctgatgggaagcccgggggcttggggtgtgttctgatgggaagcccgggggcttggggtgtgttctgatgagaggcctgggggcttggggtgtgttctgatgggaggcccgggggcttggggtgtgttctgatgggaggcctgggggcttggggtgctccctgcactccgcttcctgactgcgagtgcttgtgtggaggacttgagtctctctgtaacttcatttccatctgtaactccagttctgggcaacctgatgcaaacaaacactcatacatgaaataaaaaccatcagtcctttaggacgagaaaaacagcaaatgcgaacagccacacaggcctgaagcactgttacaggggaaggtctgggacccatgcaactagagaggacatgctctgcatactgcaactcggctgttctagcgtgtcactggatgacttgagaaatgcgtcactgggttgcttcactcttctctgaatgctgctgtatgctgacacagacctacacagagaggtcaatgggctcaactgaggggatctcaattcacctaggacacatctctgagcataccagtgagggcttctagattaggtttactgaggtagaaaggctggtatgtagacagaatcctgggttgaataaagagaagcaagctgaacatcagccatcctatctatcaatctatccatccatccatctatctatctgtatatctacctaactacttatctatccatccatccatccatccatctatctatatatctacctatatatctacctacctatctacctaactatctgtagctttctttctgtctcctctatgtgtgtctgtcaatctgtct

SEQ ID NO: 24858 - DNA, 1697 bp, Mus musculus
aggctgggagggctccgcaggccttttctggaaaagactcagtctccggtccatcagctgcttcctcccctaggttctgggtaggtgcttccgtcagggaggccatcctggaggtcctcattaaagcccgccaggggtgagtgagtgagcaagtggacagagcctgagacacaccccgatgtcgagagacctcaggagtagagttagtaatggctggtagactgagactagccctggagggatggcgatgggctggcgtgctgtagcttttcctcagcaggcagtggagcaaacacttaagaaggatgtccctcacacatgcctccatagagccgagtccatcccaaaccctagctagagagatacccatttccagtggcaggagatccgttctcaccagaccctccacttcttcctgtccagcgagttgaagctctaggtcttcagaggggctccatgacacagccccggggcaccagccctttgtcctgtcccttcaaagctctgacaccaactttgctctcccctataccctcttacccctccaccccagtgtgcatgtctgtgtttggccccttgctctcccagctgccctggctgacgttttcccagcagacttagtacccagggattgggctcacatccatccaatcttgctccctctgcttcttgctttgccttcaccagcagaactccatctttttggctttccctcttcctcctggctgtgccaggcctatgccaaccaatgggagtggcccctacctatgcaaaaatctcctctggctccctgtcccctttttccctggggaatgtgggaagccctgttgtggggatgccatggtctagggctcaaatgggggctgagctttctggttatacagagatgcttgggtgaggagggaggggtgtcagagaaggataggtttgggcagaagggagcaagcacaccactgggtttcctgggcaacagtgtcctctggccacttagcacagaaccctccaggaccctgaatttgaggtgtgtgtgtgtgtgtgtgtgtgtgtgtgtgtgtgtgtgtgtgtgtgtggtgttgactattggagcacaggtactgagtgagctgtggcctcaggcctcagttcttggccaactggtacctgaatgtcttgttctcatttaggggcagcttggccatcttacagctccaaggagggaaggacttggctcatcctctttcattctgggtccagaaactgagcttggccttgggagaggagggggtggggaagccccgttattatttttgcctgaccatttctgcctaggtctccttgcacagacagcctcacctcccacacacacacgcacagacttagagagaaagcaattctttggtttcttttcttggtagctttattgattgccagggaaaatgaaaaccagaaaattaattaatctctaaaattaaactttacactgaatgttcttgtttctctaattagaacctctgctagcagctgtggctacacacacacacacacacacacacacacacaaacacagagagagatacagatacacacacacacacacacaccctcacacctacatgtttgcactctggaactgtcagagggtgtcaggcacagaggactctaggctgcccccgacaggcacacacacagtcactcccaagccccctctggtgctctac

SEQ ID NO: 24859 - DNA, 1194 bp, Mus musculus
caaccaaccaaacaaacaaacaaaaaacaaaaaacaaaaaacaaaaaaacaaaaccacccaaaacctgttcaaggtcaaatagtaggtaaggagatgggacttaaactcagctggctggctcctggatggagtctgtttagtgttttgtgtctgcagatgacctcatctgtatatgctcacctgttcagtaaagtaattattaccaagtacttattctcagctaaggagacctcagctcagacttgcctgagggtacttctacttggcagaggtagatgtaaagtcaggtttctgggtctcaggccaagactcttagaggaggtgtttgtgcgtggtacagggttttcagggcaatcaccacttacgggtttaataaacccactggggctgggagagggagggggcggagataatgatgatggtggtggtggaggaaatgatttcagttataaggacttctgtctgtgttgggatgagtagacaaaagctgcagtctgctccccttgcgactccaacttcctcctgcaggtctaccacgagcgggtcaacacacacgtggcggaggccgagttcgactatgcgcgctgtggcgtccgggatgtgtccaagacgctggtggggctggagggcgcgccggccacgcggctgcgcttcaccaagtgcttcagcttcgccagcgtggaggctgagaacgcgtacctgtgccagcgcgcgcgcttcttcgccgagaacgagggcttggatgactacatggaggcgcgagagggcatgcatctcaagaacgtggactttcgcgagttcatggtggctttccccgacccggctcggccgccctggtacgcctgctcgtcggccttctgggcggcagccctgctcacgctgtcctggccgctgcgcgtgctggccgagtaccgcacggcgtatgcgcactatcacgtggaaaagctctttggtctggagggaccgggctcggccagtagcgtgggcggcggcctgagtcccagcgacgagctgctgcccccgctcacacatcgtctgccgcgggtcaacacggtggacagcacggaactcgagtggcacatccgttctaatcagcagctggtacccagctactcggaggtgttgcttatggacctggtcgagctgggctcacgctgcggcgggccagggggtagctacgtgcccaggtgtcg

SEQ ID NO: 24860 - DNA, 1281 bp, Mus musculus
tcggggattgtcgcgcgtagggggatgagggacagtggcgcttcggagagggaagggggtgggggttgcctgtggcctgagctgcccgcgcgctgaagggaacagaggcgacctatgtggctggacaggcggggccgtccccgagaagggaggaggttctgcctggcctgcgccggaccccctgagagagagggagagagaggctctttgtccgtccctctgggctgcagcggagggggcggggaggccactgggcacttccctggtacagtcccctccggagggcagagaggcggaagagctgcaaacctaatcgttgcttcggctgtcccagcagatggtgggcagtagtggtactcgccacactcccttccttgggagcaggtggagagtcacccgaagcccctccgcagtcctggacacagctgtggctcttccgcttcttgttgaatgtagcgggctatgccagctttatggtacctggctacctcctggtgcagtacttaagacggaagaactacctggagacaggtaatgtggccagagggtggggagatgagggaagtctggttgcaggtgttggcagagcgggacttgggccgggagggaggccagtaagtcagacaccggatcgggctggctgctctgcagaggttgtggaccttgactgtgtcttcttcaggcaggggtctctgcttccccctggtgaaagcctgtgtgtttggcaatgagcccaaggctcctgatgaggttctcctggctccgcggacagagacagcggaatccaccccgtcttggcaggtcctgaagctggtcttctgtgcctcgggtctccaggtaagaatacaggctccccttctcttccccagctgggtacagacagcccctgacttaaaccaaattttccctgcccaccccaaaggtttgttagtttgggtctggtttgtgtccctacaggacacagcccagtcctgaaagtgaacttccagcgcttccttcaacacctgtattgaaatgaaagttcactgtacacacgcatgtgttcatgcgcacgtccacgcgcgcgcgcgcgcacccatgcaatggcttctacagtgtggaagaaggcctgcctgagttgtattttttttccctatgcccatattctgctctgtctgtatgttgtatctgagtgtgaatttgaggaattgctggctaaacatatctccagagctgcttcccacattattattttgagacaaggtctcactctgcagccctaattactccagaactcactat

SEQ ID NO: 24861 - DNA, 3629 bp, Mus musculus
tgaggcagcaggctacattgtggggaaaccttagacgttgtattctataaaagtacattttaaggggtggtgagtgccagcacttgggtgagttcttaaggcaagcaaaggggctacacaggaatcttagcttgcttgagaaaccaggaacgaaaaaagcgtagttcgttcttgtattttagtttcagtttttcatgtcttgatttgttctctgtaggtgagcccattggccggggtaccaaagtgatccttcacctcaaagaagaccagacagagtacttggaggagaggagggtcaaggaagtggtgaagaaacattcgcagttcataggctatcccatcaccctctatgtgagtatgggcttggcagtgttggagcaggctaatggcactgggccttgctggtgctacattctccacaattaattacatgtgtcattggtgatttagttggagaaggaacgggagaaggagatcagtgatgatgaggcagaggaagagaaaggtgagaaagaggaggaagataaggaggatgaggagaagcctaagattgaagatgtgggatccgatgaggaagatgacagcggcaaagacaagaaaaagaaaacaaagaagatcaaagagaagtacattgaccaggaggagctgaacaagacaaagcctatctggaccagaaacccggatgacatcacgcaggaggagtatggcgaattctataagagcctcaccaatgactgggaggaccacttggcagtcaaggtgagaagccttcctctgttgtgtaaggcagggtaggtaggcagaagctggaggtggtaaggaataactggctcgactggttggtagctgggacctgaaagccacagaaaagaaccatgtgacaacactggagctactcagagctaacagtggtttcacattctctttctggtgggaatcagggtgtcagccatatctgacactggattactcttctcaatcactcccactgtcatggccaccaccctgattacagccagggttctgcttggcgggataattcttgctaccagcatgctgggtttatttgtgattagggctgctttcctattcatagggttcagcagtacagcattcacagtgctgtcagatgtttgatattggggcttgaagcagtcctgtcctaaaatgtattattgggttcatttcagcacttctctgtagaaggtcagttggaattcagggcattgctcttcattccccggcgggctcccttcgacctttttgagaacaagaagaagaagaacaacatcaaattgtatgtccgccgtgtgttcatcatggacagctgtgacgagctgatacctgagtacctcaactttatccgcggtgtggttgactccgaggacctgcccctgaacatctcccgggagatgctgcagcagagcaagatcctgaaggtcatccgcaagaacatcgtcaagaagtgcctggagctcttctccgagctggctgaggacaaggagaactacaagaagttctatgaggccttctccaaaaatttaaaggtaagacggacaagtgttctccaaataactttgtatttagggtgttttttccagctcatataattggatttttcttttaaagcttggaattcatgaagattccactaaccgacgccgcctctctgagctccttcgctatcacacctctcagtctggagatgagatgacctccttgtcagagtatgtgtctcgcatgaaggagacccagaagtccatctactatatcactggtatgtcggagattgggtctgagtaaagctgtcttgtggacttgggaaagggggaagtggtggtgtggaggccatgtggtggccatgtggccattgttgtattaatcctgtaggtgagagcaaagagcaagtggccaactctgcctttgtggagcgagtgcggaagcggggcttcgaggtggtgtatatgactgagcctattgacgagtactgcgtgcagcagctcaaggagtttgatgggaagagcctggtctcagtgactaaggagggcctggagctaccagaggacgaggaagagaagaagaaaatggaggagagcaaggcaaagtttgagaatctctgcaagctcatgaaggagatcttggacaagaaggttgaaaaggtgagtctcccctagctccaaatattttagtctgctgtacagctagaaatgtcaggcagcacagaccaggcacacacagactaaacagtaattattccatctaatgtatgtatgcaaggaaagggccttcctgtgttgcccaggttatccttgaatccctgtactcaagcaaccttcagtctccagagcatgtaagggggttagtcctctgcctgccatcttagtaaggttcttcatacatagcagttccattatggccaaggtacatcttgtcattgttcttgattgtccacaggtgacaatctccaataggcttgtgtcttcaccctgctgcattgtgacaagcacctatggctggacagccaacatggaacggatcatgaaggcccaggcactgcgagacaactctacaatgggctacatgatggccaaaaaacacctggagatcaaccctgaccaccccatcgtggagaccctgcggcagaaggctgaggcagacaaaaacgacaaagctgtcaaggacctggtggtgctgctgtttgaaactgctctgctctcctctggtttctcacttgaggatccccaaacccactccaaccgcatctaccgcatgattaaactaggcctgggtgagtctggcttgtgagctcctggtagcaagttgttgtactagctggacctttgggcagacttagtgctttgtggcttacttaaatctgtgtctttctcttaggcatcgatgaagatgaggtcactgcagaggagcccagtgctgctgttcctgatgagatcccccctctggaaggcgatgaggatgcctcgcgcatggaagaggtggattaaagcctcctggaagaagccctgccctctgtatagtatccccgtggctcccccagcagccctgacccacctggctctctgctcatgtctacaagaatcttctatcctgtcctgtgccttaaggcaggaagatcccctcccacagaatagcagggttgggtgttatgtattgtggtttttttgtttgttttattttgttctaaaattaaaagtatgcaaaataaagaagatgcagttttatacagtcctgctctccttgtaacactcagggcttcctgagtggtgttggaaggtgatgaaaggcagttacttgtccatcaactattaatgccaaccaaaacacaggtccaaagtcactgctgcagtttaatcaaataagagcaaaaggtgacatttccaagtaccaaaacttgggtaggaacactggggccccaactgggctgggggcctttgtcccttctggcacagcaccattctcactggcccctaggggaactgcatgacctgtaaacaattctcttcccagctggtgcctggtagcctcaagggtgcgtgctatgagcaaagccctggtgctggtttgcttggccaccagcaagatttcagagattgggggaggagctctgggtc

SEQ ID NO: 24862 - DNA, 1228 bp, Mus musculus
cccagcctgaagctgtgctgtacccgggagggtggggatgggggaatcgggggcctccttaaagttggacaaggaatttatcatccttttctcttgatgtgcgatttgtagggaacattctagtaagatcgggtctggaaatggcagccgagttggccacctccattctctttcagtcccctgagttctggactcttggggggtgggggggtggaagcgcctaccttgagttttctgaggcagtccgtagggtattcgcccgcagatacatccctaattgcatatgcatgctccctgctcatcttgaggggggacatgtcctactcctgcagaaatgggggatgtgcaaaacgatattgaattggccttgactcaggaaccaggcccggggtcccgctcctccccgccccctccacgatctgctaccatgacgtcaaggtgggcgggcggcggcaggtgcgtggcccgcagccactcctttaaggcggagggatccaagggcggggcccgggctgtgcttcgccttatatagggcggtcgggggcgttcgggagctctcttgagtcacccccgcgcagcctaggcttgccgtgcgagtcggacttggtccgggcccaccaccctgctctgtactactactcggctttcccgtcaaggtaaggccggggtctctcgtccccggcggctctccgggggcttcttcccggggtcccagcctccatctcatctgtcccaaagcctccttccccggcggggcagcctgtggagataacgtgtctagaggttagaggttcgggctgtaccccggcgggcttgcacgcgaggctccccggggcgggtggattccccggagcgtggggtgggggtgcggcccggccaggtggtgggcggccgcacgtggtagtcgccgacccgggacgctgccatgtttgccctccacttccgggcgcggctgcagggtccgcgcggtggcgggctgctctgcgtgactcagcaaggcctggggaggttggcctggctgcctcccccggacgccgccggtaccaacgtgcttgattttggggaggggtgcacagcagggacgccggaacccaccgcgctttccctttccagatctttctgccctcccagtggagggcgggggaggagagacagagcaggcacgagaagattcctaggtccctccctttctcctcccctccccggagctcagattgttctggaagcc

SEQ ID NO: 24863 - DNA, 1463 bp, Mus musculus
tggctgccggttttggtcgcctcgaggattgtgtttattcccctgctgatgctctgcaacgtgaaggctcgccactgcggcgcgcagcggcaccacttcgtctttaagcatgacgcctggttcatcgccttcatggctgcctttgccttctccaatggctacctcgccagcctctgcatgtgcttcgggcccaagtgagtcgggccatgaggggatttggtgacatcaggcaggacttacagggagatggcagtaggagagtccctccccatctcatagctgcacggagttggagttgctggggggttttaaggggcagtggaggtaagggcttgctaatgtgctcctgctgagctgtgtgggaagggattaagacagggtggaggatggtccctagacacagtctcccaagaagtgggctgggattgggagtgttggaaggtttgggggtggggggacagggctgggctcagcttgcctaagattaccctgcctttccttttaggaaagtcaaaccagctgaggcggagacagcaggaaacatcatgtccttctttctgtgtctgggcctggctctgggagctgtgttgtccttcttgttaagggcacttgtgtgaccctgtggggacagaagaactacactgcctgcttcctgctcacttccttccctgccagggacgagcaggggtcgagaggggctgttcttctagctgacttctgctttcctctggactgtgcttcgcccagctgtccaggagccagcgatggcctgcgggtggacttggaattcagggtcagaatggcaagggctcaatggcctctgactgacagctccgactgatgcccgcttactccaagcacaagagactccagggccaagagagatctgtccgcctgcctatcacaggatagggcggaggcggatggctgattggtgtcgtgtgacctgatgtccctccccttgcccttcttccttctgtgcctgttccatgtccccagcccttgtcattttactgccttttttatactgacagaaaccaggtgccttcagaggccatctgattaaataaacattttttttctccatagctctgtgcatccttccaaggtttaactaactccttggagaggagagaaggctggcagcctgagtctaggtttctgcaatgacccaagcctgggcctgggtataagggggaggatgcagtccttcagtctcagaggggctgcagcgccccctactggggacacagggaagagacaggcctggagccaagacgccacccagactgtggcccagatttagaaagatgtagcccgagtggtcttcacattccataagtacctgaaggtggccttgaaccgcttcctatgtgctggtactgcagctgtgtaccaccatgtcctggatctagggatcaagtccagggctttgtgcatgctaggcaagcgctctgctagcc

SEQ ID NO: 24864 - DNA, 1102 bp, Mus musculus
aggctggccttgaactcagagatcagcctgcctctgcctcctgagttctgggattaaaaaggggtatggtaccagtgtctggctctttggtcttttgtacacagagccatgacaacctagggccctgtatgaatctctcttctcttctctctctccagatctgtgtcccggctctgtctgtctgcttcatcttcacggttaccattgggttgttccctgctgtgactgctgaggtggaatccagcatcgcaggcacaagtccctggagtatgtgtgtcccttgccccctcccagcccccccccccagcccccgcacttccctcctaggacggattcacccagagtctaaagtggaatcatgggtggggtatgggcaacctctggggctccctctgcccagctggatctacacgggcctactagacaccctgccattggatggaaacctctgaggcagaatgaagagtcctaggcccagagagggccagttgctaagtcttaagtctctttcctagaaagctacttcattcccgtggcctgtttcttgaatttcaatgtctttgactggctaggccggagcctcactgctgtctgcatgtgggtgagtacagcatgggcggcagggctgtggggttcaggtgtccagctgaggccaagagggaacccaagaaagtatggtggctgcagtgtggctctgtgactgatagagggcttgctagcatgcatggcccctgggtcccatctgtaaaactgcaagaagggaaaatggagggggtggggcagtggctcaacaggttaagagcactgactgctcttccagagatcctgagttcaattcccagcagccacaacggtggctcacaaccatctgtaatgggatctgatgccctcttctggtgcatctgaagacagctaccagtgtactcatcaaaaacaaaaaacctgcaagaagggaaaaataccgtgtactactcataacttatgtgtaactctgtgtacaagttcattcgtttgtttatctgtctgtagaggcagggtctctgtgtgttgctatctgggaatttactctgtagaccaggctggcctggaactcagatctctt

SEQ ID NO: 24865 - DNA, 1222 bp, Mus musculus
cccaggcttcctttggatgaaggctctctccacccctgcaccttataccccattcgggtcctcttgccaagcctgagccaaccccctcttctccattaaccctccttccgtcctgttcctcttgtcctgcttgtgtgacctttgcatacaataatatatgcgtggtggaatggttgtgagttgtcatgactctgaaactaatgttatgtgaaagaatggcctgaatctcccacttgttttaaccctttaattggagcactgttgccttcctggaagcctacacgaatagctgaggagccttgttaattttgccttccccacttgagaaggaatctagaatgatcggtacattgagtattgatgctgtcacccccattcaccagctctgcgggctttctcaagtgatggagcctctttaaacctcaatcgccctaactgtttagtagaaacggggcagctggaagaggggcatcctcagatttcaagagaagattccgatgtagcagaaactaggctgagaaactgagctatgtgagaggacccttaggacgcaggaaggcctcagatgggcgatagctttcagggcctctccatctcggcaggtcaaggcatggctgaaatgataccagaggccctgaactgctatcagatctctactgggacaaaagtaaagaaagcccctaagcagcaaatggaatgtttggatgtgggtggaacccgagaggtgggaatttctgcaaggggagaagtgatgtgtgtgtgtgtgtgtgtgtgtgtgtgtgtgtgtgtgtgtgtgtatatgtatgtgtatacttgtccaagcctaagccagttttatgatggaagagttagcctccctctggcttgtggctgtattcacttttgctggtgcatgggagaggtgtggggtgctcggtggagaattagctatgttttgatggggtcccttccctactatctaatagaaacctgagtcctcaggctccccgcagccgcagcagaaccctcttgtcctagataaatagcagtgctactgtttgctgctgctctgtccccagtgcctaggaggatgcctggcggacccacagagaccctcagcaaatagtccttaaccaacagcaggagccttctgcctccttctggaggtgtgtggctttgctgtccagtactgagggatttggcccgtctgggtttcacccacagcagaatagaaaagcggcta

SEQ ID NO: 24866 - DNA, 1187 bp, Mus musculus
gaattgaactctgcacctctggaagagcagccagtgctcttaaccactgagccatctctcgggccccttcatttttaataagttcactagctaccctgttcttggcttccccgttgtgcccaccttgtgaggttagaacaaggacagagtgactcatacgcagaaaaagcttcgaggagcatgggctgatcctggctgctgctgtgggtgcctcccggctctgagcagaaccccaccccgccctgccgtctgcaggtggaggccattgagtactacacaaagctggagcagaggctgaaggaagactacaggcgggagaaggagaaagtgaacgagaaacctctgggcatggcctttgtcaccttccacaatgagaccatcacagccatgtgagcaccccgccccacccccatcctgcccgccaccctcggccctctccctctcacagggccctgtactcaccactgtggaccccagtctgggctgaagtaacaagtacctgttccccccagcatcctaaaggacttcaacgtgtgcaaatgccagggctgtacctgccgcggggagccgagagcctcctcctgcagcgaagcactgcatatctccaactggaccgtgacctacgcccctgaccctcagaacatctattggtgagccacagagttggggcggggcttcttacagactgagggtgtggctgtttccaggagcgtggggagagggtggatgctgccagaggccagtcagtccagagtcttcaaagtgacccctcccccactttcccagggaacacctctccatccgaggcttcatctggtggctgcgctgcctggtcatcaatgtggtcctcttcattctgctcttcttcctcaccaccccggccatcatcatcaccaccatggacaagttcaacgtcaccaagcctgtggagtacctcaacgtgaggcccatgcccgcctcccccccccccccccagctctccatgatgtgccatgcgcatccccctcatccctaacatagctctgggtgctccaggtgcttccaggatgctttctaaggtcaagggctgctatcccaacccgccatgtcctgtcctcaggaaaggccgcccttgggtttacatgtcctagacacacacacacacacagacacacacacaccaggagggtgcaaaaccttgggtaagc

SEQ ID NO: 24867 - DNA, 1215 bp, Mus musculus
tcctggacacagacccagtttttacctccctctgagctctcaggaacgcttctggagtgacagacatgattcagaacggtgacaggcaggcaggcaggtatgctcctgctgggaactggggagcaggcttggcttcagactgatttgagaactgaagtcagcagttcggcatctcaaggccttgtggccctggctccgcctctgccttgccctaccaaccacctggccaggcacaggcacgggcagccaaaacagagcttggttgctagggcactggcagggatgccttgcccgataatcccggcctctctgggaacccagtctccccctggccatgtctgtcaaggccatctagcttggcctagatgccagctgcttcctctgtcgtttgtccccttcctgtagcccctctaaagccaggaatgtcggctcctttcccactctgcttctgtggcctccctgagagatcagcaatcgggacagaactgtaagggtcaggctgcccgggtccagctctggacctgctgtgtgactttgggcagttttgcttaacttctatgagctccgattaacttactatggacatcaaaataggctgctgtgagagttagactggagaggagttagaacatgggaagattttttaacagcgatgcatttgagttccatgtgcatttggttaacaacattcagatgtcttctcagccgttcctttaaactgatgagcacagagccgattctctgggggggggggggttggggggagggagggaactagtagggcagttacaaccaccatgatccccagccctgctcctctaaaacccagagcgggctgtcaggtcttgctccaacccttccttcaaaccatccctgggctaagcaggagttggaagaagcccctctcctcattctaggatcccgtagaatgtgtggtctctgagaaagagcctgaagctgccggctccagccttgaagctcactgaaaaagctcgttggtatctgggcgctgaggctcaattctctccctgatacaccgaatgactgtgttgtttctcttagtctttatcattccgttatccttagtagggtccagaaggttccttgcaaacacatcagtgtcgattaagcaattaagcagcagaaacagacttccttatgctgttctgacaaccccccacccacacacacacgatgttcctgcccatagcttac

SEQ ID NO: 24868 - DNA, 1185 bp, Mus musculus
ggacccgtgggctcccaggcctggggaggctgcttgccttcactgccaggctcccgtggccctaaccccctgcctctctttgccatttcccatagatgtgacaagccaaggcggtgagccaggctgcaggaaggagcctccctcagggtttcgggaaccagacctctcaccggaaagaccgattaaccatgtcaccaccacgccatcatcgtcaccgttgacagaacagtccttaatccagaaagcctgacatgaaggaagaggagactcttcgaggagcactttgggtccggagggcgagactccggcagacgcattcccgggcaggtgaccaagcacggtccctcgtgggactggattcgccattttcttatatctgctgctaaatcgccaagcccggaagattagggttgtttctgggattcctgtagacacacccacccacatacacacatatatatatattatatatataaataaatatatatgttttatatataaaatatatatatattcttttttttaaattaactctgctaatgttattggtgtcttcactggatatgtttgactgctgtggacttgtgttgggaggaggatgtcctcactcggatgccgacacgggagacaatgggatgaaaggcttcagtgtggtctgagagaggccgaagtccttttgcctgccggggagcaagcaaggccagggcacgggggcacattggctcacttccagaaacacgacaaacccattcctggccctgagtcaagaggacagagagacagatgatgacagagaaagagataaagatgccggttccaaccagaagtttggggagcctcaggacatggcatgctttgtggatccccatgatagtctacaaaagcaccccgcccctctgggcactgcctggaagaatcgggagcctggccagccttcagctcgctcctccacttctgaggggcctaggaggcctcccacaggtgtcccggcaagagaagacacggtggtggaagaagaggcctggtaatggcccctcctcctgggaccccttcgtcctctccttaccccacctcctgggtacagcccaggaggaccttgtgtgatcagaccattgaaaccactaattctgtccccaggagacttggctgtgtgtgtgagtggcttacccttcctcatcttccctt

SEQ ID NO: 24869 - DNA, 1203 bp, Mus musculus
tttctgtttttatattttccagaaaatcagttcgaggaaagggaaagggtcaaaaacgaaagcgcaagaaatcccggtttaaatcctggagcgtgtacgttggtgccgctgctgtctaattccttggagccttcctggtctccagacaatcgcctgcagctcctctaaccctgcccaccccacccctgccccacccctacctcccctctggctcttgccctgcctcagtctctctctctctcactcaccccactaatggcaccaatgggtagacttggtggtggcattgttggcccagggttgggttggggtgggtggaaggtgagtagatacggaacactcaactcagggaggggactctggcttggctgggcaccgactttctctcacccactgggcattggtggcggggccgttgttggcatgggcactgggcatcagggccctctcatccaactggtttccactgctctagactcttgcacatgtctggagggtaggggtggtgtggagggcaacgtggaatgagttgaggggtctgttggtgggaagtggactgtggtgggctgaagttggagcttgagcgggctgtgcggtagcccgtcctcgtctgttggaaatgctttgacccctgggtttgaggctccaggatgggaaagccctccctatccagcccaacagaaatcacccacagaggtctcctacggtggcctcttcctctgcttataggctgttgtgggctctggaggcctggctggtggacagtgccactggacttggattaccttctgctggccctctcccttggtggagggtctgggcagaggcccttttccagggagaaggtaccctggtggtctcctgggtcacttatcactgtccccagcaggtgaagagtcaaggtgtgttgtgggcacagcagttgtgggggccctgtggccccagataggcccatgtcttcgtggggcacagcactgtccctcatggaagcttaccctccccctgcactctgcctgcctgtgccctcctcttcctgcaggcacatgtcctgccagcgctgcgtctctttgccactctctctgtcttctgctagagtgctcggatctttccagaatgtggaaagggcctaggggccgacgagctgggtggggaagccgtggtggacacattagggggtgttgcatgggactctctctctctctc

SEQ ID NO: 24870 - DNA, 1214 bp, Mus musculus
ggattcttctctgccttcctcctgcagtgtggatgtacactgacaactcttaaaggtcaaggggatgggcctgggctgccagactccacctcagccctgagtacacacacttgtagccgcaagagcccagcccatctgtttacaaaacagcagtcccctcccccaaaaatgctttgccttttgagaaaggaaaactggtgagggaggcagcacagccccagggggcagtgtccggctcttcctgccccagcaggcaacctcttgtgttcccactacagctatctgactcgctgggctcccaagtccgtcaagcccatctataaaaaaggccaccgttggaacaaggtgggtatggccgtggggtcaccactcctgaaagacaatgtctgctactccagaaggcctctgaagatgatgcattagtgggagcaggacttctgaagagctgactagaaccgtctagaagatgcacttgctcctcccaccagaaccattatcctccacaacagcacagagaactaacttctgtgccttggatctgcccagctgcaatgttggaagccaagggcagccaggagctggatctcctggccactgtggtcttctgcctggctggggctgaggttggagcagggacgggagccttacccaaggcaatgtaataaagcaggctcttggcttccccgtgtggtcagtgcttagaaatgtggggcctgtgcatagtagggaactgcctaatgggccctgtcagtggacctggggcaggtccatgtgccacacaggtcccatcgtctgctgacgggcaccacactgcagtgagggcctagtgactgtcagttactagcagctttcagttgaatccaggaatttgagcgggcccctaactgccccttcacaccatctccacccatctacacttgatgcctcctccttcattagctcatcccaggcctctgcttcttggttcagaattgttttctggcctttcatagccaggtgactagattgccagagggacaaaatgacaacaatcaagacagaacaaaaaggcccaacagttgaactttatgaaagagtgtttcgaccccacataaatatccagcctgccttcctacagcatgaagggcaagtccatgttcttctctcctgtgcctacgtagatgtagccatagttcttggtgcgaggagcgtggtagaaggtgaggcctggccag

SEQ ID NO: 24871 - DNA, 1155 bp, Mus musculus
aatttggagggctggagagatgtctctgctgataaaagagcatttactgctcttgtagaggcccaggttcatctagttccaagcacctacattgtagctcactaccatttgtaactccagccccaaggaatccagagccctcttttggtccctgaggaactaagaactgtgcgctgtgtggtgtacagacatacatagatgcaagcacacattccccccattttctttttttttaatcatgacggtaggggcttggagggatggcttagtggttaataaagcttactgctttttcagacaaccagagttagtgcccaacaccaggctgacttgctcacagccgcttgtaacaagctccaggggacccatggtctcttttggcctctgaggtcacctgtactcatatacataccccacacagacatgcacatacacttagctgaaaagaaagtaaatctctgtctaaacaaagatcatgatagaacttttcttcctcccctcccttcagagcgctgtcagatattgactccttcattgcctatgtgggtgctgatctgaaaagctgtgacccagctgtggaggatccatgtggcttgaaccgtgcacgagtaagactctcctgggaatgggaagtttcactggccacgggcaggagttagggtgtttcattgatcaagtttctcagatttgttttgtctgtactgctgagagacccaagagtctctcctgccctaagcttctcctttcttttcttctttagtcttgaattcttgagttagttctcacaacagagcagatggtcttttctatgaagtcattattttggctttaaggatccctaagtagctcggaagactggaggtgtaatgaggaagtaggtcagacttggtggcagggtgagtcccccctgctattgctcgctggcatgtgaagtcctaggtgatggccaaatcttgagaccctgaggccttccagtgcaccggtgctcagataagccactacggtgaaagacacatgaccagcctggcatgaggggttgggggttaggatgcaggctgtggagtcctggatggagggtcaggtaaaaaaaaaaatggcagtttaaatacttggtggtggagctcatccaaaccacccctaccccagggtcattaa

SEQ ID NO: 24872 - DNA, 1234 bp, Mus musculus
tgtgggattaggtcctgactcttttgagagggaggctcatctttctaaggacagttggcctccctgtgtgaggtgtgctctctccataggcataacagtgttgtagtatcctgttttagttttcaagacagggcctctctgtaaccttgactatcgtggaactcactctgtagaccaggctggcctcaaactcaagatcggcctgcctctgcctccccagtgctgggattaaaggtgtgcgcagttttttattgttggtttgctggagactgacatgggccttgtgcatccgaggccacagtgtaccactgaggtacatcccagccctctcttatttccttacagcttatacctacttttaaggttattttgtctaaatttttagtaggaaggaaacggcttgttgggagcgggacagttggtttctgtagtagtgtttctccagatggtgtccatgtgcactagtagaatttctcaccaatgactgaactcatgtaggccaagcatccgatggctcagcaagccagaggagagcaggatgtctgtcacctcagtttgtgcagccttcactgtgagacctgtggcatcagcagctacctgagcccttgctcaaaaagcagaattagggacgcactgcagactgtaaatgttaacaagctacctgggagtttcatgtacacatggaagagtcagcagcgtcaccctaggtcacaggaactgacctgctcacatgagaggtgctcaggctaggcttgttgatacttttaaactatagaagtgaaacatttaaaaaacgtgcagtccttggtctctgacttctattgctcaacatcatggtgtgggagccatgagttatgtgtagctgggtctgtttcttcttcccgtctatgtggtgtcctgctatgtggctgtgctgtttcttattgatcctggtgggcttttggacagaattttgataacacgcatacagtaaatttaataataagctactctcaggatcttgaaagtgtacttgtaagatatttgcatattcttgttggttatacacgggagggtagaaatcctgagttgtaggcatgctcattacagccacatccgaaagttttcctggctagggcagctttcagatgtggctgtaatgagcatgctcccagcaacggcatacaggaatgatggaaagtttttggttctttctttttgttgcttttgaagcagtgtaccgccagcccttggc

SEQ ID NO: 24873 - DNA, 1202 bp, Mus musculus
tccaccgagtcagcctggagcagctcagatctgggtcaagctggagtagagtgggtcctgcgcgaggacccaggtcatcctactagagtgcagggtgttgggacctacgccattccagagaggtggcgggagctggtagccagccggcagtctgggcttttccaggaaaagctagagcacaagggcctctctccagagcagctgcagcagtgcagacagacagacagaaggactggggtgctgtgcccaacccactgaccgtgtgtgcaaggtctcagccgctttcttttggactacaagggtcccacttgagccccttgctgctgggctaacagggatccttttccactcccaggggcatgtctggcctaggtgctacatgctgacccgtatatggccagttttctcagtctaaagcaagaatctggccacttgggaacccatggtacagagctattgctaaagtctgagcgcactgtccagggaacaagagctaaacagaattcagtctaacactctgttccttaaagtggacatcttgcctttctctgattgaccctcgagggtttccccagtgtctgatgacaccaaccatacagaagtaatccagaccaggtaggcttctgacaagttagccaagcagccactgtccctcctgggacagctgagtccaggtgccttggaaatctcagtggtctcttaagcttctgaagactctcttctcaagggtcatttctaaaagtgttccagtcagagccaacacttttaagtccttaaggtccctgggaagggcacaaagcaaacagagcaagatgggcgagacctagtcctgcctatttctctggatgttggcacgcccactgtccacccagccccaactttgacctagtgtgggacacagtcatgcatagtaaagttgcaaagtcagagctgggaaatagcaactagaatcgaggtcactgtccaccctacagctgcacaaggccgtcctcctcctgcctggtgcttggggtctgcaggttgtaaaggtgagctcagtgttgccctccacactcgatagctgcctgctcctgtctgcttagggctgtggaggatgtagttgtatttattatgttgtaatatttttaacatcctatgacttcatgctagaaattttctattgtttatagaaccttttgtagaaatgctaactaaagtacatc

SEQ ID NO: 24874 - DNA, 1427 bp, Mus musculus
gtctacaccaggcatatgacatgggtccccttgggaaatcaggctgatgtcttcccagagggcacaatccgtccagtgcacgacgacatcctcatcgctcagcttcggcctggccaggaaattgacttgatgatgcattgcgtcaagggcattggtgaggacctagtgagcccgccctggggggtgggccagtctgattgcagcaatgcagtcgaaccaggagctcaactgggatgttagcagcaggcagaaagccaacatgcttgtgttgtcccaggcaaagaccatgccaagttctcaccagtggccacagccagctacagactgctaccggccatcactctgcttgagcctgtggaaggagaagcggctgaggagctgagccagtgtttctcccctggcgtgattgaggtggaggaagtacaaggtgtgtttggtgcgcagtgggactaagactaaggtgttttctttgaaggtagaagaaaaggaaagctctcctaacaggcaagctaccatactgtcttccttaggtaaaaaggtggccagggtggccaatgctcggctggataccttcagcagggaaatcttccggcatgagaaactcaagaaggctgtgcggcttgcccgggttcgggaccattatatctgtgagtactccttggataggatttagaactagcctgtattagaggtaaaatcctgctgggactgaatgttttctttggcctctagtttctgtggagtctactggagttttgccaccagatgtgttggtgagtgaagccatcaagatcctgatggggaagtgccggcggttcttggatgaactggatgcagttgagatggactgaagcttacacacatacctgggagggcgtggctgctcttggatcttttgcactgctgtgctgttactagaggtccctttccagtctcatttccagtcaatacattttattaaatgtgccacagacacctttgcctttgtaaggccgttgttgtaaataaattgctcttggcaagttcttttcaggctttttttttttttgtctagtaatgagccttgcctcagcaggttggcattggcaaggaccaaggttcgctgcagctgctgagaaaggccagatacagagagtgcactgccctccctccacctagctctcaggcttccaaccagggctgccattagtcagccatgttgccactgtcagctccagagaagacagctagtgtcttctggacagatgctaagtgtgcagggctttgttggctcatcatcagggctttctgattagtacccctaacagggtgcttggaagagtcactggtttgaaaaaggaaaatagggcccttctgtatgaaacagatttttactgacatgcagatgtactttagttagcatttctacaaaaggttctataaacaat

SEQ ID NO: 24875 - DNA, 1099 bp, Mus musculus
gtgcagggtaggagccaggcaggagtcatgcaggagcttccctccttctagaatttccgtgtggacgtggtgcaaatggatgaagacacgctggagttcgacatggtggggattgatgctgccatcgccaatgctttccggagaatcctgttagctgaggtattagaggacgtgggctggagggtagaaattgtatcaatttgtagacgcttttctcaaagccatccctctggggcaggtagggtggttcacacctatgacagtctgggctacatagtaaacattgtatcaagaatctgagccacacgcctttagtcccagcaccccagcactcgggaggcagaggcaggtggatctctgagttccaggccagccagggctatacagagaaaccctgtctcaaaaaaccaaaaaaaaaaaaaagaatctgaagggcaaaatgaaaaagtgctgcctcttccttttccaggcagggggatgggtggaggtcagttgtctgctttgcctccttgggcaggtgccgacaatggccgtggagaaggtcttggtgtataacaacacgtccatagtccaggatgagatccttgctcaccgcctggggctcatccccatcctcgctgatcctcgtctctttgaatatcggaaccaaggtgaggctgagagcttgggattatgagttaggcagaactgacctggaatgcatgggctcaggtcccaggcctactgctggggctttagttggcatcttgtacatctgccttcgcctgggagaacagctgtccccaccccacctctagtctcactgtgtacaccctcggaacacagcgctagcagcactcaggctctctccacctttacattcttcctggggattgaacttgggtcttcaggttggagcaagcatgcaccctcactctgtgagccttcttgtcagcctggtattagagttgatatggccaggcacggtggtggacagctttactccaagcactggcagaggcaggcagatgtgtcctgagttcaaggccagcctggtctgcagagcaaattgcaggacagccagggctggtaaaacccccgctcaaacccagcccacccc

SEQ ID NO: 24876 - DNA, 1165 bp, Mus musculus
cccttcggcgtcccggcggatccccaccttgcccgggcggtcgcccctctgaacctctccctccctcggacccgggtcgcacgctcttcccacgcgcgcgtgctccagcgacgggaagcctcgagggacatggcgactccggcggcgccggccagcggcgtccgaaatggtgctggcccggaatggggaggcttcgaagaaaacatccaggtatggagcgcgcctgctgccagcagccccgggctggcggcgtccggacggtggctgctgttctctctcgcggggcctagaggtcggctccgctgaaacgcagcctgtcccctttgagtcttcccggggaagggtgtagctcttgtgctggcgtgaaagggacaaactagggctcccgcgggcctcggctctctgtgggggctggaggctaggatccactggcaccccctaaaaataggcttgtttgagaattgggaatggcagatgggctcttttgcaactctttggagctttgaggtggaaagtaggaaaacaacgtggattgaaaataaatagtagggtttccaggaccacaaaagtgacgcgaccaagagttgccaccactgaaagagtggcagttccaagccatgtcctcggcagtggaagatcaaagcctcaagttgtcagctgagcggagaacggggaggatgcaatggaagggcccctcactctccgagccgttgtcttcacagggtgggggttcggctgtgattgatatggagaacatggacgatacctcaggctccagcttcgaggacatgggtgagctgcaccagcgcctgcgggaggaagaagtagatgctgatgcagctgctgcagaagaagaggatggggagtttcttggcatgaaaggctttaaaggacaactgagccggcaggtagcagatcaggtaagccaatggggaaaaaaaaaaggacctatgcatgtcctaaattgatcgaggttttccacttagacccacacgtaaatctcgccgagactgaataacaatctagagccaagagtctcatcatacccatttcccttcagatgtggcaggcagggaagagacaggcttccagggccttcagcttgtatgccaacattgacatcctcagaccctactttgatgtggagcctgcccaggtccgaagc

SEQ ID NO: 24877 - DNA, 1099 bp, Mus musculus
aggtgaggttgcgtaggtgcttataagctgagtgtacagggttgactaggaaatggtgcccagccagcgcttttgctgtgggtcaggctatccttagtgaggccccttcatgtctctctcccttctcttctcttagctaccctgtgagctccaggacatggttcgaaaacatctgcgcagtgggcaggaggttgccagccccagccccagcccttcttccagcctgtccccaggggctgtggtgcctacctcagtcattgcccgggtgttggagaaacctgagtctctcttgctcaattcagctcagtctggcagtgctgggcgccccttggctgaggatgtattcgtgcatgtggacatgagtgggggtgacccagccagcccccctgccccgggcagccccaatggggagtgttgctcagtgagtactgcagggggctccccggaggaggagctgcccctgccagccttcgacaagttgagtccctaccctaccccgtctccaccacacccattataccctggtaggaaggtgatagaattctctgaggacaagatccgaattcctcggaacagccccctccccaactgtacctatgccacccggcaggccatctccttgagcctggtggaggacggcagtgagcgggcccaccgcagctcagtgcctagcagtcctgcctctgcccaagggtcgccccatcaccagcctagtccagctccctcagcactgagtgccccagctagttcggccagctcggaggaggacctgctggccagctggcagcgtgcatttgtggaccgcaccccgccccctgctgccgtggtccagcgcacggcctttggacgagactcactgcccgagctacaattgcatttctccccgggccactccacagccccaccgccttccccgcaccgtgagcggggacttgtgctgccagcagaacctgactctggctttcctcaagacgaggaagaggaaatgctgaacctgcctgtcagccccgaggaagagcgtcagagcctgctgcctgataaagagggcaccgaggaggcctctggcccttctcatgttgatggcagggcctggcctctc

SEQ ID NO: 24878 - DNA, 1158 bp, Mus musculus
catgaactgagggcccacccttacaaagagtccttgcccagctgctggctccagaaaacagtgaccagcctgtgccagcgtctgcatgccctttctgtcaggcatgtgaggcctcctggaggacagcagtgctgtcctggattcccaagagattaataatggagaaggctgattgtgaggggaaacaggagctgtagggcttagtgcctgctggcctgggtggtaaccggagacagtcgggagctatcgcctttgattctgacccagtgcgtttctatactggggaggggccatctggactattgtgcgtcatacactcggtcccgtctccatcttaggctgttctcgaggccagagggcctgtatattgcgtctccttacctagactgagcctaaagggacccacttgcctgtctgctcctttctcactcttgtctgctgccctagggttagctgtttttgatggttccatcccccacctccccaccctccaaccccccagacttttgcagcaggagaatgaagaacttcgcaaacgcctggcctcagctaccagacgcactgaggccttggagcgggagctggaaataggacaagactgcctagaactggagttaggacagagccgtgaggagctggacaagtttaaggacaaattccgcaggtgcggaacaaggggccaatcgtctcccatccgtgggagcaccttcctgtccatacgttagctgaagagcctcaggtccccctgactttatttagtaacccagatcttggaaggagagggaagttcctagactcccatgtggaggagggttggtggggcctgaggaacaggccttaaccagggctctgcctttctctgccttgttggcatgtgtaggctacagaacagctacacggcatcccagcggaccaaccaggaactggaggacaagctgcacgcactggtactgtgctgggagggtggtgtggccacaacatagcgcgggctaggacttccgggggggatgccactcaccctggggcctggggaggagagggaaggcagggcagtggtggggagggcgcggtgtgctgcgccaggcgggacagccctaatgctcacactgtctctcttctctctccgtctccctccctcatgctgccaccgctgctgct

SEQ ID NO: 24879 - DNA, 1205 bp, Mus musculus
gtgcctggtcatcctcactctgtggggtcctcagagggctctgtaggtcatctgtctggcagtgtgtcaccttttccttgagtggccccactttggggcttcgtcacacactgctccattgtacttgtgtattctgatgcagctctcctccaggctctgactccagctcatctcttatagttcttcgcccagagcctgtggggttggggggtggagtgcactctgttggcataggcctggatgagtggcaactgcatctgggggcagggggttgttcttataagccagtgctcagagtcctggtgcagcctggcagtgcagttgggaattagggagacagggagctgctttccacacaatagctgccttctcttgatcaaccagagagccttgtgtgaattagtaagctggactcactgttggcaaggtggggtgttggtcttcctccggagtgctttctggtggcgggaagcccctgagatgctttcgcccacaaaagagtactgtatgtgccagaggcatccttcagtttggtcttctgtgctctctctttgcagctccggagttgagctgctcacacaccaagctgtctgtttttatggagtgcctggagggcgtctgccatgagtctgttgctaacaccactaaccaggaaagctggctggctgaggagaagacactaaccctgtgagtctgaccttggctagctaacctgccctggggggctgcccgcagtgtctctaccagactgactgcctcctttgcttaggcttgccacctctgctttctgggtcttttcctttcatctttccctcatgtggagatatagatacctccatggtctttgttccttttctgttgctgcgtaaatcaccatgaccaaggcaactcggggaagaaagcatttggttgaggctctagtctcagggttggagtctatgactgtggagtgaaagaacagctgagagctcagatcttgatccccaacctcgaggggagggagacggggagtgacaaagaggtaaacagacaaacacacagcaacagcctctaggaatggtgagattcacttgaaaccacaaagcccacccggtagttgtcaaggccacaccacctcatacttcccaaatagtcccaccaactgggaaccaagtattcaaatgcatgccagtctcattcaaacagccacactcttgatgggcaga

SEQ ID NO: 24880 - DNA, 1192 bp, Mus musculus
tcctaccaccaaacgttcactcgaggcggaggccttcagtcagagccgctagtctagctgcagtgtgcccaggggctcaaggactgaggagattcagcttcagattcctttctagaagtttgggaaccctttttcttttccccctgaagagaatttgtgtgtatggttccttgggaattgtaatcagttagaattgtgtgatagccaggcacggtagcacacacctataattctagcatgcaggaggctgaggaaagaggattggtagtttgaggccagccttgtctacatagaccctgtttctgaggaaagaagagaaagagagagaaaaaagggggaaaagagcagtacgttgaatgttgagcagctaagagaattgagctggtatacactagtgactttagtattcgaccatggaggcagaaggatcaggagttcgaaactgtccttaagttacataacgtatttgaggctagcctaggctacttggaacctgtttcaaaaacaaaagaacaaaaactgatacacagagctagcttgctagttggatcccaactgtggctgtttgacttacctatctatctttctttctttttttttggtttttagagacagggtttctctgtatagccttggctgtcctggaactcacgctgtagaccaggctggccttgaactcagaaatccgccagcctctgcctcccgagtgctgggattaaaggcgtgcgccaccactgcccgacttgtttgacctttcttaattgcatagttctatgcacctcagtttctcattgctcagtggaggtagtaagagtacctatctcatatgtgttgtaaaggttcatgaatgtgcttcaactctccctgacgcctgataaaatactgttatgctcgtcggatccctgcgattggccctgtgattgatggaggatttgtaccggtgggctgctagcctgatgctacaaagatgcagtgccaccttttaagctgcgtaaggcgatgtcaggatgctgaggctggaagtttttgtctttgctggggagcaggaatactgaggacgttctcttctggaagcactctgcgtgcaatagctacttttttgagtagcagatatatgaagaagatctgctgtttaccgtcctatttcacagataaagaaatgaagtacagtggttgagtcatttattcaagg

SEQ ID NO: 24881 - DNA, 1180 bp, Mus musculus
ggagctgaaccagaggtgccagtttgcttcctatgccacgatgcagtggttggacattcgactgcagctcatgggggcagcagtggtcagcgccattgcgggcattgccctggtgcagcaccagcagggccttgccaacccaggtgccatccccggacccatcacccttacttcaggagcatgacattttgtatcgttgttccagaccccttgcatgtctcctaaccccctccccacccaccccaccccaccgttacctccaccagtgatccctgagaggatgtgtcatcagcaccatcatcaccctcattttaatgctaaggaagccacaggcagtggaggacctgggatgtgatcctcccctcactcctgcccacagccccgttacacagccactgtcccgccttagtgtctccctgccacccctcacggcctccctctccgggcatcccgggtcccgtcgtaggtctgctcctccgcccttgaacacccacagtccaaagccgggatcctccccaacacacttctcagtacccagggtctcctagcagccggtgctcctctccacagggctggtgggcctcgtgctttcttatgccctgtctctgacgggcctgctctcgggtctggtgagcagtttcacacagacggaagccatgatggtgagcgtcgagcgactggaggagtattcctgtgacgttccccaggagccccacagccagccactgcaggtgtgtctgttctcccccctgggccagggctgccagccatggggtgtgctccagtcctcccaggcctttccctttggctcctgaccttctttttcacatccctgagcctcttcatttgactgctgctattcttaactgtgcctctcgccaccaccatgtcctttcccatcatcccaccgccatggctcccccacttcctctgctgttgccctcacgctggccactcctcactcgtctccttctgtcagtccagccctgttgttctcgccatcgtttctccttcctttcccacagtcaccccaccagcagcgcatcagctggctgacccagggaagtgtggaattccaggacgtggtgctggtgtaccggccagggctgccaaatgccctagatggggtgaccttccgtgtggagcctggagagaagctgggcatcgtgggccgcacagg

SEQ ID NO: 24882 - DNA, 1149 bp, Mus musculus
cacacatgtgaacatatgcacacaaacatacacacatgtaaaaagtttggtgggtttttttgttgttgttgtttttttggggttttgtttttgttttttggtttgttgagacaggatttctttgtgtaacagccctggctatcttagaactctcttgtagagcaggctgacctcaaactcagagactacttgcttctgtttctcaaatgctgggattcaatgtgtgtgctacaacacccagctgcaaaaacagatttttttaaattaggaaaataggatatgagggtgatctggctgtggcatttgtcaccccattaatcaccaaagttgattggctgatctggctggctaggtgggtgtccccttcctccctcaccgttccatgtgcatccctcccaaagctgtgcactctgtcaaagaggactgccttccccgaaaggaccagtcttcggtcaagggttataccagtagctgcgctcccctgctataacctccaaccaagctctcaaggtccactctaggaggacgtagggtagtcaagcttccagactccagacacatccacatgaggcgctgcatgtggcagtctgcctttctttaaaaaaaaaaaataggaaagtaattttactatttagtctgccaaccttatttatattttactaattgttttataattgtcttttatagaaaaagcaattgaaaggttttttgtcacattcagtcatcagccttttaccttttaccttttgatagtaatagtttctgagcttctctagtcataatttgatattttagaaaaggtcatgcattttatagaatatctcttcattttagtttatctgatgttcgtgattgactttagcttagtcatttttggtaagactatgacaaaaggaatgccaagtttatgacaggagtgtctctcaggaaatctgtgcggctgcggtaaaagtcacttgagaggcttctccaccactttcattaacggctctagcctgagaaactcgcttcgatggttgttgagtgatttattttttccatttttgttattccttctatgtagtggggtttctgtttcaacgaggaacttctaactcctgcccttgtttagttatttgtatgagtgtatattcattcagtgatagtagg

SEQ ID NO: 24883 - DNA, 1279 bp, Mus musculus
gtgctttgaatttggtaaaaactccaccctcaggctccccctcaagggatcaggtagttggaggcaatgtgagccctcgggaaatgcctgaacaagaagctgcagttgatgtcatcccagaccacacaaggtccaatgtttataacagtcaggactacttaaatggatgaatcattagattttggaaaatggatcccaagactagttggcaatctcatctggaaccggcacagtaaatgttctttggagttttaaaaaaaaaaaaaaaagccttctcttccctctttcccttaaaaatactagacaaaataagttttaacaacttctctacatatctgtaaagaaaagtattttctgttaatttttttaatttttggccaaattattttctctttgtcattaaagtcaaatgtctatctggctcaccacaaagtgttctttgattttggctttgaggctgccatttctggaataaggggggatgggaaacagctgacttcaattaccgtgctgtatattaccgtgctgtatacctatctacttttctgggcagctgatggagctctggaagaaacaccaaagcctgctggaaaggaaagcgtttgaagaaagaattgtcctcctgtaggttccattccttcggatgggcctaccttaccattgttaggacagcgtgagtagacctgcttgctcttctcactttcctcattggcttattaattagctccttactttgttgcctttgcttcaaatggtttgagtcaccaacagacttgtttgggagtggcctcagtaaatgacagaaaaactgacaggctcagttttggaagacagcaaactggtaaggttcattcctggctcggtgccaggaacatttgtgttttggagctcacttttagttttgaaacggcctttgctcgttatattgtgatccagtacattttatgttaaattgtttatcagccatttctgttgtgaactgtagaagatcttaaattgggattggactcactctctgttccacaaacatagatgtaaccctctacctctccttacccaacttattaccaccatactgtgatgttttgggttgtacattttgtttaataaaagattaaagaatttatgaagttggcttggacaagtttaaatccatttttaatgtgttaaattttttttggaataaatgtattcatcttctacttcttcctgtatgtttgtcttgacaccacacaaattggaacttcaaaagaaactagaatagtgaatggctgccctg

SEQ ID NO: 24884 - DNA, 1460 bp, Mus musculus
ttggctacgaattgggccgggcagtagctcttggtaagccgatcctgtgcctgttccgaccacagtctggccgaggtgagtattccagcgtggagtggcttactccttcctggctttcttcctttcccagtgggctggggcagggagcagagtggggagtatggaaggaagtcagtttcacatttcccccctccccagtgctttccgccatgatccggggagcagccgatggctcgaggttccaggtgtgggactacgcagaggaagaagtggagaccatgctccatcggtactttgaggcttatcttcctcaggggacggcttcctccagtaacccaagtgcctgtcttaaccctactgtattagaaaaaatttaagatttatttttttaacacatgtttaactacatgtatgtatgtaaccacattcataccttgtgcccagaggtcagaagagggtaccacattctctggaactggtggtagagatgactgtgggcctccatgtgggtgctgggaactaaacccacaacaagtgctcttagctgctgaaccttctctttggccctggtccaactttatccaatgctgacccctgatgtttctctggactccttcctgcttctgcctcagtagtaagaaaaggttcgtttagttgggtatggtggcgtctcaggaggcacagtgtggtggtttgaatatgcttgacctggggagtggcactattaggtgtgaccccgttggaagtgtgtcactgtgggggtgggctttgagaccctccacctagctgcctgaaaacagactgctggtttccttttgaagatgtagaactctcagctcctcttgcaccatgcctgcttggacgctgccatgctccttccttgatgataatagactgaacctctgaacctgtaagccagccctaattaaatgttgtccttagaagagttgccttggtcacggtgtctgttcccagcagtaaaaccctaagacagaagttggtaccagggactggggcatcactgtgatagatctgtccatgcttctgtttcgaaggatgtagatgttgggactttggaaagcaaagtttgatgggctatcctagtaggaatatggaagactttgttgctgagagttctacatcttcatggaaaggaagccaggagcagactgttttcaggcagctaggaggagggtctcaaagcccaccccacggtgacacacctactccaacaaggcctcctaatagtgcgattccctgggcccagcatattcaaaccaccacacataggcagggggatttctgagttcagggtcactgtggtctacatatagtgagttccaggacagtcagacctatgtagagaagaccccccccccatctcaaaaataaagtcaaaaaaacttgtttatattggcagtgctagaaccagccctggcttttccaccctgtttcattgt

SEQ ID NO: 24885 - DNA, 2598 bp, Mus musculus
atgatccgcccgtcaccctggacagacggcccaagggacggcaccacttatttattgttgccttttcacggtttctttacacacacactgactggccgaaggagggaggcggggagaaggagcgggcagccacaggactatgccctctcactccagccaaagaaacgggcctgcctgccctccccagctgccctccttcctgctctgcctgtcatgctgttgatggtgcagctctcctccctcctcagaccccctgccagcctggctcaatttgctatgagtattagctgacccgatgggactgtgccaccttcccactcacaggccttctgtgggactgggcacagtgttcccgtccgaggaaacatttggggccctctctccagcctctttggcgacctctggttagctttgtgtctgccatggtctgggtcaaaagagcccggcccctgcccctcagggagccagctgggagagatatgggggcttgtgccctcagccgatgccctctgcccctttcagctcctgaagcagctgggcctgtgcaccgggcaggttactggggccgcctgccctgccttgcctctgttcccgcggacctgcaggggctcctgggttggagggaaccactgttagcggtctcttcctccccttggtcttcccccttctcccagctgctttacttaagagttgattttgaactttttatttgaggagatgacgtgaaaacaaatctataaatatatatttttaaaatatttaacttttttttaatggcgtttttctcatccccctccctgcccaaactcctcttggggaagctcttgggctccctagaactgtctgggcccctggggacagccaccccatgagcttggggtccaccagtgtgtgtgtgtgggagattctgggattgctccacatcctgggttctttccaggagaaaggtgggggaggggccctcaggccaagccacagaagggggatgggaggtcccgcagttctaggcctcttttgccctctagggttgttgctaggaaaagggaagatggagaccaaatgtgggggtggggtgggaggggtcagggagaggagattgatgtcctttgtgccacagtatggtcgttgcagcctgtgctcccccaggcttgcagatacctggggcccaaggtgcagtgggcaggatggagttcgggaggtagggagatacaggaatgggggtcagaggtaaaagctcttgggctgagtgcagcaatggggggccagaggtgggcagctctcccagggagtgagcagctactgtaacttttttaaattaagacaaaaagccttgaagaaaatgactttatttttctaagtgtaacctcagtatttatgtaatttgtacagggccatgccccatcccttaaaatccctttggggaccttgagggtgggctagcataggggagggtgttttaccctgtgtcagagccagcctaaaccacctgtatccattaaaggagctttttccgggagggcagttggggtagggtgtcactaaacccttgttgctgccttcagtaggaacaagcctacttctgcggttaggtggaggggttgggaaggttttatgcacagcctacgtttcatggggatgatctgctgacgtttaagagccccctgaacctctaatccccattactgtcttccccagctgggatgccacctttctggcctttctcctggaaatagctggggcgtttgggtggctttcaagactggggcatggtaaaccaggggtcagagttggggagcttgggactcaggtctgtaactgcccagcccccttctctgctcctgtttcactcctctgccgcccactcatggcccctcccccaacaccggaggtgttgattcctcctcacaaaagatagagcctgggcaagtgattcaggccaagtgcttaccaacgtgtgctgtgtgattgtggccttgggagaacctgtttgtcaggcaggactgaggtggcatttctatgtgcagcaacccttggtgtatccctaattaagtggctctaggggtgtgtgcgcgcgcctgtgtccgagtgaatacgtgtgtgaatgtggagtgcgtgtggtatatccgtggtttctacttctcctgggatgttgacccaggaatagtggacatggtcacatcttctgtacagagctttcttttgtattaaaaaaatactctttcaataaatgtatcatttttgtgcacagactggggtctttggctgtgtctttgggatctttttagcatcgggagggaggagggagcacaatcccttaaagtctgtcccaagctgcggtgtgctttggactgttcaatcctacatgattgaagagatctgggcgaggacttaatgcatggttttgccagcagctcagggaaggtcaggggttttacttaaaagtcaaagtgacccaatgatctaaaataccgcagggtttgggcagcgctgggaaacaacaacaacacacacacacaagtccggtgatgggagtatgggttaactaatgcggagatgattgctgtggtgggtgggagaggaagatggacccggtggagc

SEQ ID NO: 24886 - DNA, 1579 bp, Mus musculus
ggacccccatagtggaaggagagaaccagctctccagattgtagtttaaacacacacacacacacacacacacacacacacacacacacacacaccaataaataagtcatttttctaaaatattagaagcaggctcaggttgtgtaggaaatgatagagcctttggctgccgtatgagaactttcatactggataatactgcttatgcccagggtctctttgagctgtcagttgcttgagctcccgcagggaccctgtctaccagccagagagaactgagggtcagttatctctccttgtcacactcttaaaatgtggcggtgcccacccatcactcaccagtaccccccagagcagaccagtccctgagagaataccatggaaacctcaatccccagcaggtattgacaagccattaaacattcgggctaatgctacccactgtgtattctacagacttgcaggctggcaaggctcgactcccgcagcccgaaggctgcccgtctaagctctaccggctgatgcagcgctgctgggccccgaaccccaaggaccggccctccttcagtgagatcgccagcaccctgggagacagccctgcagacagcaagcagtgagggagccttgcaggctgtcctcaggatggcgtgggcaggggagaacccctcttgaggggagcctgcagcatgatgggcaggataaccctgtccttggccctggggtccctgcccaagcacagcaggcattgctgaagactggcagtgcctaggcgtttctcttcgccacaaccactggggaggctgattcgaacccaggctgggtgactaagactttggaccaggcatctttctttgccaccccttcccttatcagggacagtatgggtacctcaggtaaccccaatttctggcctgagacttcttttggccaagttcagctctgccactaatctgccaatgttgcctggggagggctggactggggctgagctaggtttgggggacttctttaatacacagatatactcaaagttccaagataactctgggcacacaggaccaacgggcctcttggcccacaggtcccacctagtggggggtctaggaggtcacagcagtggagtcctccccaccgtgggcttgtgcacactaagccagactcctggcctcagtctcctctcctcaccctaagtgcctggcagatgaacaagagcgtttgggagcttttgacacttatatgacccgccccttttgtacgcaccatgggcggcctttgtattattgcagcgtggggtgggtgggcttggggaggtctgggtggaccctggaggaagtagggagggagggccaccctggcctcatactttattgttgttgttattgtttgtttgttttatggttttgtttttgttttctttgtttttttgtgttttttttttttttttacactcgctgctctcaataaaaaagcctttttttacagcctgtttgttagacccttcaccgcctttgtccatgaatggtattctttgtttccttctctttgctgattagaagggacaatgagacttcttgacatc

SEQ ID NO: 24887 - DNA, 1194 bp, Mus musculus
gaaccagcgttctaacccccaagtattgtttacttggtactcctgaaaatgattctttttaaaaacaaacaaacaaacaaacaaacctaaattcgctttttttcctaggggaaaaaaattgagaaattatagatttgttctgagggtgtttttgtttttaagtatagcaaaacttgggggtgggtgggtatgggggacttttggtatagcattggaaatgtaaatgagctaaatacctaataaaaaatggaaaaaaaaaagtatagcaaaacttttggggtggagcaatgagtcacctgcctaatggcttgggcacagtgagggcttgtgctctaagaaaggccacggtggctgcatctctctcactcagtggcttcttttgccaacgcggttctatacccaccagggaaaagcgagttcggggaggtgttcctggcaaaggcgcagggcgtagaggaaggcgcgacggagaccctggtcctcgtgaagagcctgcagagcagggacgagcaacaacagctggacttccggagagaggtggagatgttcgggaagttgaaccatgccaacgtggtgcggcttctggggctgtgccgggaggctgagccccactacatggtgctggagtatgtggacctggtatgtcttggggtgcccgcccgtgggaagggggccagaactggggcaccacaggggtcttggcttctgctggtcgcagacagagcttgcctcctcctacttgcataatctgcctcccggccctccctaacagccctgcctttacctgtattccactcctcccgtctttctggaggtcaatcttaagttctggggcttctttgtaccctgcctggatgccctttgggtcctgccaactggttttctttgctttgttccttctttctgcctcaagacttgccactacttgagaacaagcttgtctgaacctggctggccttctctcttcccttccaatctcctctcccttcctttttctttccttcctacctcctcccctcctcccaatcctctctctctccctcccttcttttatctcctttcgcttccccctctcctctccttacccggtttctctcctggctcaggtgtcagcctgatcaccagcctgtccaccaagttatcattcctgtggtcagccgtgtttctgccttccccatttttgctaggttttgg

SEQ ID NO: 24888 - DNA, 1177 bp, Mus musculus
aagtggagaggagaccgggtcagaatgcaggaggcccagagatgatgacaggtttaacagccataggccacacctgccctagtgatctctgtccctttgagaagttgtcactgtggctacagaagagagaggttaaaggggaagaaagttcacaaactttcccacaaacatctccattctgcagaattggtttcctagtaacatatctcatagaaaatggagtgtgggacctcttgcttgaagccattgacgctcaccgagtgactcatgggacctctgtcttctgagtcattggaagcccgtagactagcaatgcaggaactcactctgagctgagtcttagctgggatgttaagccagaagcttccccgtatcctctccagggttagttcacaggaccgagtcagccagagaaggaagggatacgccctgggtcttcatgccacgtgggggccttcaagggtctagaagttgtcatatatctgggctagagacttgagggctagtttgcttgagtcgcccctgtcctgacctctccgtgtgtctcttagacaagccagtgatggaagactcggagggcccaggcagccctcccccatacaagatgatccagaccatcgggctgtcggtgggcgcagcggtagcctacatcatcgcggtcctgggcctcatgttctactgcaagaagcggtgtaaagccaagcggctgcagaaacagcctgagggggaggagccagagatggagtgcctcaatggtgggtccccctgtagcgggaggtggaccggtctgggtacagagcaccctcccgtgccagctgtggatttgagggctggagctgaggctacctctcctctggctgcaaacctagagttgctccattctcagggccttggcttctcaacggcttggctcgggactccctcatcagtcaagcctcttgggtcagccttccctcccaccgggaaagcacagataaatttggcatgcgtctacatgtgtctattacacgtcttttcagttgtcagcctccagggacaatatctgtccatcttttccctcatccctctcatcactaggtgctctctgagggcattgctgggtctccactcagtttaggcggtcgggaacagtgtgtggtgatttcccctttgtatgcaaggggtccagcgatttgat

SEQ ID NO: 24889 - DNA, 1147 bp, Mus musculus
gaatgtgtatatgtgtatacttctgtattatgtatgtatgcatgcatgcatgcatgcatgtatttatgtgtataaagttattggactctgccttttgctttatccactctgtctctgtctctgtctgtgtgtgtttgtgtgtgtgtgtgtgtgtgaattttctttcttccctttcctttctcatcagccccatggagtgaagggttctttctactggccacagggagcgccagccccagtaagttaagctttgttccctcagaggaaagtctgctgagtggcttctctaatctctggctgccactggccatccccattggtggctccacggcaccggggagcacacgagtgctttgggtgtggcagacaagaactcagtctacaagctgtgagctacatccctggcccaatctcattatccttatgggaaggatgccatcaaaatgtcactttttaaaagttttaagatgtatttttattttacatatataagagtgttttgggtctgtacgcatttccataaacaacagcaacaacaaactcctgccttgctctgactgaaggatttccaggactgctgtctgctcctgaactgtgttttaagtatgtgtgtcctttgcttgcagtttgtattaacaagtaaggaaaggagccacttagtgctgagcttgttggtattgtcccctttatattttttctcctgggaacatatgaagcaagttattctttttctgtatctttttcttttcttctgtaaaccttttggtttggtttgtttaaaaatggctttgtaaaagctgggcgtggtggcgcacgcctttgatcccagcctgggggtgtgtggggggggcgtgagggggttcagtgggtgctgtacctgctggggaagcataaggatctagcttggagttccaggacccacatgagattcaggtccagtggcaacatcggtgacccagcaccgagcagcagagacaagggcccctgcaacctgatggccagtcagtcggttcggtggaaccagaaagctctgggctcagggagaccatgtctaacggtggacagttagaggagagcacccaacattgacctctggcttccacacgcacaaataaatacacttcttacacgagagagagagagagag

SEQ ID NO: 24890 - DNA, 1128 bp, Mus musculus
cctacatatagtgaaccccacacaggctagcctgttatccttgtgcctatgtgagggcatgacgcaatgggagaggcactgaagcccctttgtcaggagccctgtgtgtccctggggtggaagatggagggatttgcaagagagctagagctgatgtggctgatattagtagctctgtctacacataaggtggtgatagccatctctgcccctcaccaggtaaacgtgatgccctctgccagccgggtgaccctcctggagaacctgacccgcttctggcccatcatccaaatcagaataaagcgctgccagcaggtggggtgtgaggactgctgcaggtctctgagccccagccagacgtctgtcaccaaactaccccatggcagccctgagcctgatgatgcctttagattttgagccggggcctgggggggggggctggtttaaagggcaaagcctatgccaaggaggatgtggggtcagctacaggtcttgtgtgtaacagggtggcattaacacgcgcatccggggcctagaggtgctgggccccaagcccaccttctggccagtgttccgagagcaactgtgccggcacacgcgcctcttctacatggttcgggcccaggcatggagtcaggacatagcagaggaccgccggagccttctgcacctgagttctaggtatgtgagagcttgcatgtgtgtttgtgtggcaggtcaggttcatggactctgtctgggtgggtcctgaggaggcctggagacgggtctgttctagggcttggggaaggtcaaagccttctgaggggaggggatgacggaaagagaagatagatctctccgagtgcagagggaagcatcctgctagtccagggctcctctaaaagattgccctgggtgctggctgcgtgctgagtcacctaagccttagggcccgaactcttccttctcctccccaggctaaatggggctctgcgccatgaacagaattttgcagagcgcttccttcctgatatggaggccgcccaagcactgagcaagacctgctgggaggcgctggtcagccccctggtgcagaacattacatctcccggtaaccacccacacccggccccgctcctcagtgtg

SEQ ID NO: 24891 - DNA, 1390 bp, Mus musculus
ctttaggtcccaaagtttagggagaacaggaggtctgaatcagggccttaaaataagggaaattggcaacaagggattgacgctctggtaaggatgagggggaagtgctgcctggctggctgcagactgcagagcaggagaggtacctggggtgtttactaaaatgggtacacctgagccagatgcttaggctcagaagtctgtataaacataaacaggaaatcccagagaacctggaggtggttgagtaggaggaggtgggagttgtagtggtaggtggggtctggtgattaacccctctgtgggagtttggagggtgctgtgtcatagctttgttgtcatagagaccacctcttccggtcttctctgcccattgttcacctttccaggtgggagctcaacgccatgaccaccaacagcaatatcagccgccccattgtctcctcccatggctaggaagtttatgctgcctcccctactgagccctctcttgtcttcattgcccctgcccttctcacccgcctgcccctttggaccctggactcggtatacctccacgtggagttgatggactagaggtgttttctgtgctgtgaattcagtggggagttttttgggggagggcatttccctccctccttgggccgagggccccttcccttggtgctctgtccccatccacctccctccaccgctcctgggcctttgctctgccccagtctggctgggtagccaggctgtgtgtgctggaaagggacaggagtgggagaagccagcagtgttggagcctcaggagcctccctctccccatgaccaccctctccctgcttgagcatcgcccgggagctgagaggagcctcggctgttggcatgaaaccccctccccaacccgcggtggtggggaccaacagacagcttcacccttccttgagctgttgctgtacccctgaagctcaggcagctctgactttataaaacctaaaacctccaaacgtgtcctatttctggcgactacgatagaggggtggaggcaaaggggccacccttgcggttctggcttcagggccaagcatctgaagaaatccgatgccactgagcctggcagcctctccgcagacgtgaagttctacggctgcggggcggtgcttctggcagaaccctcagcacattggctcaggcttccggaaagggtgggacgtgggacctcgtcgtgagcggaagtcgtgcaagttttcagcccggactacggaagacatgcggaaggctggttctagggctagggctgaggccgaaggtcctcaccgtgctatggagggcggggaggtgactggcgaccggctgaagggtgaggacctaaggctggggtgagcgggaggcgtttggctgcggg

SEQ ID NO: 24892 - DNA, 1390 bp, Mus musculus; identical to SEQ ID NO: 24891

SEQ ID NO: 24893 - DNA, 1194 bp, Mus musculus
cttcctccgtctgccactgggattgtagtcttatctttgtgcattttcgttttatctggacttactttcaaaggagagtaaaagatatgaaggaggttgataggctctccaccaccacgttctttcctttctttctctattttttgtttgttttttttttttgagacaggttcttgtagctctggctaatttgggacttactgtgtagacccaggtggctgaccttaattacacagacatccccctgcctccatgccccagcacgagtgccttggacttggattcttaagctttcagtcctctttctctgataagcaaaaattgaagagcctgagtaatgaaggaacagtttaacttttggctgctgctgtttcacattgagagagatggctacttaaagtatacagtgaaaggttgtgggggcagttgattcatgaaagctgcgtctgtccccttgaagggaacctcctttgcttgaggtgcacccaccccacccccgaggtttttcctccctgccaaggatttttgaacaggaagtgaatgatcacccaaacccagcagatgtctcctggcaaaggcatcgctagttgcaaaaagatttgcctgaaagagctctcagatatacctgttatcactaggctggccggctgtctttacaaagccgtggcccctctcatctttggggctttctcttgtcctgcccaaaggtatttttgctttctttcctctttccaatctacactcctaccccatctctcctctagagacccagacaggggcagggctgctggaagtggcgtgttcgctaacaatagtccggctgagaaagttgagggcgctcctccctgcccccgactctcagtatacacatacctttctggtttaagtttctagtcctggcagcatacgagccacagctgtcaaaggaactcctcgtgcctgtagacaccctgggtgaccccagggacaacggatcagcttgacaagaacgctctgtgaggggctaatcaaccatggttacatggagttccctgtcctaggtagggacactgttctcctctgaaagcctaaagctcctttttactttaaagcacccatgccagctctcagtggactgtctggggctggctgggctattaatagctgtgagtattttgagatccctacctttaagagatggagggaaattcttag

SEQ ID NO: 24894 - DNA, 1448 bp, Mus musculus
agtcagagctgccacaggacgtgtacaccatcaaggcactagaggcgcacaagcgggcagaagagttcctgactgccagccaggaggccctctgaccccctcaccttcccttcccacaggattccagcccactcagccctgggatgcagcccagccctccaccctctgctcctcatcggctgacctggggcagaacggcacctctctggctactctagaggatgcaggcactggaagcgggatgcccagagcgctccctcttctcccctaaacgtgttcatgcctccctgtggctagtacagacaggctgagcactgagtgctcagtgcttagacaacctgggggtgcctgtccccctgctcctaaccccacagctgcctgaaactgttctgagaaatacacacaggaatcacatgtccctctctacccccttaatcctcatctgaagttgaggtgtctctcctctccctgcagagtacaacaggagactgtcaccaaagtcacgttaagctccgttggccccttgagcgaagagctggagggaaccaatccccagcagcacaaataggcccctagacccagctttatgcaggcgggggtggtagtgtgtttctttgtatcctatacctaaccaagacaacacagaggacaaacaagttacggacactagatgactagtgggcccggtggggagaaagaaccatctgccttgccctctctggcaagcagcagtcctgggatcacacatttgcaagggaccaccctgtggctgactgctttcccttgtgctcttggttcccagagctataaagaaggaggcaggagcagtgctccaagcatggctccctgctgtgcctgtttatttcctggtttctgctgacgctgggctgggcgggtcctcacctgtaccctctaggcgctcagaaacaaaagcctggggagggctggaccaggattcaggagcacaggcggtgtggcttctggctgtgtacacagggtgctttattctccacagagtgatacatgctaaggtgggctgggcttgggccgatgtccccatatgtacagaactgaataaagtgggtctctgagaggtctgagtcgccttggtgtgaaagggacatgggaaggaggaggctgttaagaccagagttgttagtcctgtgctggtcctgacttggaatgtagggaggtaaggcagctcgctctctggtcacttccaggcaggggatgcctgccgggcttggagggctttctgtaccacatcttcccactgagcgtccgagatctcccgagcccaggcaggaacccctggtgcaggcaggcttactccagccatcgtccttttcaccagctctacatgttctgaaagcacagccagactggttagggaataaagaacgggaccagcagccgggcgtggtggcgcacgcctttaatcccagcac

SEQ ID NO: 24895 - DNA, 1237 bp, Mus musculus
tctctacctgttggtttcgtttctgttgtttgtggcactggccacgtacaaacccaggcccttggaccttcaggcaagggttttatcactgagcgtgaacacctctcgctccactcgctgacttctgagtgattgtaagtgcatgctcaggaggcctgagcaatgtggctttctctgaagggaagcaagacctgtaccctcaggaaacaggtccaagccagagaagccatgcagtggctgagggtaggccaggggaaaggcaacagagggcttcccagagaaccgagcagcttaggaactttgtcctcgcgtcgtcttcacaggtgattgtgggacttctcaagttttggcctaagacccacagccccaaggaggtgatgtttctgaacgagctggaggagattctagatgtcattgaaccctcggagttcagtaaagtcatggagccgctcttccgccagcttgccaaatgtgtttccagcccccatttccaggtaagagcagactcactggttcctaggtttggtagagcaggtgttgagaattgcagtgagtgcccactcaactccactctcctcgccaggtggcggagcgcgccctctactactggaacaatgagtacatcatgagcctcatcagcgacaatgctgcccgcatcctccccatcatgtttcctgcactctataggaactccaaaagccactggaacaagtagggccctcgggctgcgctgatggtgggacctgggtattccacactgtgagggcatagaagaacacgaggcgtggacccccagcaaggagaactggtgcccaccaaattctactaagtgtagggcctcaaggggttgactggccagaaaaggtgctaatgagacatcctcgaagtaccaaacgtctgacctgtatcataccacacagctctggagacatcccgggctgtcaggaactatgtcatatacttaacaagcagagtccaacttataaaaaagctttcgtgctgaaagcagacttggtgtgctgctgacagtctctccatgtgaggccacggaatgtgagccaaggaagggttagacatgtggggcccgtatatgtaaagaccatcagatagatgccctcaatgcaggaaagctagtcaagagttagctgcttctgcagtgtagaggttagtgattgggaaaagacagtggactgggagccggcaggctggctctggccccgtgaccaccgcctctgtc

SEQ ID NO: 24896 - DNA, 1156 bp, Mus musculus
ctacacagtccccctcacgagctccggggtccacccagcatccccaggctgagatccaggctcctgacatggaagctgaagagcatgaggcacataagatgctcaccagcgcccccttcagccaggaaggactccgtgcagcctcagcagccaggcctgcctcttccttccaccaagcattctcttctgctggtccttgtcggatggtaaattcgagaacttccaggacaaactcgggtgtggcacaaaggggctggacgccagagccagagccacgccagagactgcagagagggcacctgacctaacccccctggaaagccaatctgcagttcccgtgtccacccactcctcctgaggacgcctcatgctctgcccagcccttctcccagggctaccagagtaaacaccttttggcctttcggtttggttcctgggtcctcatcagcctccagagtgtcccctcatcgatcttttttgcctttgtcccccaatcccaggggctggaaggccatcaccatcattggaggcttaacctgtcagttactaggaggtgctgggagcgcccggggttggtttggggtaatcactcactggctctcagccttctaacactgcagccccttaatacagttccttctgttgtggtgactcccacgcccccacacacacaccataaaattatttcgatgctgtttcataactgtaattttgctactgctatgaattgtaatgtaaatatttttggagatagaagtttgccaaaggggttttgacccataggttgagaattgctgggttcaaggtaggtggcatggggtgaggctgagcacggtgactgaccctgccccccagctgaccttcacagcagcagttcatgtttcccaaggtccttcccactctcgactcgcacactgagtcctgggcatctggctgccctccttccctccctctctaccccaaggccttgtgtgcgcagtgtttacaggtcagcagcagcccctgcccctctggccatattctgcctttgcctgatcttggaccttgctcccgaattgatccctttgctcttcctagtgattgtgcctggacactccgtctcccaggcaagggctagcaggaggccagccctctagactcacccctcgctctgtcc

SEQ ID NO: 24897 - DNA, 2661 bp, Mus musculus
ttatttgttttccgagacaggatttctctgtatagccctggctgtcctggaactcactctgtagaccaggctggccttgaactcagaaatccgcctgcctctgcctcccaagtgctgggattaaaggcgtgtgccaccacgcccggtggtttttttttttttttaaatttatttatttattttatttatttacttattttggttttttgagacagtttctctgtatagccctggctgtcctagaactcactttgtagaccagactgggctcgaactcagaagttcacctgcccctgccttccgagtgctgggattaaaggcatgagccaccaagcccagcagtttttttatttttatttatatgagtacactgtcgctgtcttcagacacaccagaagagggcatcagaccccattacagatggttatgagccactgtgtggttgccgggaattgaactcgggacctctggaagaacagtcaatgctcttaaccactgagccatctcttacttaagtacactatagctgtcttcagatgtgccagaagaggatgtcaaatctcattatgggattacgggtggttatgacccaccatgtggttgctggatttgaactcaggaccttcggaaaagcagtcagtgctcttatccactgagccatctcgccagccctgaacccatgtttttaagagtcctttttcacaaacttaagtgctgtcatgaatgtcccagcatttccctttttgttgagacctcagccatccataccttcacccctgatgcatgctgactggttatcactagcattaacgctaactgggataacattcctgaggaatgtaagtcattatacaaacattattatacaaagaggccttatgcccatagcagccgtcaacactcatggaggctcacacctgctggccctatacaggtgccgagagccatgtcattctgtcccctgctgaggccatgccaaacccagcactggggtaggtcagaggacacttctctcctctattggttctgagaatctttactgggtagtctttgtggccagcagtcttactcactgagccatcttgttggcaccttgtctgacttttggtgggccatgcttgtcaactagaagtccctctgtacgctggagagctagttagcagttgaccctggcacttgaagaatgagagttgttctgtgtgaaaacaggaacaagcctgtgtgttgacctgttggaaagggacaatgcctgatacagctctgttaggtcacgggctagaaaatgtctatgttgctgtggacttttagcctgcagtggaggaggaatcacatcagaaactgatttcagaaggactatgcaggccggttggttacctgttctgctgaaggatcgcgactggaacactctgtcgctgttctctcagacccaagttgagattggtttgttgacacagctgtgttttccctccttaggttttccaaaagcacccctcggaagtgtttttgtcgtcgtttaaaattatcaagtatcttcagagaagattattttctgccttcagaaactgaaggaaggcttgggcctagagaacgacagtaaggtgcgagcaccggagacacttaacacagctcagtccatggaaggacgagttccctcattggctgcctgtctcgaaatccacgcaagctgtggaggaaagaattaccctgctcatcctgccttctatcttggtgtttaatgttgggtgggcaacaagcacaaacctccctcccaccccctccaagactgttagagcagtgggccagaccaagcggcgcacttgaacatggatcaagagggtcccggttttactttttatttttgtcagggtaggcagtcttgtgtttgctttgttcaaagcagggtctccctgttggccctggctggccttatactccacagcagtcctgcctcctcctcctaggtgctgggattaaaggcgtgcgccaccacgcccggctacagcctgcatttttatgcacattggtctgttaagctagttgcattctgtgctaccggaggggactgaagtttaatcacttgtcttctattaaaaactagtgtttgcctgggcctggtgtgtatacctttagttgcagcgcttgggaggcagaggcaggcagacttcatgagttcagggacaggcaagcctgctctacagatttccaggatacccagggctacacatagagaaaatgttaaagataaacaaaaagctggacagtgggggagcacacctttaatcccagcactcgggaggcagaggcaggcggatttctgagttcgaggccagcctggtctacagagtgagttccaggacagccaggactacacagagaaaccctgtctcagaaaaaaaacaaaacaaaaaccaatgcagtgatagattgttgtttcctaaaccacatgtacccaggaaatgcccactaaatttcacctggatcagtgttaactgatcattgggaaatgaggtgaccaaaaatgcatcgcaaccttggacaaacagcatggctatttaacattctgggatcctgcagaatcctgcatcttcctaagtagggaagcactgtagcattggagagaggcctgggcgagcagagctaaggcttccatttctggcttgc

SEQ ID NO: 24898 - DNA, 2062 bp, Mus musculus
gaaaaatcaaacaggactgatttaaagactttctcactgcagctccaaagtagtggtttggttttgttctgttccagggggagagggtatctgcgtagggaagactctccctgaccagcccgctgagtggtgggtagccggtgctctgcctggaagcccaccgccctggctaagacgccaggagcacagccacagagcatcctcctgacatccagtgctgtgcgatgctgcaaaagcaaagccttgtgtttgtcttcaacacattcgtgctgaattctgtctgagaatggtctgttcttagccccaggtgtacgccctgaaattctcacaggctcactagggaacagtggaagtcagttgtaaggcagcgagttggggaggcaccggggtctccgtgtattccatcaacttaaaagaggtttgcattttataattgggtgaagtcaacataacctatgttctttattatcgctgaattctgttccattcaacctcgttgtcccctttccctcagcccttagccaagcatcaaaaggctttcacttaaaaactgtgttgtactctttcagttgaggcttttgaacgggactctggccttgttcgtgagaatagtagtcaacagtatcagtcattcattcccaaacacagtaaaccaaaggtcacaaccagcaggccactgaaggaaggaaccgaggcaggagacagggggccatgtcctggccccgcccccgctgtgtgtggtccagttcaccatagcgatcgagccttcctctttattatttttgttcctttccgggagtggccctcatccttccctctgtgcgggcctgcaccagggcgtgttctgttgctacttgcttcttcctgtgtggtaatggcccacagtgctgtgtctgcaaccctcctcccacgtctccatcaacctctgggatccagaggtagctttgatgcctgtgagggcttcctccctctgttcatccccaggctgtgtaaatgcatccgttgatctcctctgcttcgttatacccccaaaatggagttgtccctatggtcatcatgtagagtgtttcttttccagattggcctgcaatggaaaggaaggcttttgattttgatttttatctttttttcacataacacagcaacaatctaggcatggtggcatacacctgtaatcccaacagtcaggtgactaaagcaggagagtcactggttcaaggccagcttgggctatataacacacccctgcctcaaacacagaaggagagaaatttgagcaatagcagactgtgtgggccttttttacccctctgtccactacacaaaaaaactctgtgagacagccagtctttgagagcgatggaccttctcccgcccacagcccagccaaccaaactagaagagtctgggctgtcttcgagttgtccttttcttccttctctgtgccaatgtccaagttgctgacttccttcctgtattataacacattagaaagatgagttgtttaccagttagacctctgtctgggctgccctgatctctctgtcacaggctcttctcatagccacatggttaccattcaagatggcccctggatgcctgcagcacatggctactaatgaattactttaattattgcaaatcagtggaattctcaagagacaagaaagtctcgtgtatatttgttatctcttccctccctccccagccccggccctggccctagttttctctcctgtgtgtcaggttacagggcttctcaccatgacattagtcccacacaaggagagcctactgtaccaaaatgaaacttgtaaatttttgtgtccttgtatgtaagtttactttttatggaggaaagactctagataatgacaaatgaagattacaaagtgtattttactcctgtgattaggttacaccacatgggtcataactcactcccgagcccccactgctgaagggaagcgctctgcctcagtggccaacgttggtggttcagggtcattagtcagttgagttctagaacgcgtgctcagtaacaaaaaaaaaaaatcacctt

SEQ ID NO: 24899 - DNA, 1185 bp, Mus musculus
gacacttgcttcctccatgaccctgccatgctcctcctctctgggctgtgttctgtattctctgtcgctggtgtgtgtgagtagtgaggccactgtctgcttctcttttccccctatgtatatatgtgtgtggtgtgcaagcttgagtatatgcatgttcaaattggtgtggttgcgtgtgtgtctctgcatttggaagctggcatcgagagtcttcttggatagctctcattattctttggtgcagggtctctcagttgaacccagaacttgcagaagggactgggctggttagacagcttgtcctggggaattcctggcaccagttttgagctctggaatccacccagcattttgtgtacgttctgggggcctgagaagcaggtgtcttaagcactgagccatctccccagcctgcttatagagatctctaatgtagcttcactccgcttccgtattcttttgcagtacccctgttgtgttaatggctgaagcgctagacccaaagcaggaccttcccttaggagtgtgactaggcggagttcggctcctgttctcacttctagctaaggatagaagggatccagggctagagaggatatactgagctgctgaggagcagggtcaagtttaatagtcgtcagctattcgtgttaagatggcatgatcactctaagtcgtccattctttgggtcggagaggtgctggggacttatttagggactctcctatgtcatgttccatgagtgagctcagtagccagccagcccaacatgttccatacttcaggcagtccttaaacttgtcacctccctgtagctgggtcacattaccttttacaggtagtttcagcttcttttcttgttaagtaagtgtttcaaaacctttgtaatgatttcttttaaattataagtatgtgtgcgtgggtagatgaggaggctggccaggaaggccagagaagatcattagatctctggcacttgggttacaggcagttataagctgcgtttgtaagtgctgggaattgaacctgggtcttctggaagagctgcaagtgctcttaaacactgagctgtctctaggccctttttcttctttcttcctctttctccctcctcttcctcttcctcctcctcctcctcctcctccttcttcctcctcctcctctttccttcttcttctcct

SEQ ID NO: 24900 - DNA, 1179 bp, Mus musculus
gtgctgtccaaagtctcccacagggaagtcgaggctgggctttcagtagctagagagtggataccacagctgtgagctgtggctcacactgagaaagaagccctgtagtactgactggatttgaacgtctttttctgagtttcttgagtcacagaaccagtgtagctgatagagagggaatggttgtattcttatggtgccttcagagcacgcatagtaagtacgcactttttgatgtcagtcctgaagttgtagggtgggttctccgatactgtgccggccgtagaagtcaagagtgggcattctcacctgctgctccttcctgcagccaccaaacgtttgcttaaatgggcagagcctaaaggcatctctgtctacctcgtcactcattctgagcacatcaggtgaggaatgggaactccgagacactaccatcatagccccatccccagcaccccgcccacgggctccattgaaagaatccagacaagacgcatacagtggagtgtaggagacagaattggtttggtttgggcaattctgtttgttttttgttttgtattctaacattgttgtttgtgtatggatattggtgaggacgtgccacgcctgtgtggaggtcagaggacagcttgtaggtgtcagttctctctccactctgggttccaggagttgagttcaagggagagtcactctaggtgggctttattccatccctaaagtctctgcagcagaaaacttcccctgggcgctactttcctgcccagaagcttgacagagccatttggattaacttggggagatggcggtgggtcctgttcttttctagggagcttccagcgagaacataatcttaggcagtttagatagttaactgttaatggcctttcaggtttgtctccaccacagtcagaaatcaactctgcccgcactgcgggtccctagttctccaagctgtcacgggttacaagcgggggattcatccccctgaccctcaggcttgccgatggtgaagagcagctgggttgccttctctggcttccaccacgccaggccatcggctgctcagtacaccttcctttgctctactttgactaagccaagagttaaccttgtgtgcttataacatgaccacatatttaccaagttcttctcctttctcacttcttagctacccca

SEQ ID NO: 24901 - DNA, 1165 bp, Mus musculus
cttttttgacactagtgcttcagctgggaaagtgcctcagctttctctggtggtattagggatgcttcctggaccaagggtgtgggttagagagacccttgctctctgtgttcagtcctggccttcagctagctgtgtaatctccagtctttaagcacagtggcgagcagtgttctgttccaggggcagtgagggtcatggaacaagcatactgctcagactttgcagttgctgttcataccctgagtactttgttctctgtcccttcaggagaacaaggagaccggcatggagagcgtcatcgagtccgttgcacatttcaagtgagttcatgacatgcgttatgaagttttattttaaacatgtatttactttctatgcacctgtgctcactgcggcgtatgtatacaagtcaaaggacaacttgaaaagtcagttctcttctacagtgtgttccagtgatggaactcgggccaaactggacggcaagtgtcttttcccactgggccatctttccagcttccgaaatcacttcttaatgtgtttcttttgatacaactaagggcgagctgatgctctgagggtggcaggacttttcaagttttaattctggactagacttctcattggtgtttaagatcaggccgtgtgtgtgtgtgtatgtgtctgtctgtctgtctgtgtctgtgtgtctgtgtgtacatatccgtggagctagagttagcagtcatgaaccacatgatgtgggcgttgaagctgtcctctggaaaagcagcaagtgctcttaactgctaagccacctccagccccggggtaatttttcctcctgcttttccttgctctacactgtagctgcagtgtctttatggattctaaagataagatcgtgtattctacatgctagtacagaaaggttaacactacttacacaccatgttacagcagaaccggtaacaccatgtgtactccatgttaaaacagagaagttaacactgtgtgtactggtgtcccctggcttagaaatgcagcagtttggaaacctgttcggttgggcttctgggctgtgtctccattgcattcacttgcatagtttggactagttcacagtggaggtgctgacatatatgatggctcctgcaggggctttttttggatgtatagtgtc

SEQ ID NO: 24902 - DNA, 1193 bp, Mus musculus
acttacttaaagccagacgaggtggtacacacctgtcatcgatcccagcacgcccttagtgggacgagaggcagggacagacaaatcctcagacgatcccagcccagctcaactgccgttctatcaacagcatagaaagtgaaggctgacacctgaggttgtcttctgaacggcacacgagtgtcctggcaccagcactcactcacacacacacacacacacacacacacacacacacacacacacacacacacacagatccaaaggcaggtcgctctctccccagccccaatcatgttgattttttttttttttttttttggtttttcgagacagggtttctctgtgtagccctggctgtccttgaactcactcagtagaccaggctggcctcgaactcagaaatccgcctgcctctgctcccgagtgctgggattaaaaggcatgtgccaccatgcccggctacattgaattttaagaatgaaaatgctgagggcttaaaccaggaaggtttaaatccagtgggggttcatcaactgcctaaaagactctaagcaagttactttaaaactcatttttgccctctgtgaaaaatgcttcataggacacttgtgtgaagacttcaacttctgacagacccagctcttaggtagatattttaaaaacaaacaaacaaaaaatacgtgtgttatctcttataatagcgtcatggcttttgtaagcagctggaaccagggactgggacgtgagactttcctgtcagaatcttggagaagtgcagtttcctggcctgacagatgctgtctgcagcccctcccattttatttgtggagcactgacggtcgacccgacctgctcagaaccccatagcagtacaagtcacatccctatcaaaccaaaaccatcgtttctggctgaaaccgggccggagagttgcagggccagagtctctctccagttagggacagggctatgacagaagaaggcccgcttttaagggtaggcctgagcttgaggaataccaggctgagaggtaggccacgtcacctccaccttcagtgaacttgccctgtctgctaacttcacttcagacagcctggctccattggctcataggaagcctgccagccaggagccccttgtacctgtcttatcgcctccttctgcactctggtctcctactctggggagaa

SEQ ID NO: 24903 - DNA, 1192 bp, Mus musculus
taagagctgaacctagtgccccaggcatgttagacgagggctctaccaccgagccatattctcgcccatgttgagtattgtgttgaacactgtttttggtgtcacagtacgagcattctgcaggatgggtgccctctcctgggtatgtgcacgctgacatctcatggatgtcagtcagtgttctagctccctccccgttatcataaccttcttgccagcactacagtagaacacaaaactcacttccatttgataggctatttccatcttcaccttatcgatctctccccagttgacgacttcctgtgtgttgggaccatttgtatttcacattttgtgaatagcctatagctaatttttcaccatgcatgcttatcattctcttattgatttttttaaaccttctttatgtatgaaggacctgagcatgcacctagaaaataaatttcatttccctggcatttaatttcacttaggcctcgctgtttgtttacacataggattaatacgtttttaacagttgaacttaccagcttttctgcctttatgctgtactccctggtgtacctgaacttctgacttcacccacaccccttcttcacgtgccgggatgagggatatgctggctgcagacatgcctagggctgagctctgggttgtggtcctcagttcggcagggtctgggaagcagcagtccctacctggcagtccgtctgtttctacctggatcctcacagtttaaccaggatgccactagacagatcgttgctgacctgctgcacactgtggtgatatagaggtggaggctgaaggtcattgggtatgtacatgaggcaggtgacagtgcccttctccatgaccccctactgccactaatagggggctcttctggaagtggtagcctctagggccgtagaaactgaggcagttgtcaagaggaagggccagccagtctggccacatctgtctactctgactgattaagcccaagagggagcaaagatgggacaagtgggaccacggcttctaaaggccatgtgacctggtttggctctgactctgtggtaacagcctcatgatgtgggccagtggtactctatcgactggatcttttcctctctacttaacagatggcccttcccagtgagctgccccggtgaggctggctgcagggtggatgctggtaaatcgc

SEQ ID NO: 24904 - DNA, 1557 bp, Mus musculus
gcagaaggctcagaaggcagccttcgcagcagaaatggcagccaccatcgagaggactacggggccggtgggggcgcccgagctgctgcccctggaccaactgagtctgatgaagccagtcaaggacgtggacatcctggatgacgatgtggtccagcagttaggcgtcatggacgaggccgaggtggtaggcacggatcttctcttggacgaccaagattcggttttgcttcagggtgatacagaactctaaaccctcccgttcatcacctagagacacagaagccacggcctccacctctgtcacccgtagaacctggacttcctgctcctttggaaacccttttaaactacctgtttaaaaagcggtccttttcttcaggttaagggaggggaaaaatccagttctttctcttttaccttcttttacattgtttttgttgggggttggggggaataaaaaaaattggcacaactatctttaagaggtgtctcatctgggctatgttctcacgaggctgcatcctttggggtaagccttctccttcgtgttgctttcagatgtcagccaccctggttgcctttatgtccaaacttcttgctctgtgtgtgtgtgtgtgtgtgtgtgtgtgtgtgtgtgtgtgtgtgtataggtaggtagcaggttatcccattcattctgggactttaggccatgttttctcacgaagaattattttattctgttctgacctgcaagagttctttctctcaaatcagaagaatttctctctctctctctctctctctctctctctctctctccctctccctctccctctccctctccctctccctctccctctccccctccccctccccccttctgttttaaacatggtccgtggccagtggagttctgaacttattttgcaccacttgaacgtactgtgaaacctctttcactctgacttgctctaacgtgtgtgctggtctgagctttgcctagatgttagctacagagagatagggtttttcttaacacatacagatggaaagtgctttgaaagccaacacaaatgtgtccagactcaagtttgctacagtgctcgcattcaaacaatgaatgtatttgttccaagtcacttaccaaagcgattccagacttctctaagctacatggctttgctctgtccccgacagcagggggcgccatttgtacttgaaggcaataaacctgcaatcccacaaaacggtcattgcctaggctttccctgtcagttaggctgaccccctcccactgctagtgcacagtcagactggaccactgcccctggcacagtggggcgcctgtcagcctcccttctgtgatcatggcctgtggcctccaggtgtcttcaggtcttaaccctccttgagtagactagctccccagctctgtgtaagcgtagctatcatactgggctctgtgctggcccgtgatcagcgtggcattagcgagcatcctagtggaggagtagggttggacacccttcacattggattctacaaaaccatttggcacatactcggggccag

SEQ ID NO: 24905 - DNA, 1733 bp, Mus musculus
ggccggcgcgcaaccggggcaagctgtgggagatggacaatatgctgatccagatcaagacgcaggtcgaggcctccgaggagagcgccctcaaccacctgcagggcgcgggcggcgccgagccccgcggcccccgggcggagaaggccgacgagaaggcgcaggagatggcgaagatggccgagatgctggtgcagctcgtgcggcggatagagaagagcgagtcttcgtgaggagccggccgcggtttccagccaatggattctggttgagtaatggcgattggctgacatgacaccctggagaagctgaaaccagagagccttttgttttccttttttttttctccttcttttttttttttcttttcttttcccctctgtcttccctctgtttctcactgacactacgtttctgctatggtctgcggttggcgacctcgatatgagtttttgattattcagtggttccttttttttgtttgtttgggggaaataactttgatttggaaaatgcgctcacatacgggaattagggcctagattgtaagccctgtggcagttgaataacgttcattcctggcctttggttgttgttcctaaattttgaggtgctttgctctttcttgggtgacctgatagctccctgaactttggatctctgtgacacttgagactcggagttgaagctcaccgcctctgaaagttctgaaggagctgtgttaattctcgaagactccatgcagcaatggcagaagagaccagacttcatctgggacagtggatgggccttacatggctaggactgatgacctgggagaagggtcggaggatagtattgtttctattgggggactttaatttctgtgtgagaccaaaggaggagagatgtattttgtgcaaaatttaaattttatgtgctacactatctattgtaacctgcctggtgagtttgttgggacagcctaactcatttctaaaagaaatggaacctcggatgggagaagaggtcttgttagtctgtacaagttggtatccccatatattcgaggagatcctggccataaaatgaaagatccttgcaataccctgtgtggcctaggaaggaaaacctgcaatggacccaaaacttaaaagaagaggcgtcttaaaggttcatatgtagtcgagctataaatgtatgagtggcagacctgataagtgtttgaggtcaaaacccttaccatgttgtaaacaaaatcttacatgttaataaaagtattcgtttgcttgaaaaaaaaaaaaaaaagaacaacccagttagctgtggatggccagtatggacacctctcaggccactgctgcaaacctaatggtctctgtcatcacccacctcttccatgaccacagagcccttaaaacttgcaagtcttagccaggtggcagtggcacactcctttaatcctagcactcaggagacagagacaggcagatctctgagttcatggccagcttggtctaaagagttccagaacagttggggttacatagagaaaccctgcttttaaaaaaacctaagacagcctggcagtggtggcgcacgtctttaatcccagcacttgggaggcagaggcaggcagatttctgagttcgaggccagcctggtctacaaagtgagttccaggacagccagggctacacagagaaaccctgtctcgaaaaacaaacaaaaaaaaccaaaaaaacacaaaaaac

SEQ ID NO: 24906 - DNA, 1153 bp, Mus musculus
ctcacggccttgcttccttctgagctggagatacagcagatggaagagaccgactcctcggagcaggaggagcaaacagatacagagaacaacgctcttcatatcagcacggtgggtcctccccttctgcctgcctcacagcaatcccaaaacagcctgtcccacatcctgcccctgcccctaggaactgaacagggccttccccaggtctctggctggctgttacaagcttgcatgatgggctgtgtgtccagtctccatcatgagacacacctcctggggagtcacacattcagcagatggtgaacgagcactgtaaggtccagaccctggtcctggtctgaggaactagtgtggagcaagacagataaagccccgccttcaggaactaaagagactagagatggagctgtggaggtggtgggggattacaggtgacatttgggtaaagacctgaagagactaacgcctgccctgctcatctctggagtttccaggcaggggacagagcacatgcagggccagcctgaggtagagggagctaactcctggtacctccttctgtgttagactgcagactcacacttccatactacaaagtacaataaaagactgttactggcacttgttactattctggtagcctgcaaaatgtaatcgtgttagaatcctggtcctgcctctgcctgctctgtgctgggattataacccagtcacatctcactctgaccagtttaaactgcccccttgtgtcctgatgtgaggtgtctctcacgcccttgagcgtaaggagcgaggtgtttagagccagtgctgttctgttctgttctcttctgtcgtgtgaactggctctcgtgcaggcagcctagaagtttaaccttttcctctcttatgagaaatcttagcaatcatgtactcagtaaacatgggttggcagtgagcatgtgtctgcccgggatacagcagtgaccccagtatataaaacctctgcccccccttgaaaaaccttaaaaaaaaaacaaacaaaacaagcaaaaacaaaaaacccctctgctcccgagagcctgtgaaatcatcccttacacgtaactcaagacgaaacggttcgcggtgaggatggagcctttgcttccgataacagcacacccaggga

SEQ ID NO: 24907 - DNA, 1164 bp, Mus musculus
tctccagatctctttcccaccaccacgtgcagccccagcctccaaggctggagagcgagctcttctgggggcagctgcttcccttctgccctcgcaggcaggaaggagagtgcggcaagaaacagcagctgacaatgtggcaacaagggtcgtggcgatgagggtggccaacgccaccggggcagaggctccagggcgggggcaaacgcaagatgggcacaaggattgtctgagctgcaggcagctgatagactcctcagctgcttccccgccttctctcatgcttggtgtggccatcattcccggggctgtcttctcattccctcccctgatgtcacccctagctctgactctctcttcctctttatggccagtttcctttcctcggcctctcctctgctctcttcctggaccctggggaagtcattcatatctcttttccagctgtacctgtgacattcctatctccataataatagcatctattattagcaagcacctactgtgtgacggatttttgtctctgactactttgcagtttgaactctgtttgttgacttaccctcgagattgggtctcacagcccagactggcctcaagttccctgtatagccttgaaacttctttacagtctttttgctgtcccctcccaagtgctcagaccaccacatttatgactggcattacaacttcgtttgtgcggtgctggggattgaacccagggctttgtgcatgctggatatgcactctaccaactaagctataccgccagccagcaatgtgtgctctatattctccttgcaaacccatgcacagtcactaccagatctgttttacaagggagaggacttggtttggagatgctaagacatctatctgctcagtgtgactggccagcagtctgaagctcacctcttctcaccagcgtttcctccccccccccccccggggggggggggggacccagttccaggtagttttctgagcacgtcagagccttttctcaaacagaagagaaaccatttgagaaatggtcggtttgaggggtgtgttgtgattttgtattagattcacgtttagtcgccctttgacataaaccagggactggggttgagatgccgtattctgtacttggaaggttgttctctaaccttcagagagcag

SEQ ID NO: 24908 - DNA, 1476 bp, Mus musculus
ctcagggaagctgctcagacagcccccagcccagtgcccaaagccccccggggctctagcagccaggggcccagtcagaccagcactcccacagatgtcacagccattcacctgtagcttgagacaggccctctcaggccaccaagcagaggaggggcccctgccaccccctccctgcctctagaacaatccatgctatatctgaagcccgaggggggctctccttccccctcacaaagcccaaggggccaggtcctgcctatccccacagtgtgcactaaggggttgcatggtcatgaggggcgtcttcatggccagtcagctcctcttccttcccactcaaccagcttggctgtcctgggccatgatggtcagagaaatacaaacaggtaaaatccacacaccagcatttcttttgagtccctcttctgtccggggctccaaccttctcagttgccaaaacgccccagtaccttccaaaggtgttggcccttgcaggctccttcgggcatcccgatagaagcttatgaggagctgccctagatggcctctgtgtaatccgtactccagctgctcttagagggaacagcctaggctttggccagagcaagaacccatacactgttgctttgcttgctgcttagcttctgtgattgtggggtcttaagggtgccgtggtcattttaatttattgctttgaatacaactgtaagagggtacagtgaggcctgtaccccacaagtggtggtaaccctggcggttgctctttccctcccttcttcccctctgctactgctttgtggcccaggagctgctacagcctgggatgggggtcacgccttcctctcctcacccctccacctcatcttcatcagagcagggttaggttgggatggatcgatgccgtggaggtgacagagctatctggagagagggcaagccctagggtcacaggtctttcctcgggccacaaggtttgggctggtggcccatttctatcatgctgccttaataaagatttcggaataaaggtggctcttgtgatccctggggttgtgggagctggggggcaccaggcagctgtcttaggcagagcacttttcctgggaagggttagaaaggtgccgcctaggcagcatggcctgctttccttgtggacgaattacagcgctaaggagcagccagcattacccagagggctcatcgggagacagggctggacccttacacagaaccctaagattcatacgacatcaggcatggtgcttccttagcacactcagggcagacagaggaagagggctagcctgtgctacatagtgcagaactttggctcagcgacagcactggctactcctgagagcctggactcaattcccagcagttaaccattttaaactccagtctcagggatctgatgctgaggcacaaagctcagaatgtattaaaaaaacaaaaccggatgaatggggttag

SEQ ID NO: 24909 - DNA, 2655 bp, Mus musculus
tgatctgtagttaaacacagggattgcttgctctccgagccagaggcagaggtgtgggtggggcagatggatggagatggtagaaactctcaggagcatagtaatcaacaggtgagcagcctgtggtggcccccttgggaacactgaagtaaggctcagtgtaagaagaggactcccataggtgtggcctaattcctgtgactccaccttcccttccagtgcggccatgctgaagatcgcagaaatggaatacagcggtgccaacagcatcttcctgcgcctgctgctggataagaagtacgcattgccctaccgcgtgctcgacgctctggtcttccactttctggccttccggacggaaaagcgccagctgcctgtcctctggcaccagtgcctgctgacactagcgcagcgctataaggctgacctggccacagagcagaaggaggccctcctggagctgcttcggctgcagccccacccgcagctgtcccctgagatcaggcgtgagcttcagagcgctgtccccagagacgtggaggatggtggtgtcaccatggaatgagaacagtcacctgtgttggcccagggggcgcaggaccaccccaggaccccagctggtatagttaaagacctaggtcaagacactgaagggctactatggctgccgtggcctaatcctgggcagggaggactgcatctggttggctttctctgccattttaggctttggtccctgctcacttctggaagctaaccggagttacctcagttcggttcagcgaccccacaacccacctggcagttggtataaggtctgctctctccagatactgtgtaagctcgctggggtgcggagaaaacaggcatttatttatcgcagctcttgtgttttggtccctggaggtccctgcctctctcccctgtcacccacgggagaggtgggagtcactgctggctcctccctgtccccagctcagaagagcgggttcttacttcccacagaaacctcaccccaccttattcttcaaagttgtgtctctagactcttgcttcctttgttcttcacaggaaatgtatgcacacgcgcccctgactcctaccatgacgtacagtcagggccgactctagggatgccagattctgctgccatgttggaaaggtgtctgttggaaaagtggcagtggttcactgtcagggaagactatattgcaggcccttgctaggggacagtgacacaacagaatcaggaaaaaatgggatttcttcctagctatcaagcaaccagagctttaggctggctgagacgccaggtcaggttcctgtgtctgcataactaatgagcaaagaatactgtctggtttggttttggttttggttttggttttttaagacagggtttccctgtgtatccctgcctgtcctggaactcactctgtagaccaggctgaccttgaacttggccacccacctgcctgatggttcaactttttgagggctaggcttacaatctttgtattattttaatggcctgagaaaatctgtatgaaattttagtagcagccaaccatggatctgtaagtttgaggccagccactgctgtgaaacactacctcaccaaaaacaacaacaaaaacccttagaccattgcatcacagctgactgacttgaagtcaccttgctgtatcacgttcacttttgaaaacgtgtgtctataacaatccagtttgtatatctgagaaggtttggtctgttgagttcatatttgcttacacagtagatcatcttgtaaacattagggaaaagcaaagagaacaaacctagcccaacccaaccaaattactccctgagctcactcaagctctccctcccttcctccctccctcttcctctcctctcctctcccatgcagggctgctcctttgcagcaccactgaggaagggcctgcctccctgctaggggaagtgcttccagccacaccctaaccccattcatccggttttgtttttttaatacattctgagctttgtgcctcagcatcagatccctgagactggagtttaaaatggttaactgctgggaattgagtccaggctctcaggagtagccagtgctgtcgctgagccaaagttctgcactatgtagcacaggctagccctcttcctctgtctgccctgagtgtgctaaggaagcaccatgcctgatgtcgtatgaatcttagggttctgtgtaagggtccagccctgtctcccgatgagccctctgggtaatgctggctgctccttagcgctgtaattcgtccacaaggaaagcaggccatgctgcctaggcggcacctttctaacccttcccaggaaaagtgctctgcctaagacagctgcctggtgccccccagctcccacaaccccagggatcacaagagccacctttattccgaaatctttattaaggcagcatgatagaaatgggccaccagcccaaaccttgtggcccgaggaaagacctgtgaccctagggcttgccctctctccagatagctctgtcacctccacggcatcgatccatcccaacctaaccctgctctgatgaagatgaggtggaggggtgaggagaggaaggcgtgacccccatcccaggctgtagcagctcctggg

SEQ ID NO: 24910 - DNA, 1199 bp, Mus musculus
tttgtggtttttcgagacagggtttctctgtatagccctggctgtcctggaattcactctgtagatcaggctggcctcgaactcagaaattcacctgcctctgcctcccaagtgctgggattaaaggcgtgcgccaccacgcccggcataggatggaactcactttgtagatcaggctggcctcgaactcagaaatctgcctgtctctgcctcccaagtgctgggattaaaggcgtgcgccaccacgccctgtgctagagttcatgttatgaataccatcttttctcctaccctgttgttcagaaatacttctccatcctctttcaagtcgtgtttttcctttcattttatgctgaagtcttagatttctggtttttcaggtaatcactctttaaagttttattttgtattagttagatttttatgagataaggttctgggtagctcaggctagctttgaacttgccttgtagctgaagatgaccttgagtttctgatgctcctgctccactccacctctgtagtgctaagatagcagtaccatattcagtttacctgatgctgggggtagaacccaggtccttatgcgtgctaggcagagactgtcattaccagactctattttgtgtgtgtttgtgtgttatgcatgtgcatggctgtttttgccacaacatgggtatgaagtttatagactccagctctctggagtctcagctctcttttccccatgggcctcccagagatcagattcaggcttagcagcaggcacctttacctgctaaacttgcccatattagctgtgcatgggtggtttgtggtttgttttgatcgagggtggaagagcctgtgcatgcccacaccggtgaaggctagcaaaggacactggatgctttccatcgcttgtttcttctatggctctctgcttgattgccttgagacagtgcctctcactgagctggaaacgtgctattttggatatctgactgccagtgaactcttagggtccacctgcctctgctccccaatgctggaatcacaaacgtgtgtgtgtgtgtgtgtgtgtgtgtgtgtgtgtgtgtggccttccagactttacctgggttgtggggattaggatttaggtccttgctgagttatcgtctcaggccccgcttccatttttaaaagtagacttgtatatttattttcctatactttta

SEQ ID NO: 24911 - DNA, 1241 bp, Mus musculus
aggcccacgtgctggactcggtcctgggcccctggcccagctggttcccagctgtagcttgtgttccggggctttggacttccctcctgagcccatcacagctggtttttacttcatgctttaactggatttggctggtcctcaagaatggtaactgtggagaatggaaaagctgtagggcaaaaggtaggacagggttgtcgctgttggcactggagctgtgtgtgtcccaggtgctgagggtttgttatcggctggacgcctgtgctgtatggggctccccttcgcttgaggatgcggctggcctctcctggagatggttaggtggcaggactggattgttggctgctagagtgtcgctttcattctttggacactgatgtcttctcatactgttttaaattctgtgaccctgtaggccaggccgctgtagcagaaccaaaagcagaggactcttactgcacagtttatttttcattaatagttcacaggcattcagttcccagggcaacatgaactccacagcgttaccaggaacttggcttcctatgtcttactgttccttatatcatactgtcccaaaatgctttccttcctacaggatgctcagtagctctgcacccacagtccactgaggagagcgagattgagagggatggttttcagagttgctcaaagcactgtggacacatgttcctgacactcaacactcaggtttttcagggtgcctcctaggttgtcttatcttgcttgagccttgaattcactgacactattacttacctgcctcacctactacagagacatttaacacaaagacaggctcgggaaagctgttaatctacaaagtgtaggctgtcagttaggatcctgtcctcagagcacagctaggcagacttgccagcgcatctgggtagtggctctgaggtactggtcattcttgtctcctagctttagctggcaggacagctcatcacgccttcctgctgtggctcagttatccggttgctcctgttgcttcctcttgctttggttgttagtcatttactgttgttccgtaaacctgaggtgttttacatatcgtaataaagttttaccagcattagcgttttggccttctggtctgtatttggtcttgttgcagtctgtctactctgctttgtactggctgcctgaaaacgcagacgttaatttaattaagtggtaaatgtggactctcagctcctctcagcttctaaaga

SEQ ID NO: 24912 - DNA, 3663 bp, Mus musculus
taaggctgcccctaaggtcccgcccacctgtgtggcatgaagcttcgttcttgcccctagaacatcagtgcccacaggcttcaggagcttttactgccctagtgtgtgagcagtgcttagggactgactggatcgtttgcttgtggcccttgcctgctgtatcccagcgctgtttatccacctctgctgctttgtccgtgaggaatagagcaagactcgtctgttactctggtattagtgaaaacacatctctaaaattgactccatctctatgggattcaggtgctcagagccttcctccctatcaggcacagtaagcttctttctctttgcagtggctactgcagtgccccacagcctcccgtgaatgctctcttttggttaagtagctcgggttaacgtttgagctcaggcagagcagttatcactcaatggggggaggcaacggaggcatggccacacttcaggcacatctgtggtatttactgctgttctcctttgaggtgagctctcagtgggcctgccagacatcagacatggaagaaatcagagtggctcatcctgatagggacgacgtgctggattcaaacaacactgtgaggtttctgtagtatttagcttttctttggaagcgataccgtaaggcatttttgtgctgtttggtttttactgtctgtggcaggcttttctgtgagctttgctcaggctcctcctctcctggacactgttgtcaggtgtcccagttgcccacactgcctgaggctctgacgtaaagctgtaccccttcagggaggccgacattactagcacagcatgacggtgatgatttgttaccactgtaggaaagcccattcaaaaagaaagccatgtgtgctggaacactcctgtaaggccagcacttgtcaggctgaggcaggaggatcatgagtttgaagctacactgtgaggccctgtttgaaaaacaaaactagcaaactagtgaaaaggactggattgcacctcacctgaaaccctgtgttgtttattccagaaagagaatttgcaggcagagaatacagatctgcctgtctagaggggaaacacattaatcactataaacacctacaggaacattaaaggattcttacccaacttttaagaagagttttatagcagctatcagcaggactggtaagcagattagggacctaataaaaaaaatgcttaactgacctgaacacctacatatgagattagtaaaattacttagtcagaagtgaaaccaactgtccccactgagccacccacatgaaggtgccactgcaaccacagatgacacctcagctccaggagcagcagctcgagttaggggtgtggtgcttaaggagagctctgctgcagaagggcagggcagggcagggcagggcagggctgctgcggtactacatagccaaagcagagcgctgtgtcagatgcatcacagtgaaacatcctaaaaacaaaggacagacagacagaccctgactagctgactccaggacatacccccagtgctgctctcccggctgcagtctcctgaacgctgtgattggctggtgtgtttacttactgctgtaaccagccaagatgaattcaccccagccctcaaaaatgacttcttacctcagtctagcctggccctcatgcttgtggtcgcctctaagagcagcacccattactagtgcaaaaccagcagggctagccttggcaccaggaactgtagctctcatcccatggcaggcagagctcttgccagctttaacccagcccctctggctgagatgggagggcaatgccacatagtgaagaacttttagatgtctcttaaaacgtcaagaataagactggaaactgtagaagagttaatgtgtcctatggactcaatagcagagtttatttttgttcacagtggcaaggcctctcgagtccatgattgtatgaggtccctgctctggctatgccttcagctccatccacattcaggggacgaaccaatgaggtggactggccggcagtgcccgagtaagccgagaggtccatggtgaagaatgaaaactttgggggcggggggtgggaggatatctgatatttgttttactgataaagctttgtgaactaattttctacaattcataaaatttggtgccttgtacttgattgtggtttgcatgagagttaaggggagggctccttttcgttatgggtctgtagtgtttaaaggatacgtgctatcagatttttagagcattcctttctttgtcttattacgaatgtaaattgttcttaccagcaagttctagagttttactgtccaaactgtatttgtaatcaatcattcatcaaatgtctgactactaccactgttgttcactgccttttgttcatgcctaacatttatgctggccttttctggagggtgaccctttcttgaatgtctatcacatcctatatggcgttgcagcttatgtgagcaagggtttccggttagttgggagagcacaaatgatgagaaaaggctttctctaaatcacgatgaagctaggtgaccaatggcagtagagtctgcgttaacactggggtccttctgcatgaaccatcaggaagcagtgtcaaaacaatgcgcacatgtgaaccttcagactgtaagacaagccactgtgtactatgcagtgaatcatggagaaatgacccgtctccaccatcctcaacacttctcgggcagatgacaacctggacagtgctgactggctgaggaaggtagtgagactcaagtgtgttcgtcagggccagtcccagccagttctttcactccaagcttgaagtttctgttgaacttgtgagacttcaccaagtgttcatgaatttaccatgcaaagcatacgcggtaactgggtccctcgcttcgttcctagagtaattaggtgaagagttttatctttggggtgaaattttctagggtcacttgattttttgtcagctaagtgtgggtctcacaggtgggtcatttttgtcaatactaaagctgaaaagcaccttctcagaactgtgagcttcgcctctcttctacattcctctgctctccatccagtctgtcactgtaactatgatgtaccgtcaacccatgctccactctacaccaaggctcagtagctatgagtcaggggggtcactttgtgagacctgcccatgcttaagttggcatctttcacttaaaaatacaactagcagctggggaaatgctcattgctagagcacttagcactcgaggccctgggtttcacccagctccactaagccagcttaaatgaaactgcccaaccagcatcatggcgtcaaagaacaacagtaaagttacttggaattaaatcttaggttctgaatgaagcttcagttaagctctgaaagctgtcatgtcttaagtttttgtctcatctggcttttaacttaaatcttgtcattaactgctcaattatgggatcatggcacactttaaggttttattcctccagaaatcagttgctctttcctagtgtagccaaaatcatgtgggttctaagtctcacacactgtttacaaggctgcttcctggtcaccttttggggctctgcaagtaatggcttcaaacccaagctttgtcctcgagtt

SEQ ID NO: 24913 - DNA, 1134 bp, Mus musculus
gccaccctgaggctggctcaacctcctactttctcatagaccttattaaacactgatggcacacctgtcacccctgaactgtcctatgaccaggcaggctttgccagggagcaccaggaaacctcaccgacacaggggccattttagcctttctgtctctcacagggaatacaatgagcagggctgtgtggtctgacttagcagccatcaagaacagatcatgggaacctccacaccaatgtgagcagcgatggcgcgccagccagccaggagaagtgtattttgtatgtgatccaggccagtacacggaaggaagcaaaaagctccagactgctgtttctatggcaacccaacgtcttcctgtctgcttcccaaccatcagttgacccaaggcgcaggcctctgcagctccagcttgagtcacccaactggccctgcccaggactgatccatcctcaggaatggttctgacgacagaagactgtccaggaaggctggctcaccccagctctcccgtacctgctccttagctcgtgtgtgtatatgacagggtgactggggtggggtctctcaccagcgggctgtgggggccctcgaggcaggtccagctctggtgggtggctgctccgcgtgatgatgaccggctcctccgtcacgttgatgctgttacactgcatgaggtcctgcagcaggttgaagatgtcctctgccctcgaacacttgaatgcaaagatgcctggggaaggtgaggaagcagtgagggcctccaagacccggttttcctaaggataggtgccttctggggtggggagaaaaccatgggtaggtgccccatcttcctgtacccatcactctgcctcccagctgcccccacccccaacccttcatccaggtatagccatctctactatctctgaagacaattgggtctgacctacttccagctcattcacagactattcagaccagaggcaaaggcccactgtttccacacaggttcctctcagcttgggagaggcagagcaaggcagtccagtactccttcctgcagcaggtctctaagcacttccaagtgtctgtccacaaagtggcaacacttgactgagcacctgcaactcaatggctctgaagatg

SEQ ID NO: 24914 - DNA, 1198 bp, Mus musculus
cttagttttgtgtgtgtgtctccaaggtcaaatgaaatacatctttctctgagtcatggctaaaaactttggggccatcttttagagactctctctcctgtgcaggatttatgcagtacctactgagtataagacccagcaccctagcggggctgaggtgtccatcctggaacccagagacatggcttggtgggggggtggcctcagggcccagttctccacaagctcaggcagaggacagtcgatctggaatgctggctgcgggtggggaggggagaaggaggtgcttcccggcacggtctgttggctggtcatctcggggctaaagagcctcttagagaggcagtaccttactggtggaggctacaaggctgggcctgacaggagatgtcagagcagagggttgggtgggcatcatcgggggatgctggggaaagctgtttcagtgctccaaggtagtggggtggtgctgaggattctgggttgtgatgctctcctctccctgcctgcagtatctgaggtgaaatgaggcgttcatctttccttctcttgctgtgcccctggtacctcctgaactttctcctgcctgccttctgcagctacagctggctctggtaggcctggtctacgatctgagtcctgctccaggagcccaaagcccttttatgccttaaggcctagccccagcaggtacttggaccattctgggcctcagtgtctcacttgtacagtgggcaccctaacacgtaatagccgatagcctgctagtggcaatgccggtgcctgcctcgtgattcagcacgggtgaccagaccgcaggaagtgtgggagctctgggtgggttaatgtctctcaggctgggagggctgaggaaggtcatgaggacatcaggtgcctgtctggagaatcccccttccttcccaccctgtgaccgagggcagtgggaggagcctgtgatctcagagggctggggacatccctgactttgagtagagatggtccactaaggccccagggagtgagaccaggtctggcaacccccagcctctggagcacccctgcattgagtctcctggaagccccagattgaggttcatgttgtcagggggaagggcagtgcccaaggtagttgccaatttccaggaagctgtgggtagcttccagcctgctcagcagggatcccagaagctcctgttgt

SEQ ID NO: 24915 - DNA, 1150 bp, Mus musculus
ttataggtgtgcatccccacccctggtttgtgtagtgctaggagttaagcccagagctctgtgggcatttggataagtgctgccactaagctacattccaccctccctcccatcccagtaccatgccccgctaccttcacttttaaaaacaggctcttgtatgtagcctaggctggcctgaaactcagcgacatagatcaggctggcctcaaatttttactagtcttcctgtttgacttctgcaatgctgggagcaaaagaaggtccccacactcatcttgatactgttttgggtttgttgttgtttaagacttatttattttatgtatatgagtacacgtagctgtcttcagacacactagaagagagcatcagatctcattacgggtggttgtgagccaccatgtggttgctgggaattgaactcaggacctctggaagagcagccagtgttcctgactgctgagccatctctccactccttgtgttttgtttttgtttttgtttttttcaagacaggatttctctgtgtttccctggctgtcctggaactcactctgtagaccaggttggcctcaaactctgagatccacttgcctctgcttcctgagtgctgggattaaagacgtgtgcgaccaccacgctcttttgatttttggttttgattttttttctatataattactttctccagctagtgaacatgtgtaataataataaaatctttgtagtgtgtgtatgtgtgtgcgccagtgtctaaatggaggttcagaggacaacttgtgaaagtcagttctcttcattcttgtgagttctggggatcaaactcgggtcttcaggtttggtgacaggtgcctatatccattgagccatctcgctgactccccaagtgaactggcagttgtgctgagggagcctgtcttggacatcctggtgttggggaccttggtgaaggcaaactgcttgctaatttcttttaaactgtgtaaggccgactccccctttcagtgagcttcaaaaacaaaacaaaaaacaaacaaaaaaaatgagaacaatttggatggagcatctgggctagtgctcataaacaagtcagcctcgctcacccacacctgcaggagtcacagaccattcctggtcccctcctgcc

SEQ ID NO: 24916 - DNA, 1355 bp, Mus musculus
caggctccgctgccctcggccgcccagccacagtctccgttccatcacctggacttcagccatggcctgagctttgggggtgggggcgacgaggggcccacaggttaccccgataccctggggacagagcacggctccccattccccaacctgtccaagaaggatctggacttaatgctcctagatgactccctgctccccctggcctctgaccccctcttttctaccatgtctcctgaggcctccaaggccagcagccgccggagcagcttcagcatggaggagggtgatgttctgtgacgctggctgcccctgtgccaaggagcaggggatgcctggaggctgggaggaccgagcagagccctcccatccttcaggctgcacttggtgtgaagtagccgcctaccctgcctctctccttccccttggctgctacccccaccctgtttggacttagtgcctgcctggcagctgatggggctggaggagccctccccctcggcttcgggccccctcctctggcggcagtactatgactatgatggggaagaacaggggtgaggcagaagagaaataagaagaaatcctgctaggggagcccctctcctgagcctgggctctcctgtggaggacattttggagaaggaggtacaagtacctctgaggcagcagctggtctgggggtgcccgggcctgccttcctgggactagatggcacccagcctgtcgccctcagcctgaactcccccacaagtggggcatccacccccatttggtgctaacagctctcccctggtggtatgagggtggggtggccagaagaggagtctgggttcagggtggcgagcacccccacccccagacctcccactttgtgcctttagtaaacactgtgctttgtagtatgttgtcctggctctgcggtgcgtcctcagcccatgactatgaggggcggggcgggggccgagcggggagggcagcccagtggactccttcttggattaagaattcaattgctccatgaaggatctgaaggaggttctcttggattcagaggccaaagaaacaaccttgacagcgtggggctgagagcattgtctcactgaggccacatggtggcgctgcagccatgctggtctggacccacacctccagctgtggtctgaacagcagtggaggtgggtgtgtggctggccggcgttctagcatggccctcaacattcttcccggtgttggtagctacagaccagctggagaccaggctgtatccttatggcgataggaaatggacccatttggaacagatgagagcacaggaccctggctgggagtcaaagcttagggttcactcccct

SEQ ID NO: 24917 - DNA, 1223 bp, Mus musculus
acctgtgctcccagaaagctatctgtctggagctcacagcctcagcccccacccccacccccagactcctaggggttcagtaaaggtagtgaggaccgtaagctagttgccaaagttatctgcagtgctcagtgtgtgcctgaggtacagtgtctcagcctttctaagccaccagggtccctgtgcaatcttaaaatcagaagtcaggagtgatttctgccagtgtgtttggccagtgaagatgtagaaaggaattatttaatttcattggcaacaacattttcttgagaccgggcctctatgtagtccaggctggcctgaacccccctgtatagaccaggttggcctctgcctcccaagtcctcggattgaaggcatgtaccagcacaccctatccgagacaaccctttctgagatgagacagacattgaggactttccctctcagtgtccctgtgccgggactgaggttattgttccctgggatatgagatgtgggaccatgggaagattttctacgtacgttcactggaatggaggtgaacccattcactgcatccccagaatgccgtgcgccacaacctcagcctgcacaagtgtttcgtccgtgtggagaacgtcaagggggccgtgtggactgtggatgagcgggaatatcagaaacggagaccgccaaagatgacagggtatgtgggccctagctgagtaagctgtcccagcccggcctgagccagcccagcttctgcttctcagggacaccccggatgccctcctgagaaaggaatgtgggtgtcaaggatgaaggagaccagtgtgcatggccggctacctggacataactggcaaccccaagatgggcactgccatcctccattctcacttctgactaagagaaggaatctcagggagcagggtaccagagaggtgaagcccacagtaatcatggctagagctggcatgtgagctgaggtgacagctgccatcctaaactcttcctgctataggataagaatcctggacccaccgtctttatttcacagtggaattgttgagtggagagggccagggtctgacgggaagccagcaggaaagcaggttgggtccaggaccaggcctcacatccagtttatgctctgtttcagcacacagtaggtcagaacctttccctatctcaccagcacctattttcttgcctacatacattggcgccgggctcctggctca

SEQ ID NO: 24918 - DNA, 1300 bp, Mus musculus
taaagccatccagtcagccattgcagtaggggagagcagccttctcaacctggtcctcagtcgaggcagccacagcccctgcctccctgtgggttctcaacagcatccatgccctggtggggtgccgggctgcctgatgcatagacacttggcactcaggtggctcccaagcaaagaagcttcctgttaggacttggagcaacagaccaagctgctgtcttctgacctgtgctgataagaatctgtctgcccacatgctaggttggtgtttacttcagccaagaaagtacaaaaaggatatttggactcaggataaaaggatagatggacctaaaaggtacatttctagctttgactgtggtctgctcatttctattaacagccatctgggtcatagttcatactgtggccactttagagacagtttagagagtaaagaacaaaacttcaaaacatctgtgctgaagtgttgaggacattcacagtcgttctccaacagaggcgaacctagggtattcaatcatgggctttatgacagcaagtagcaaatggaaggatctgtgcatttcaatctagagagcaagggccctgctggccctagtgctgctgtagagcgtggttctccagtggatggatagataccaggcatgactcttaggctgaagaaaccaagtcacatttacattgacaccttctggcgtgcactaaaagagaatccttatattgcctgaagaagcactgttgagctagctgtcttggctgcaggctggagcactgctggagcacagagtggaggagagagatgtgcttcatccctgcctgggtgctgacccagagggtgaatgctcttcccatggcagctgattctctggtgccagtttccacttgttttctcctttctctgtaggccttgcagcaaggtttgctcactgcatcagtgctgtagggaccaactacagcctgcaaggattcctgcagggtcaggaattgggcctcagaaatgtgttttctggacaagcactctaccactgagccacacacacatacatacacacacacacacacacacacacccttcccctgccccagccccagccccaaccccagccccagccaatgctgaggtctggaagaaaagaccaatgttgatacatcaaaagagttggctgccttctctgcaatcaaagtcaaacgcagtcaatccaaagactaaaatacccgtcaagtctagagactggccctttgactttgttctgtgttaaagataggaaagactttaaccttataaagaaatatcgca

SEQ ID NO: 24919 - DNA, 1125 bp, Mus musculus
atgttagtgcaggagggggggtggggtgggcagagatgatggataaccagaaaagtaagtggttttaaatttgtgtcgactttggggactgaggcaatggctcggtgttccctatttgctatgcaagtgtgaagacctaagtttgggtccatagaagtcatttaaaaatatgtaggtttatcctataatcccagcactagggggcagaaacaggaagaacctgtggctagctggctgtccctgtggctagctggctgtccctgtggctagctggctgtccctgtggctagctggctgtccctgtggccgggagctctaggagactgtctcaaaacaaggtagcaagcagtagaagatggcatccagtgtcagcttctggcttccactttgacaccaagaactgcacagccttccagggcactgcaacaacacagttgttgttgatcttacttagatctagattgcactgaagagaaatagaagtgaaggggacttctcatgagccgcctcatgttaggagaactcaaacagttctttctcttactctgcagtaaggctcctgttaacatttcctaacaccgcacaaaaaaccattggtgcagcaaagggaatttatggagacttgagagagtgtgaatataggccataaagttttgggacagccctgaggttgggctgatggttctgatggagaatggtggagagctcgccaccatacacatctaggacacagtaactgcacaggtagttgatgctgttggaattgacttctgctgggactaaggagagtgtcagtctgttctgttacaaatcgttccttcaagcagagacacgctctacaagggagtttgggatttgtcctgttacgcctcggtccaaagcagcttctgtctgggcctctgaaggctttcttgagttttcacactggggttcaaagtgtggctgagcattcgtatcggcttcctttctagagtgtctgttgatgcggaagactgaaaattggacattctatttacatacagtagctgtctgatttcagggtttcactgctcctgataattaaaacaactatgcaaatatttatggtgcagttcgaagaactctaccttgatcacaaactagcta

SEQ ID NO: 24920 - DNA, 1300 bp, Mus musculus
cctaactctctattattttaagtatgttttaaacatatggacattttcctgcccactcaagtcagttttcattgaaagagtaactaggctagtgacctcgtatcaaagagtgaaataattagaaagtacttaaaaataattggaaagcaaagagatacgatggtcgcccaagaactgtcttgagtgacttcacaacaagaatcgacctggagatttttcatcgtggcttcctgtgggtgagaacctgggaaactgctttggttagagcccaaagggagcggggagggggcaggctcctaagcacgtccatcatagccagtggagggtgtgtgttcacgcgtcctcttaaccaaagaccaagaaaagggcgtgttttcctttgttctcaggattggatgtggtctggatcggctgcagtgggaaaatgtatctgcgattctcgaagaggtgtttgagtcaacagacatcaaaattactgtgtacacactctgaacagatgaagatcttggatgagcccgtggtcttttgtgtcatctacgaagctgtgggactaagcagctgtaggacctcagaatgggcaaggacagtctgtgagagggagtctctcctaggccagatgtgggtttctgtactccaagaggatagggagggcactgcacccaagcaggaggtgaggtctgtcactaggcaggaaaccatgtaggtaagtgtaggacctgctttgcttagccactactggatttgtttggctggccactgggtggcagcataggttctaattttcttttgaagagaaattgtgggaagggtaaacttttgagatttttttttttaaaacaattttatgtttgtgcactttgtgttaatctcaccaaaaatcatcataggaaaggattatggtttttagttatgacatcacaatgtgtcaagagtggaacaataaacgtttcccttgtgttcactgaggtttgcacacatgaacgtctgtgttctggatcttggggacaggctaaacttgagactcaattttgaagagccagagttccctggggagaacaagaaggtaagaggaggtatggacaaggactgtccgcctggttacaaggtgcggttagagtgcttgtggggctctttactgtctgctgtggagttgatgtgattggacatgcctggacttaatcaggaggccagcaaaggaacactgaagactcagaggcaagagcgggttccaggtcctagaagattgtgacatgcaactaactgggctctcacgagcactacagtaattattggtccctct

SEQ ID NO: 24921 - DNA, 1118 bp, Mus musculus
tagggtgactaatagtgctcctctttgaagggtgcgtgtgaggccaaacaatgactccctggaataaactatgagctcagcaaccaacatttgggaagagaatttagcccgtaagaggagaaaggtttttagacttgatgcaggtagagcgggcttgggacagtaggggtacacctttgagcaacgatttctgcatggtgtggagaacccagtgatctaagccctaggtaaggaataatggaggctctgtgtaaggcttccagtgtaaccaagatggctcctgcatgcttttgttcttggaaaggtgacttgagtgtgtagaggtacaatggagtgctttcaaagtgagggttcttaaaaaatagttgtcctgggctgaagaagtggcactgttaagagcacatgctatttacacacacacacacacacacacacacacacacacacacacacacacacacacactgaaaaagctatctttccttttttcaattgttgatccctgtaggaatatgtaagagaagagacccttgccctttggtccccacccagggacctggtctctactgccagaaacctgcagatagacctcatatagtagagtgcttacaaagattataggaaggcccaggctcaatgtccagtaccatatgaactggatgtggtatatctctcctggagtcccagcactcctgagctggaagcagaccggtcaaaggttaaaaccatctttgcctccataacaaatctgcagcagcctgagctgtataaagccatgttttcaaaacaaaacaaaacaacaacaacaacaacaacaacaacaacaacaaaacccacaaaacccaggagctattgaactagctcagtgggtcaagcacttgccaccaagcctggtggtttatgatccccttaacgttcatggtagaaggaccttcacatgttttgtgaccttgaacaaaagttcccttctggcaaagtctgatcaactgctgctctgaggctcccaaaatcgtaacatacagcactgaccccacagaagtcaccaacagacacggtgagttcagctctgcatgtggatcaggcatgagagtcaccagcaccaggaacagggaggacta

SEQ ID NO: 24922 - DNA, 1164 bp, Mus musculus
tccggggtgactgtttcctcaactgcggatgggaaatagaggtttcagcttccagcttctgtaatccaggaagactggctagaaaagtgagggtgtgggttctaaccagagccatccactctctctgccacagtgagcggaaacaaagggtatcactgctaatcttatgagactattgaattgcttaatcacccccaccaagtagttctgtctgactgagggcaggtgtcctgatggaggggcaactgtgaggccttagcagccagtatctggggaatagctgccgggattcgtaaaggccttaacaagagtgatttcttcagtgatgtgggccagcccaggagctaatgataacggtgtgcatttttgcttctttatcatttcttaggggccggagtcacacacccattgcatgtgtaactcacaccacaggcttggagagcagggctaatctggtctccagactcaatcataggtttcagctggcttctaaattgctaggcctcctcatttctagtcagagaagtcaagacttgtgacatttaaacttactgacaaaatgcacatgccctgcctggggttagctttgtagaagactggacgttaaacaacaaatgactaaagagttggcgggttgggtatcacagtctccccaccccatgacaccctagcacaccgcctggagaactgcccttcctgggtaccaacatgtgatgactccggcaccaggaatggatgtggccctcacatctgccggctttttcctcccttcctctccccctccctctccttccctgtcccttctcctcctgtcttcccttgtctgtccagcatcctcatccctcctgcctcctgcccatttccctcccttgccaacccatcgtttctgttcctctattcttccctaaaggatgcgttaagtttttgcccttgctcaaataaacaccctcccccaggcaacagccggtctcctcggcttttgagtttctcgtgtcttgctgtcttcgctctgtctgctctccagcaggaaaataaaattgcattcgattgacaggccatcctgctgggagccgagccatattacacggcttctgtgtgttcctggttgtgatgaaatggtggaaaatctccagcaagcctggaacaagataggtgctggtaatt

SEQ ID NO: 24923 - DNA, 1099 bp, Mus musculus
acagtatgtttaatagttacagatctacctagacataaaccaccgtacgttttacttcctttaagtggcttattatctattttagaggacataaggcaagccaatacaattattctcctaaaaatgtttttattatctttattactgagtgtatgcgtatgggcacacacatatcatgctgtgtgttggggagcaaaggacaacttgtgggagtcagttcttttcctcccaccacatgggtcccggggattgaacttgtgtctttgggcttggcaggaagcacctttatctgctgagtcattgaccacagttaattgatttctgtattcttgagaccaggccacatggtgtagccttgcttggtctgtaactcattatgtagactaggctggcttccagagatatacgtgcctttgcctctttagtgctggggttaaaggcaggcaacaccatgcccaacccaatacaattattttaaaactttgtttataaacttgtcataggccagctgtggtggcgcacgccggtaggatttgctggaggaggcagaggcagaggcagaggcagaggcagaggcagaggcagaggcagaggcagaggcgcagggggatcacaaacttgtcacaagcccctgctgtgtgccagttcatcctggaaagggcccaggcctgggtagtattgaagctgtaagggatgcagctggggctgggagttgagcaggtaggcctgtgtcaccatatgagtggacagcctaacagatgatgctccaatggttgtgtgggtcacagtgtgcagaattctctccacaacccccagggctgcttgagcctcctgcagttgtctctgttcccactctttcccccagaccactgtatgcgcggtaggctggggatttctagtgcagagcgagtgctgtgaaagtggaagttcaccctcccttgcaaggagcaccgcccagaggtaggctttcaggaagccccccagaaaggaggcagcttctgctgaattggagggagggtggttccagatctgccttgtgctggacagagccgggatgggagcattggggcacagggtcgggggaaagctgtgcgctctg

SEQ ID NO: 24924 - DNA, 1125 bp, Mus musculus
ctggaccttggtagcctcaggaggaggaagtggccaaataagggaatagaccttggtgactagctttctaaatgtaatcttaacagtattttttagcaaggtcgaaaaataggggagaggggaaaggtctggcagaaccatgtttgtcagcccaggactgactggctggagtctctttacatgggaactgctatgctcagcttacttccttctgtcctataacattcattcgtctcagctcttttgagcatatttaaaagagttgaaggatctgtttaccaagtcctaaagtgggctttctcaaatacacacacacacacacacacacacacacacacacacacacacacacactttttttttaatcagctgcctcttttactggatatggcatgcaatttaaagctttaaatttaagtattttgatgtcgaaattctgtacatcagatttcttccacgcctcaggtatgtggctgcttttgtttggtgatttttgttgtgctagttcttgtactgttttctgcctatggctgtggaatctgtggtctgcaatttccttcaaacacacagctctcagtctttgcatttggactctgtgttggatgctatttacttcctgtttgtaaagtgcctcaaggcgcattagaggtaagttgaaggttttctggaatctctactgggcccatagtcagccccagggtgataacttccttacaacctaaagccaagttatttgtctgtcaggcaggggcatggaaaataggtttcccccagctgtttacagtggtggcacagtgggtactttgccagcattgattaattggaggtagtttttagaagtaactttataatcatgaaagcaagggtttttattgactagtagaatacacctctaaggaagaaattcagattttattcaattatattttatttgcatgggatttacatttatagaatatgagttttaaattattaaatatgaaacctaggtcaaggttaacagatggccatgttagtttctctaatcatttttgtacacattcttaactggtttcagttgtaaatgggagctttattgttcgatttctttatcactcctattcagtgtgtttttaaaattgagat

SEQ ID NO: 24925 - DNA, 1117 bp, Mus musculus
agagctacagtggcctgttaaatgaggagcacagaggaaaaccacattcgcacaacccggagtcagacctcctgggaattagacctggagttccttctgtgggagcaggtttcctgtagagcgttccaggtaccacaagatacagggctcctattcaacccccaacaccctattcttggagctcagctgtaaactctgcatccagacactccaaggatgggcctgcctgcctcggggcccctgcctgggctgggtatacatgagacatctccccgtctattggccgagtacagagctgtattgggcacaaagctagggacagtggaaatggtggatagatgtagcatctgttagatgtcacctctgccttctgtcctcctcagagagcagctgggcctctgggcagtgccccacccactaatagcattgtaattctctacagacaggaatgctaatgtcaggatgctctgcaggcttcttagctgtactgcatagcagggctggtggctcactcacatggtggcggggctcagtcatggcctcatgaattctaccccctgcctctgaccagtcttctcagcattctgaggagcctgcttgcatacatgtcccatgaagctgctctgtaagaatcagggccaccatccatccctgctagaaggcttccagcaagcattccacttaaagccttgacataaccgtgtcagtaccttagatctagtgtgggaagtattgactgatccatccaggtctgggacagtgccggccatgtctgtcactgctgagccctgtccccagcatctcctttgcgttgagaataaggtcaatagataactatcactggctacccaccaggccaagaagatgataggctgacccattactgtttgaatggacatttcataacccctcgacctacctgccctgcccatgcccgtgatgtgccccgctcctgtgcttgtgtgggtgccacatgagaaccccaggttcacactgagatgtttctatggtccctaggcaggccactctctccttggaagaaccaaggatggaaagctcttctctaagtgactctattcttcgttggtgaccattgcttcccttggttacctacact

SEQ ID NO: 24926 - DNA, 1177 bp, Mus musculus
atctgtagtcctagttaaatttaagtttaaatggtatatctacaattggcctctacctactacttcgaaaatactaagagattaaacgcttttaatacagcaaagagtggggattattgtttggggaagagtatttttatttttgtgggttgtttggtgctttgttttgctttttggcatttagtaagtaataaacctttgaaaagagccaacagtcacataaaactttggaaataacccaacagggagagtattataaagaagcaggtctaagtgattttaatatgaataatacaattttattttgtttatttctcagctaaaaagctgccaaagaatgaaccacagaatcctggtgcaaactcagccagaggacgaggagtagaccttactgagcctgcacagccagccagaagccagtgttgtagtaactgagctccagtgtgaacttcctgaatggcaaaaaccatggagttgggagcatttagccggcccagtgtgacttccaaaaagagactatggtagaatcaagtttctaattctgaattattttgagtgttttgaacttaatttttaataacatgcatgtgctcctccagcagtagaaaggaaaatgaggactgtgtgtacacttgttccatgtgaaagtgcaggggaacagctcatctccagtgggtatggacccactcttaacccacccagtctccaaactgggataatagtcaggaatgacatgttcaaaattactaatgtatgctttagaaaacatttttagaagacttacgcttaacaataaaacccaagcaaatggtgtaatttgattttcttaaaaagtctacatttcacatattaataaagcaatcccaacaaaacagtcttgcatctccagaaagaaggaatgaatattgatgacatcttaattttattcagtcccattacttcttaaaatttgattgaaaaaattaagtcacatgtaaccccatgctgttttaggaatatgaaaccgataaatgcattttaatgatagtggtcccttcatatgagcttcttttaaaaagtggaaacaaaccaggtatctgctttctagttaatcactgttggctattccatagaggtgtgtctggaacagggagggggctctgcttccctttgggcataattagtcagtgcactaaca

SEQ ID NO: 24927 - DNA, 1236 bp, Mus musculus
cagcatacttcgaaataacaaatgagtcatgcaacccaggattgcgcgtccctgtaggaatgactacttgactcttcttccgtcggaacagttccccgggccagcatgtgtaaagggaggtgaaagccgcagcagcctcttgctagagagacaataatggaggaggagaaaaattaaagtggaaagtcacatttaaagtcacttcagagaaaaccatcgtgagttgtagaagacagctttctgaactgccagaaaacaagccaagaaatcgaggagacccaaacctcagggcggttagaccacagacctgagctcaaattctcacatggcactttccatctgtgccctccgaggcttctcacccttcccagactcgagcttcatggctgtgcactgtagatagtgacagtttttccgttcagtcaacattgttactcaggctgccaggcattgatgtagacgatgtgggggtgtagtgacagatgggtccttattcttgtagagcttgctttctggtagcagaagcagatggtgaaaaagaaaataacagaacatggtaagtgccacactgaaggaaaacagagaagttgctggtagtgcctggggaatcccttcctgtcctaccccgcagggactgtgcagagaaaaaaaaatttatttttttgttcagtgaggagtgagtatgctgggggttgaacctagtgctttaaacattttaagcaagtttcatttcaagcctgagacaggatgctacttgtgtagctcatgcttgaactcatggcaatccttctgcctcagccttgcaagtgcctggattacatacaggtgtgcctcaccatgcccaagcaagaacattctggagtcttctctcctgctcttttcctttcagccctaccccacccctagaagctgcttccgaactgactctgagttttgttctttggtggtgtaggcctcataactctagttgctccattaagaggctaagaggaatttaaggccacagaaggaatttaaggccagcctgggcatgatttagatttggtttcaaagaaaaccagtaaacagagaggcggagatgtagcttaagaggtaagatgatcctgggttccacatttagtactgccaccatcaccagaaaacggtattacacaatacactttagtgcagcagtgtttttgagattcaaacgtgtggctgcattcaccagtagccactttctgtttttcgtggagg

SEQ ID NO: 24928 - DNA, 1148 bp, Mus musculus
tctggttgcccatatatatacctcatgcctttcctttttagtttcttctctctcttccttccttccttccttccttccttccttcctttctttttctttggggccagggaattcttaacctcccaagcctaacaatgtcagaacgtatagagaaaataaaggtgttcacagagattggctggatgcttccctgtgtatgattgcaaatattacctgtttttctgaactgtgattaaaggttgcattgcttgcagtttacactatattcagttccttgggtagacttgggtttattcctttactggtaaataattttaagttaaataatatttgaggaggggagaggggatctggtggggggagggagaaagaggagggttagctgcattgagttgcattaatttacagatgtggtttcatatcttcggctctgtgagtacagtgcttaaaactgaactgggccccgtgagactaacaacactttaaatggggcttactgatagagtctcaggtataaaatgaatacttattttgaagatggacttcctcaagtgaatgtaaactagatgtaattgtcttctttatctttctattgctctgataaaacaccatgactaagccaacttaaaagaacagttttagggggctggagagatggcttagtggttaagagcaccaactgctcttccagaagtcctgagttcaattcccagcaaccacatggtggctcacaaccatctgtaaagggatctgatgccctcttctggtgtgtctgaagagatcaatggtgtcttcatgttatatttcaggttatacttcctgttctgtttagagggttagactccatgataaaggagcaaaggcagggtacaggaacagctgagagctcacaactggctttgcaaggagaaggtggagagtcttttgagacttcaagcccaccacccagtgacattcttcctctaacagcgtggcactacctaattcttcccaagccattctaccaactattcaagcgtatgaacctacgggttccgttctttttctagcatggagtatgtgacaatgtttttggagtttgagctattttaagccaaatgtatggttaaagtagcctttgtctatttcttttaccttttcatatgctt

SEQ ID NO: 24929 - DNA, 1202 bp, Mus musculus
tgtttagtgtgtgtgagtgtgtgtgtgtgagtgtgtgtgtgtgtgctacagtattttatggagtcagactgtttggagctggttcacttctaccgtgtcagacaaggagattgacctgagggtgtcagtcttggatataaatatcctcacccgctgagccagctcactgtcagcccccgtacacacgcataggtgtgaacatgctatgacacgtgggaggaggtccgaggacagcgtttacgagtctgttccttgcactgtgggttctgggtattgaacctgggtcatcaggcttgtgtggccagggtgttaacttgccgacccatcttactggctccactgttttgtttttgtatttgggaccttgctttgtagttcctgtttgcctgggatttgcatcccctcggtctcagcctgccaagggttgggatttcaggttagtgccatgatgctaggtgataacctggtttactgtgcatgatctttacggttgtctcttacacctctcgcttcctttggtcttaccctaagctgctcacgtttctcacttggagaatgtgtcagaggaagagatggacagactcctgggaattgtgttggatgtggagtacctcttcacctgcgtccacaaagaagaagatgcagataccaaacaagtgtacttctacctattcaaggtgagagcttacccttttatttatttaattaattacatttagttgcatactcgtgtgtgtgcaggcatgcacatatcgtggctcagatatggagattagagaacagcttatggaagtcatttttctctttcccacattgggttctcagggattaaatcaggttatcagctttggtagcaagcatctttccctgctaaaccatcatgttgggttcttattactgttaaaatgacttattttaattaattaattaattaattaattaatttttgtttttcaagacagggtttctctgtgtagccctggctatcctggaactcacgctgtagaccaggctggctttgaactcagaaatgcacctgcctctacttcccaagtgctgggattcaaggcgtgtgccaccagtgcctgacttacttaatttttaattatgtgtacatgtgtttgtctgtgtaggaatatgtgcacatgagtatgggtgcccacaaaggctagagaggctgttggatcccttcaagctggagt

SEQ ID NO: 24930 - DNA, 2403 bp, Mus musculus
taagagcaaatcaagagtgtagctttcttcccacatcccccttgtcagctgctgagagggaggagtcaacagtcgctaatgttgttgtttcctgtgcagatctgaaaaccatgagtgaacgcctcaggaacaggtactatgtgtctaagaagttattcatggcggacttgcaacgagtgttcaccaactgcaaggagtacaaccctcccgagagcgagtactacaaatgcgccagcatcctggagaagttcttcttcagtaaaattaaggaagcagggttgattgacaagtgatttctttcccttagacacacatcagcagtgtgcctaaaacaggtcatttaggtttttggttgcttttgtttttttgtttttgtttttaaattgtacatcatgtgttgaagagacttgtaataattagcacttttgaaaaacaaacaaaacctccttttagcttttcagagacgtatttaaatggaaatcatagattttttttttattttgagcaatagattttaatctatttactactatcatgtaatttttctctggcatgtccagtagctgactattgcatggtagatgatcaggggcttcctcaaaacctgtatgtgaggaaattgcacacagtaccaagatttggggtaatctagagaaaagtttgaccatgaatgtctccattttttttctaatggaacatgagagtttattttattctgaaggactttaaagggtccgtgacacacctgtgctgtgaatgaactgtgtgatgtttgaagtctccttgtagactttttataagtatatatttttaaaacactcatctagatgaggtgctttgagcagttctgaaaaaaaaaaatgcagcttccacaatagcggctgctatgactcctaaggaagggactttttataagctcctggggctttgatcattctgtctacctattacagacttgagagtgcacaaccactatttaataatatcttggcagatatgtgtccatctcatatttgactttgcttgtgcagggcccaacttctaaaagatccgttcccaggccacaaaggtgttagcttgaaaatatttgaggttgagttaatgttaagacatgtggcctaaacatgaacccaggggagccttgcttcactatgtaaggattctttgtattttctggtacatttaaccccatcaccagtgtctatgtgaacatttcccatttgcacttccagagttttgtttgtctgaggtgaactgaattctcaccaaagtttaggccagtattttaacacctccattgttttattggtccagggttatatcccactaacattcgctgtacaatcttattaaccatttttgtcttgggactccagcttagtgcttggatttatttcctaattacactacatagaaaagtgggacacctgccagcccaactctgggaaaaaccaactaatatacaaccatattaaatgaaggccaccttaatggtctcgacactaatttttatgatgcaaatttataaactgatttttttgtaaaggctgaggttttaaaaatgtatttaatgtatgttttctatccgcataaattatattgggtcactaatagtcattaaaaatagcttgcagaggtagtgtgcttgaaggaaaatatcctggcattgctcccgagtgctgcttctgacatggaaggcatgctgtatgttcatagtgttcactgaagatcacactgaagatgcctcaacattgggaaatgtaaggaacactttgagtggtatctagactattaatgaagagtgataatagaggctgcattaagtgtctcagactggttttaaaacagctttgtaccgatttcgctgaagcgtctgtccagtttggtatcctgtgaaagtttgttatttcctgggtagacatccttaaagagtattgtctttaaaatcagatggtctcttctatattgaaagcatttttatgttttctaatttaaaattaatattttcttatagatattgtgcaataaagcagaagtagaatgtggtttttgcaaatgctttaacggccgacaaaaactttacatttgtaaaattaatatattgtactggtacaaaatagttttaaattatattttgaaaagctctgtctggtgttatgttttatttctctaacagtctgaagttacaaagaacaatgtgtcacctggtatgagcatccattgctcttagtctttacttcttaagcttttgtgaacatgtctagacttgccacagttgtaggaaattttataaacaaaagaaaacaatgtaaagcaaaccctctttgtgttgctagagagtcgttagtccagaaggcatatggtcggttccccagcacccacatctgatgcctgtcattccag

SEQ ID NO: 24931 - DNA, 1157 bp, Mus musculus
gctgacttcaaactcgtatatttgtagtcatgtaatctcaatgtctccctccctccctcactctcttttctctctctttacttacagaaagctaagaagaggggaccctttcacggacttgtgtttcttgaattctcctattttcaagcagaaaaggggtatgagatgtcctaaaagaagaaccaagcaaacacagtaactcatttgattagctactgtttaaggtgatccttcttttttacctaataaaatattattagacagtgcacaatgggcagaacctctaccaggctctgatcaggagggtctcttggacatatactttgtatggactattatattaccaacatctaaaacttctccagcatccttattttttccttaagcaggagaattgcagagtacaaaacttgcatcgtagaaaacttacataggatgtagatctttcataaatccttaccatcacagtaagacataagtgggtgaggatcccttctgtcattgattctttctgtaaactgtgtatcgaatggtgattaagagaattaatgaattgggttctggaacaaggtaactgttgtgaactgtgagtactatgctattgctcagcagaataatagcactgtcgtggacctcaggctagccctttgtgtggtcagtctacagtgtaaataaaggtgtgaataaaggggcttctggctttgatatgtgaacaaaataaaagtatccagttcagaacattgaatctttatgtgtgtatgtatgtcttcaaacttaaatcgttgtaactggtccattgttaaaggtgaagcctatggtgaccgcattgtgttttccttttgctcttaatggtcagttactcttgattatcttcctttctggcctttaccactcccaacttagctggaacctcttctgtcttccctggttccccttttcttcccattagatttgtcctgtcaagttttcccaactgaagcctccagggccaacatcaaggcatttcaattttcattaaatcggaagaacgtttgtctcctatgggcaaggcccagggatagataaataccactcaaacaggagattttaagctatcagaagggccttctggtggtcatctcagattttacccacaactgcatggcttcctacattta

SEQ ID NO: 24932 - DNA, 1196 bp, Mus musculus
gattcacaacttctgcgtttgctgttttccctgctttctcttcctcctgctcgtccaacagctgactagttcttctactttaggtcagcatccctgtgtcatagagcgctcgactttagttgctctcaattcgttcttgtgttgccttcatagcacttttcactgtgtaaaactcagacgtgtctttttttttcattgggaggagaggcacaagtgcctcagtgtgcatgtgaacgtcagaagacacttctgggtgttgtttccttccacgctgggttccacagatccaactcgtcacgaggcttgcatgtcagctgactttacctgtgacctaccctgcaaaatcgttttttaaattttctctttatacactaaaatgtaagctttaagaggcagagtgtgtgtggtgtttcagctgttggaatcctagttcctgaaactacatggcagtgctgtagactgtcagcaaatgtatttgttcattcaacaatacattaataatgcagagtgcatatgcatacctcatagcagtacatacttgtgtttttgttttaatatattaacagaactggaaaggacgtccctcagacgtggtctccagcattgacaatacgaccagggacttgtcagggaagtccttacagtgagtgccaagttcattattgtttctataacactgatccatttgttaaaggaaattgacattatttgtgtccacagtttgaggcttttcctactgggagtataagtaagagaatttgatactcaaatactattgtatatagaaaattagagctgtctttttcttttgtttagttgctttaatgactaagagttagaaactttcttttaactgttttctttcagtctagtttttatgtgtgtcatattttcattttaggaaggagtcattattaaaaaggatatttttccagttctaaacactgtccaatttagcaggaagaaaataaagcaaaacacctctcattaattagttctgtttttccagattcacatgctgatctcttctctttgattgtatagattttatgttctttcttttggtttgtttttgcttttttggtttttcgagacagggtttctctgtgtagccctggctgtcctggaactcactttgttaaccaggctggcatcgaactcagaaatccacctgcctctgcctcctgagtgctggg

SEQ ID NO: 24933 - DNA, 1189 bp, Mus musculus
ctcagccctggggcccccctatcctaagactcggaaaggcccaccctgaggttctattgccttcctggtggtatcagcttccagctgtttcaacccttcccagcccgttgctggcgatgggcccatgccccctctccaggctctctagaggcaggcaggtccttggaatccccagcctgcaagcagaggctggccagctccccagctcagcacacagagacacctggcacctgctgctcatgaagaagtgcacaaggcacaaatgtgtacacttcccatgggaccacagacccagctcagctctgttgaagaccaagcacaaaggccttgaagagtggacattcccaggtccctggcaccttcccttgagccagctccattgctacttattcatgtgactgaagctgaccacaggcagctggcaggtccttttttcaaccagcaggctaggctggccatagacccagctctgcctcaccctgccatgttccagtaatggaggcctccagcctgggctctattacattcttctctacagctgccccataacccgtggcttatccctggcacgtggggccacaccccacgccccctggataggcaacactgtcctgctccagcctgtgctgaaatgaactgtactcctaatttttttttaaaaaaaagtattaaatatctctttctatatagccactgtcccatcttcattcagggaagccctgttcccccgaaaaaaccccaacaactgccatcccaccccagccacaggcttgtgctgtgggcactcagagactttattacccagcctgtcccaggacagcaaagcctatgcagcctcagctcccctgcttgagcacactgcagacctgctccagcacgtggcacatgccctggtccttcggggtcctgctggccaaggacatctgcaacagtagggctgaggtcaggctctgctccggacacgtagccctggcctcccggggctgcagcctaaggacgcacttttggtgcagcctttggtaggcaggggccactttgaagatttggggatcggggtcttggctgtgtagctcaagctaacctagcctaaaagaagactcacacacagacctcacatgcacaagcctttgggtgccggttgacatgtgtgccacacccagcatcactgtgtgtgttgagtctgagcagt

SEQ ID NO: 24934 - DNA, 1180 bp, Mus musculus
catcttagcactgggtttgcagcaataggtcccagtgtagacagtttcaccaggaattactgtccagtacagtatgttgggggtggtggtacatggtcaacatgctgacaggctgtattttgcacaggttgggtctggggacatggatggcttccaggcagacacagaagaggatgaagaggatgacacagactgtatgatcatagatgtgccagatgttgggagtgacgtgtcagaagctcccatacctgctcccacactttgcaagtgacaggtgtcaagttgaaagacctgggggaaattgacctaggtgacagggagtagtggagtgtaggcacctgaagtgcaaggttggtagtaggcatgttctgggcagtggaggctgtgcttcccctcagccttgtagagctgctgagggagatgggaatggagaccagcaacagcctgctccctgcagcatctgactagcaaccaccagagtgagcctcctgctgactctcatgataaagagcactttgtcctacattcctaggtctggagtctgggggaggcctggacagctacttccaaattgtaaagactctgggtccgtgtgctaatctgcccttcttaattgacagatgcctgcttgggccttaatcacagcacttgctgtgggcaaacatctgctatgaattgtgctagggatgatgtggctgctgtgcaggccctgggcaaatgtggacatgtataaacatactctacttgagccctctgtcttctgtctcaactatcatattacactggtgcatgtccttccacttgtcctgggcacagtccaagcctgctagggtgctggtagaaaagaaacacccagggacctcagaatgatactaaagctacagttggttggttgacttataggacagattcatactgccagcccttcaacggccatggtgctatggctctgatgaaacactgggaggctgagtttaaatagcctgtttatttggggtttataacttaggaattacagctccatgctgccagctgtctccatccacagcctgtgtgcattccacctgtgctgcactccaagatggcaccagagggctaaggctccacacaccgcaagccaggacaagcctgtcccttgcagcccacagaggaggtaggaccttgtctccaactctactgc

SEQ ID NO: 24935 - DNA, 1211 bp, Mus musculus
tgccctttgagctgagggcctccggtggacagaagctggaggagaacgaggccctggccttgaatgagtgtgggctggtgagctggggctgtgctcatgagatcatgcccttggcactgaatgggagggtccagcattttggaccaaattcccactgccagggtgtgtgtggaggtgctgtcacctttggtgggtttattacattgtcttagtgcctttgttttcattctgttagatggggaaggtacctttaaaaagccaactgaagggatctgtatggtggtgaaggtggcatggagacagggtcatcataggggtattgcatcctaggtgacattctatctgccttgcaggtaccctctgccctgttgaccttctcctgggatgcttcagtgttggaagatataagggcagcaggagctgagccagcaaaatctgtcttgaggcctgagctgcttgcagccatcgagcaactctcctgaataaatgcaggcttggcccactgtggctccagtctcatgctgttcccaaacccattcctttccctgagtccccagcaataggaaggacagtagtagcagtagagttggagacaaggtcctacctcctctgtgggctgcaagggacaggcttgtcctggcttgcggtgtgtggagccttagccctctggtgccatcttggagtgcagcacaggtggaatgcacacaggctgtggatggagacagctggcagcatggagctgtaattcctaagttataaaccccaaataaacaggctatttaaactcagcctcccagtgtttcatcagagccatagcaccatggccgttgaagggctggcagtatgaatctgtcctataagtcaaccaaccaactgtagctttagtatcattctgaggtccctgggtgtttcttttctaccagcaccctagcaggcttggactgtgcccaggacaagtggaaggacatgcaccagtgtaatatgatagttgagacagaagacagagggctcaagtagagtatgtttatacatgtccacatttgcccagggcctgcacagcagccacatcatccctagcacaattcatagcagatgtttgcccacagcaagtgctgtgattaaggcccaagcaggcatctgtcaattaagaagggcagattagcacacggacccagagtctttacaatttggaagtagctgtccaggcctcc

SEQ ID NO: 24936 - DNA, 1108 bp, Mus musculus
aagactcggagctgccgatccagagtggcccgcacaggctcggcatccaacagctgctgcttgtgccgcgccaggttctgcggctgcgcccgtgcatcctcacccagaacgtagaactcctcctggccctctgtagaggcatcacagctgtcttcgtgtcccatgtgccaccgctgccccctcccacctgcctggccgccctctcaccctgatccggcacaggtagggtgaccttcttgaagccaatggcttcaaagaactcgtggcttccctcgagacagttgatgcgctcctgaggatgaggcacacacaggtcacccaggttgcagggccaggacccagcactgctgagattgaagccaagcagctcccactggcccaacagctgatgagtggttcttggaatgacgtcccccataatggctttgtggttagagaggctacaccaagcaagcctcatgtctgcatttgtaggataaatttggagggtgtcttcccaaaagtattcaaattaaagagaggcctctcgagggagccaggtctccaaccctgagtttcagtcgtagacccaacattactgcgatcttgaaagtcaagaccctatactcaaaaaatccaaagaacagagctggtgaaatggctaggtaagtttaggtgtgacaccaaggacaccaagtgtgacggctgtgttcccggacccatgtggtggaaggagaactactactccacaggtttcctttcctccacacatgaagcggctcatgcacctacctgtaaattaaatgcatgaacgaaaagaaagatgagtgaggagctccatgcctgtatcctagcactttggaagctggtcagtactcagctgaccccccagtactgggtcagattggactatacagtgagacctggtctcaacaacaacgaaagtaagacagacaaaaatccaggcaagccgggcgtggtggctcacgcctttaatcccagcactcaggaggcagaggcaggcggatttccgagatccgagaccagcctggtctacagagttccaggacagccagagctacacagagaaaccctgtcttgaaaaaacaaaacaaacaaaaaaatccag

SEQ ID NO: 24937 - DNA, 1562 bp, Mus musculus
gctcctgtttgttccctaagtatattcccagctagtgctaattagagctgcccgtggtgggtgtcagcagtgtgtcatggtcgccacacagcagggggtgtgataggtcagccacgtgatcctcatctgcacagaagcagagagggccccaggcccctggccttactgtcctcaccttgggcctcccaagatagcctgtctgatgggagcctctctataggcctgtgaaggtggagcggacgcggaagcggtcagagggtctctcactggaaaggaagggggagaagaagaaaggtgagcactagcaatggtgttgggttgcacggctccggtgtgaacctgtgatggtgagaggggctgggccaccttatacctggggccagagccaccctgctcgagctagtatctctcctgcccagaaccctccgtagaggagagactgcaaaagctgcacagcgagatcaaatttgcactgaaggttgacaacccagtaagacacctgctgcaaccccacactgtcctgaaatgggtgcttttcctcaaccacctccttactgattccttggaagtcttgggaaactgaggcagggtcccctggatggaggagtgggtttcatagtatttcagggattgccttgcagtctcccctgggaacagcaggcagcattctaggagacagcctgggctgcctctccactcttgccttgcaggatgtgaggaagtgtctgagtgcactggaagaactggggactctgcaggtaacctctcagattcttcagaagaacacagatgtggtagcaacgctgaagaaggtatagcatgggcaaagcatctaggagatggtggtggtgtctaaggggaggtctcggggcacagccatttgcccttctaagcctggcctcctggtggccagattcgccggtacaaggccaacaaggatgtgatggcgaaggcagcagaggtctacacccggctcaagtcacgggtcctggggccgaaagttgaggctctccagaaggtgaacaaggctggagccgagaaggaacgggccgataacgagaagctagaggagcagccgggggagcaggctcccagagagctggcagaggatgagcccagcaccggtgagggctgcctgcaccaggccagagggcaggggaacagtgccatgtttgtccccagcaagcttgccagacctaacctcattctggggcagctggcacagtgtgttcaagctctactaggtgctagaaatggggtgctggaagtgttctttgggccatagcacctatatgcacttaaactgcttgtaagtttgaccccagctgagtgaggagggttctttttttttttaaaagatttatttatttattatatgtaaagtacactgtagctatcttcagacactccagaagagggtgtcagatctcgttacagatggttgtgagccaccatgtggttgctgggatttgaactctggaccttcggaagagcagtcgggtactcttaccaactgagccatctcaccagccccggtgaggagggttctaatgaaaggcaag

SEQ ID NO: 24938 - DNA, 1170 bp, Mus musculus
aggacctggtgagggagacactggcagagccagggaagacagtccacatccccccatgaacttactcaaggcttcactggggaattctaggcagacgctccatgcctgcaacgcccccagctccctcacagggggctggggggagggggatcctcaacaaggactccaccctcaccatgcccactagccctctttgtaatttcccagtctcctttgtagttccccatgcagggcaggatctccttgtgtcacactgcccggctctgcagttttctattttcatccacctcgcgccctgtcagacctggcctctgtcggacctctgtcagggtttaattgtgcttgtgtcttgcagtgtctcacaggcctggggccttcaaagctgagctctccaagctggtgatcgtagccaaggcggcacgctcggagctgtgaccctcgcctgtcaagggccttcatgtccacgttcctcaggcacactgaccgggactacttgtctagggcactggttcccataggagctgccctgccctgcacaggtcacactgtgtcactccgcagaactctctgagcccggtcacctgttttgccagggaagatgcagggcatgtgcgggggtgggatggaaggacttcctggctttcctgaagtcaagatgtggtgtggtttcccctctgagccacagatgagtgtccccatcccaggaccactttctaaccccatccagggcagctccactcagaaggatgggaaaggatagaaaaaataaataaataagtagccaccttagtggtggctctgtggggtcaggactcagagatggattctcatcgttttctacaatagcagcaggtgcaggcacatagcctctcctaatagtgactgtcacataggtgccagcacagtgggtcacaacgcaaccaatgactttgcacccacaatgactagtcactctctctcttgagacacaatgatgccttgaatccacactgtgttctctagtactaggaccacagggcaaggccactgtccccacagattttggattcaggattttgaagtcaaatgaaagcaacatgtttttagatttatcttatgctctctctgtgtgtgtgtgtgagagagagagagtgagagagtgctgtgaatctctgctgtttgtgagagagt

SEQ ID NO: 24939 - DNA, 1532 bp, Mus musculus
gaggcccgggcactcagcatgttcagggacatcacccagcagctgcagagcatgtgtgtggccctgggggccagcatccagggcttgcccagccacgtcagggagcaggcacagcaggcccgcagccaggtgaacgaccttcaggccaccttctccggcattcactccttccaggacctctcagccggcgttcttgcccaaactcgggagcgcatagccagagcccgggaggccctagacaacactgtggagtacgtggcccagaacactccagccatgtggctggtgggccccttcgctcctggaatcacagagaaaacccctgaagggaagtagggagaaggttcagggccaacatctatctggcttgactgcttttcccaacagtccaattgcacaacaggtcctcccctactgagtctgaatgagacatgtgtttaacctattcccatcagtcttttaaagcaattttttttctagaatgttccaggggtaaaaagatccagaacattctagaaaaaaaaaatgtttttttcctaaaaaaaaaaaaaaaaaaaaaatgaggaatgagggtaatgaatagtgatagcactagtctgtcatcctgtgtcagcactgtggtatagaggcaagagggtcacaggttcaaagcccggctgccacatcacaaattcagtgatagtctaagctacattagaccttgtcttgaagtaaaaaaaggcataatgatttttcactccgggtttcttttctacatcatggcccacaatagcaagagcttttcttgtttgttttttttttttttttcctgagacagggtttctctgtatagcccctggctgtcctggaactcactttgtagaccaggctggccttgaactcagaaatccacctgcctctgcctcctgagtgctgggattaaaggccggctagcaagagcttttctaacagaccctgatacctggcccaagaacccagcaactgtgacaggatagacagctgggatgttgcaattgtttcagatgagaaagtgagggccgagtacactgttcctcaaatcctggggctcagtattgccttaataaattttatatgcatcagaggccaagtggatggtgtatatgtgtgttgccttcctaggagctgagctgccctgacatccctagagaccttcttccttctgtctctactctatgcacagtgcgagtcttcccactttgaatgttggacgtgatcacttgtgaccctgtggggacagcaggaagggcctgctgcctattttccctccgtctctgtgatgtatggagaagggtcagtgtgacaagctgagcctgccaaatatgcccacagtctgttccccttgatctcagggaaggtggggacaagaagatctggagttcagggtcatccttgactacctagtaagtttgaaactaacctgggctactttgagactatgtttcaaaacagcaaaactcggggcaggagagctgcctgctgtggtaaagtgcttggagttgtttggtttgcgg

SEQ ID NO: 24940 - DNA, 1203 bp, Mus musculus
ctgtcacggactgctgacatctttgtctcccaagctgttcccacatgcagagttcctgaagaaagacccagtctcattcctgaagagtcttgttcccttagacgggttgccattccccccttcccccagtcctatttccaccccaggactcttcttcctgaagtcccagtctcccacattggtcctcaggcttggtcaggtctgttcttggttaccataggttatatgggcctgcaagcctttctttcatatgccctcccaattagtttccaggggtgggggcatcattcactgtaaccctaaaacctctgtgggtactgatagtgctcgacgcatggcttctcaagagcagctgtgagtgcccaggcctggaacagagctttgtctggcctctgtattcccatctaccccttccccatgctaggcctttgaggaagacggtctgttatggattttcccacagatggaggatggccacacactcttcgattatgatgtgcgcctcaatgacacaatccagctgctcgtgcgccagagtctggcactgcctctcagtacaaaagaacgggactcggagctctcagactctgactctggctatggtgtgggtcacagtgaatcagacaagtcgtccacgcatggtgaaggggcagctgaagcggatgacaagactgtgtgggaggacacggacctggggctgtacaaggtgagggtccctgtggctgtgtgcaggtgtgacggtggcattctgggtttgctcccaacccagatttatcctttgccagccttggcagtgcctgcccatctctgtactgacaactgcacagggtctcttgggactgactccttggtgacggcactacctgcaggtgttccctctacagttgaaacttctgtatttttgtcaaactggaggttgagcctccctgagaatcctagcagatgtggttgaagctgaagagtgagtgccccatgagagagagccatgtctgccctctgtgaccacatcacttatttttttttaaagatttatttattgttatacataagtacactgtagctgtcttcaaacactccagaagagggcgtcagatcccattatagttggttgtgagccaccatgtggttgggaattgaactcaggacctctggaagagcagccagtgttcttaacctccaagccatctctctagcccccctttt

SEQ ID NO: 24941 - DNA, 1147 bp, Mus musculus
gaccagagttcaaatccccaatacccacataaaagccacttgcagaagcttgcactgctagggacatgggaggcaggggcagaattcctggatgtccaggggcagctagcttgccagatgtaggcagaaattgaggctagacagctgaagggtgccctaacctgtctgtagcacaggcctgcccagatgatttaatccacacatgtagaaaccaaaggggagaatcaacctgggtgaagaagcccaggctcagccccatagtgtgctaaggttttgggatgttctgtaggaatgactctcagctcaacaactgtcggatcatgtttgtggatgaagtcttgatgattgagctccctaaagagaggaggcctttgatcgctagcccctcgcaacgtgagtcttggtcgggccctgagtgtgcctgggtgggggtggcaatcccaggtggcatggtggcctgttgcagcccctcctgccctccggaacacagggaagagcggcccatcctgccggttctgcaaggatgatgaaaacaaaccatgtcgaaagtgtgcctgccatgtgtgtggtgggcgcgaggctcctgagaaacagctgttgtgtgatgagtgtgacatggccttccacctgtactgcctgaagccaccgctcacctctgtcccccctgagccggagtggtgagtggcatacctctggggttacctagcaggtctagaagggaatggaagacaggctgggaggtagctcagccttgatgcacaattctgctgtcctgagttcaaatcccagagctgggctgttaacatgcccctgtgagcccagtgctgggggagcaatgataggagtttggctaggaccttctgactgccagcttggctgtaggctcagtgagaggaagctgtatcagagttaagggagtttggctcgtgtccctcaggtctgccactgtgtgccccactccactgtgcagctgtgcacttggggagctttgtggttcccttctgcacaagggggctgcttttgagctgtctgaccctatgcagacgggaaacctgagactctgccagagaaggaagggtattgtcacatgacgcatgctctttctttcccttacagaacattgggatttgctctttttttttttttg

SEQ ID NO: 24942 - DNA, 1335 bp, Mus musculus
gggatgttgccaggagctaccaagagggagctctgtgtgtacgtgagaggacggagtcctgtggggctactttgagctgtcccctcaccctgcctatttctcacgcaggactgtctggacaggtccttccgggcccaggtgttcagctgcccagcctgtcgctttgagctggaccacagctccccaacccgggtgaaccagcccttgcagaccattctcaaccagctcttccctggctatggcagcggccggtgatgctgagacccaggcagagggctcatggttccaacttcatagtgtgtttagcttgaaggtgttgtccttcacgtctgcctgtggcaactcttctgatctggtcaccagttaaccaggcatctataggaatcccatgttctggctaccagttggacttctgtttttcatccctccaccccctttctataacaaagcctgcgatttattgtccaagagaaggaaaaaaatgtttttgtttttgtttttttttttttgagatgggtttagaaaccgttgagtttcataccaggcctcatgtcatgctggtaggagttctccccacaccagctgcctagaaaccatctgcacccatctttgaaaagcccagacatgtcttcctggcagctatctgtgtgcttcattccaggggtggcccctgcagctgcccctcagaccttcatagatgccctggcccgcgccattcactgacatgattgcagaggggagttggctgtggcctcaggccaggggaccagctgggctgaagctgcatgtgccttgggctggccacttcttcactcccctcaccactgagcattggatgtctaccttgaaagcctggttttcagagagtgcactgactgggtgtcatggaaggcagagatgtgttatcagttccatctcatttttaactcagcaacagaattctgagggtttctgtattatgggtttttttatttttattttttaaagcgagataaatgggtttcctcgatgaatttcttttgtagttacagcctgtactgaggaagatgttttccttggtaggttttgtttcttttgtaactttaccaaagtgtgcaggtgtgtctcatggaaactaaaccatttactacaggcagactggacagcacagttctaagggttgtgttttgttttgtgtggggtattttttccttgttagattgttaacatattgcaataaaataaaattctggccgggcagtggtggcgcacgtctttaatctcagcacttgggaggcagaggcaggcggatttctgagttcgaggccagcacttaaaaggcagaagcaggtagat

SEQ ID NO: 24943 - DNA, 1103 bp, Mus musculus
ggccagtcggggcttttcacacagtacaacatccagaagaaggccatgactgtgggggagtaccgccgcctagccaatagtgaaaagtatgtgggtgagagcagtctctctgctgctcaggcttctcactttccagaggcccagcttgacccttaccttgtccctgtctctgtccctagggggcttccctcatcccagtatgtggcctgaaggtggcccttcaggggaggtccccccatgcttcctggaaacctcttcctgcttccgtgcatcttgtggcttacagtcacagcatgcacagacacatggtccccatgctctcagctccagctgcccctggtttccaaagctctatgcccctccttgtacatctagccttgtttctggagttgggttctgaggctcctagagggtattatactgcccagaacctaacccgaaccactgcactgtttacaggtactgtaccccacgccatcaggacttcgatgacttggagcgcaagtactggaagaacctgacctttgtctcacccatctatggagctgacatcagtggctccctgtacgacgatgtaagtgcccaaaagtgcctgctatacctggccaccatgtggactcatggggatgggaggaaagtggctatacctttcttctcagggccaccccaactccggtggctcccacttctgtgttccctattcactacttggcagggctgtgctgtcttctggcccagggtggcatgctgcataggaggccacagcctgaaccatctctgtggtggtggtgcccgctgaggtgtggagctgggagcccacggctgggagctgtaacagagctgagtctgctctggcacttcactgtatgctgttgcaaggttctcttggtcgactgtgtgtgtgtgtgtgtgtgtgtgtgtgtgtgtgtgtgtgtgtgcatgcacacacacatgtgcacataggagaccagcagataatctcatctgtgtttctcagatccaagccctgtctactttgggtttcttgcagtggggacagggtctcattgtgtaggcaagcttgcctcaacctcaagaaggtctgcctacctccaggctctacc

SEQ ID NO: 24944 - DNA, 1212 bp, Mus musculus
gccaagttgtagttgtcccttgacatgtgctggcttgtggacagttatgtgtaaccgctgttccaagaagggtggggtggcgaagagtgtggagcctaagcagccctaatgtgaccttaggccccttgacctgtctgaagggcccgtgatgctgacataccccagtcatccttttgtaccttgggtgactatgcagccagggtacaggcaggtacacatgtcctggaaggactctgatgactgcacactcattgtccataggacgtggcgcagtggaacatcggcaatctgaggaccatcctagacatggtggagcgcgaatgcgggaccatcattgagggcgtgaatacaccctacttgtactttggcatgtggaagaccacgtttgcctggcacacagaggacatggacctctacagcatcaactacctgcacttcggcgagcctaagtcctggtgagtgccaggatgtgagccatgggaagacctgatggttgctgaggggccactggggaatttccagttccctctttgacttggggaggtacactgacccaggactgatgttcacaggatgtacccctgtcatcctgggcagtggatgggggctctggtcttgcctgagcctcagccaggccaatggatgtgtgtcacctgccagccacagtacagggactggtttctgtgagacctggaggctgagtgaggtgccagcagaatcgttcccttcaagtgctttgtgtctggggcccttgtgtggctcttggtctccctggagcacaaggtgacagctcaggtcttctttcaaacattggaaactagggagatctgctgccccttagttgtaccctgtaatcacacagtgtggtccttctgcccccattgtccagcacctccttgaggctccaggtgtgacagggccacctgctgggagttcttgttgtacagtggagtccatgctcagccctaggcagctctccttccctggaagacacagctctgttgatatgaatgcctttgatggcctagctggatgggaaaatgtacccccaaacccgtttccctttttgacattctcatgtcttgtcggtcccagaactgtttccttgcagttacagaggtgagaaattccgttagtgttgtgtctgctttctggttcccagagccgtagggagctatgcactgcgctgtcccagggtcagaggtcctgcat

SEQ ID NO: 24945 - DNA, 1186 bp, Mus musculus
aggcgctgccttcctcattcccttctgattccaaaacgaggttccagggtggggggttggggtggagagagaaggagccactgctccccaggctggggtcacacagggaccgacctctgcttccgcactcccctgcctgccttttggcaacattttttttcttatttttttttaatagtgtatattttttttctttttctttttttcttttttttttttaagaaaaaaacaaaatcgtgccggtcaaaactttgaaaaagaaacaagatcactgtttgtgcctctgtgggaggcctattttttcatagttagtgtgccgtgtggcggctatgtgcggccacttcgacggcttctgtgtgtgcatctttcccacatgcccgacactgcccccatccccatgtgaatggtgcgcttagtttttatttttaacctttttactttttttttaatcaatcttcagacatatcagatatggagggtgaggcgctgggggcactcgggccagactacagggacatggccaccaaggacacagtggctggccttgctgctccagtccctggcacaccagggagggtcctcgtctactcatgacctctgtgccccgcatggaggacctgggactacgggacacttgggggatatccaaccccctggagcaactgaggtctctctttgtaggagagtgggtcagtactcgtccccgctgttttttgggcagaagcagcaggtgacgcccctgtatgtagataaaccaactttgtattaaagaaagattcgtccgacctagtgcatggagtgctccttaatgctgccactgttggggaaaaggcaggaccagacactggtgaccagtgggctcagagaagaggtattttggcctctgcggtcacacagtggctctgggcttcaaaaacagcttagtggactcaaatatgaggtcccgagttcaaatcctagcacccaggcaaagaggtgctgcaaagaggcatggtggatatacttgtcattccagccctgacgtttctggggctcaccagccagcaaagcctgatgaggggaccctggcaacaatggcagagttggtgaagagtaggaagcgacagtaaggcaggtaaaagaattggggtgagctctggagtggaggagactccttcatagactgccagagcctcgagtccatccc

SEQ ID NO: 24946 - DNA, 1142 bp, Mus musculus
cccactgaaccttcccagtgccccatgcctggccttgtcatcatgggagttacaggaggaacccagacacctcagtgacactgaactgaaagcaaagtctcagtggggagttggggaactgctcagcggttacagcactggctgcacttgcagaggccccgggtttggtacactgcattcacagggtgccgcaaagtctgtagctagtttctaggagacagtaccttcccgtggcctctgcacatgtgttcataggcacacacgtgacttctaggaagtgtgcgtgggtacatacatacgtatatatgtatgcctgtatgtggagttctggcggggcaggtgtctgtgccagggccctggggtaagaaacctagctgagcgtggtctgatggctttggagagtggatggaagatgtgtgtctcacaatgtccccaagaggtttaaatttggcttggaggctgagggacttgggcagggcactctggggagtgtggctctgaccccatgcttgtgccccctccctaccgcagacagcagaaagcctacattgcaacacaggggccactggcagagaccacagaggacttctggcgagctctgtgggagaacaactctactattgtcgtaatgctcaccaagctccgagaaatgggccgggtgagtgtgtgccaggtgggacgggggtggggggacgcactcagggccacggtgctgactccactctgccctacaggaaaagtgccaccagtactggccagccgagcgctctgcccgctaccagtactttgtggttgacccgatggcagagtataacatgccacagtacattctgcgtgagtttaaggtcacagatgcccgggtgagtgctgactatgggagggtaaagtacctaatgacttgggttggaagtgggtttggctactgtacttgttgccttagccctgtggccctggagacaggaggataggcaaatgtggcttgctggctgccagctcagtaagcgacactatggtgagagcaaaaagcataggggaactagtatggccaccagtcaatgccagagttgccgtgggtgacaggagaccagagcctggacagggtggtgggatgaggggctaagccttgggtggctgaggactga

SEQ ID NO: 24947 - DNA, 1188 bp, Mus musculus
ggttccccagctgaaggccagatgcccgtaactgatggctgagcctgaggcttgctgcgtgcttggagtgggcacctgctattgctgagactccatttcatggcctgcagaatgaggtctgcccctgggcttccggagtgcttgagagtacacggagtggggtctggcacctagcacgtgtacaactaatcccaacagccagaccaatgagctttggaactgagtttcctctctggcttgaggcagggttcaggatcaatgactgagtggctatgcatcacatgtgggagcctcccccatgcccagcaggcagggctacagagagccagtgtcacgactgaaaagggaaatgggtgctgggtacacccacatattatcagtaatttccataggctaacctctggtccatagtagggctataaatgtttcatagtaggcatgccattgtgagcaggatcctgctgtttggcccagcacacagttggtgccccttaaatgttgtttgaagtttaaatacagatcaggacatacatcataaatggaagccattggccattagtgacaagctaaatgatgtcagtgcacagaggtcccgagatcacgtagggctctgacagttctgcaagcctcttcagatacagtaaacatttagtgctacttgctataaggaagttggcttggtgtttgatgcccagcaggtgctcagatctgtaccgtaagcttcctgcagctcagggtttgttcagcacacattcagttcctgtcaagttcctagcaccatgtacagacagtatgggctcagttataataagcactacaaccactctagtgtcaggtcatgacatctgacacatagtaggtgcttcatatatgaaaactagaactcaatttaataaaggtcctacaacctgggctggcataccataagtacttaatctaaaactactaacagtacctggcacccagtagttttctaagagatgagaactcttgtttcccagggtatagtttcccagtacctgacagaagtaggtatttaatataggaagacaattactctccagtgtctggtatactgtgggcatttaatatatggaggctattagtccagtgcctacctaacaccagtaggtatttaatgcgtagagagtatttttagtcagtaaatctcctgatgtagtacctgac

SEQ ID NO: 24948 - DNA, 1167 bp, Mus musculus
gtttctcttcttgctttgagtgttggttcctttcagggtgcttttgtttggcctttaaatttctgtttttgcttttttatttttttttttaacttgtcgcctcccccaacccctcctggttttggtttggacgtcaaatgccgttttctgtccttgattaattagcctccacactcattcccactcattctgtttccatgacaatgcagcctcagcatctcccccccccccaccccgcccagcctcgctgtggatgctggcagcaggtggctggctggaccctggtgccgcctcccctgctcctcaccctccacccagccctgtcggaactgtgctcccatctctgccccacgtcccctccagcctgcaagggctcacgttttccctagccctcccctccatcctgtgccctccatgactctggacgttttgtggggctacgttttccgaagggctccagcctgcagactttcactcccagtggctcctctgtccctgtcttctatgacttccccctggattcaggaaacagcttggggtgtccacctagaaagctagactagtaggaatgggcaagggctggcttctctatatctgaggtcccttcagtagagcagatgagcctttaacaagcagttaatgcctgtgcacctaaaactgtgtgacaggggtggctatggagccataatatggcctctcatcctgattcaacctctcagacagtcttcacctacccaaggccatgctcttgccccttagcttcttaagtccctggttaggtgtcactttgagcctcacccctgggaaggctactctttgaggctcaggttcccatgagtgtcccatgctcaccccagaacccactcagcttctgaaaacggagccctggaaatgtcctgctgccttcctagcccacaaggcccctgcagaaggtggcatccatccccacccactaaggagcacagcaaacatgcccctgcccccaatgctccagctcttcggctccttactgttaataattctcaattatgaattgttattgaatatcctgtttatggttctgccagggctgatgtgacaatgtgtctggtcgcattgcatcacatctgctagagtaccatgcagcactgaagcgggctcttcccttctgctgtctctctctatccc

SEQ ID NO: 24949 - DNA, 1112 bp, Mus musculus
cgcttcgaggtgagctgggcagcaggccggggcagcggggcgggggtgccctcagccacatactccttcctctccaaacgggcagtggccaagcctcaggatgccacaaggcagccacagccctgtttctggcactgcagggtttcccaagtctacgactctgtcttgtgagtcctcaaaccaggccctgccttctcttgagtcttaactcacagttccagcacacatgggaggaaatacccatatcatgccacatgtgttcatgtcctgtgctcagtgctgagtctgggggcttaagggtgtgctccattcagacgctcagagggctcagagtgtgtctcttagcttctcttctttcactgtgactgatccttggtggtctcctgtgtgcacacgtgtgcccccagccacatacgcaggacacccttggctcagggacaccatgtgcctgggacagctactgcctgcaacccagcccacaggtcggctgggtggaacccaccctggtctcacctgcttacctgttccatctcgtcttcccttcctcttcccagaccattgactttgacgagagctctggggcggtcctgaggatccagccacttcggacgcctcgggatgagaacgtgtacgagtgtgtggcccagaactcggtgggcgaaatcacaattcatgcaaagctcaccgtccttcgaggtacacactgcagggcacagaggaagtgccaaactgcagatcttgcccccaagcttagagccctcctgcactggctcttgctttttcctttaggaactaggatttctctgctcccagcccaggccccttggtttgtgtggtttaaatgtctgtgcagttggtagacttcaagctcagcttggtctaggcgctcactcagtgctttctggactctgtccctgggtcttttgtgaccatctgttctcagtcagcttgggtcgcaagtgccctcctcagctaatccctagcactccagagtaggtagccatggtgcctggagccacagctggttcagccccacagaggaacttaatggagggtaggtgcctaaaggcagaatgacctaagcccccgccacccctgtgccctggctttgt

SEQ ID NO: 24950 - DNA, 1191 bp, Mus musculus
gagaggctgtggcaggagatgacagggttagaggccacacagtgactactgcattgttgctggtgacaaatgcccagagtttgtgtgtcagaggccaagtgcagaggacaaactgctctatccagtggggcagtgagagcatcggggagggaaaaggcgtgctttcggaagtgtgctggagaggcggctggctcccagaaatggctgtaaggatcgggaggctggaactcgcttctctcctcatcaagcacttgctgaactgagtgggtggtgaatgtgggcaactgggaatgttgaactcttacccatcccctggagccccacctccagtgcacgtgaacttccaggccaaacctagacgtctgtctcccctacttagaccctgttcctaacttgatggccatagagggcaaaggcccaagattgaggtttctttggagcccacagacacaaaacaagtacagatacagattagggaggaagttctagagtgttccctggaataataaataaatgggtgggtgggttacactgccttccttgccacccttctctcctcctcacttctgcttcaaaagcaggacccaactccactcctccaatacaccaggctctccatcctgccacagtgctttcgtatagctgcgttctttgccccagggcctttgatgtatgctgtgcacaggagaaatgtttgtcatggaggcctgggctgggccagccaatgtcaccacccctgtgggctgctgctgtagcagggcgtgcctaggaggggtggaggcaggtggctcagccggtctagcaggtgctgacctgcgagagagtctcaggctggcaatggccatggaggagctgcggcgagggctgtcccgctggaagcgctaccacatcaaggtacacctagccgacgaggcattgctactgccactgaccgtgcggccccgagacacactgagtgacctgcgcgcacagctagtgggccagggtgtaagctcttggcgcagaaccttctactacaactctaggcctctgcctgaccatcagacagttcgcgaagctcgcctgcaggacggctcagtattacttctgctcagcgacaccaggtgaccagggatctaggctgggacttgggctagaacctggtaggatcttgagctctggcttatggaggttggcccagtgggatggtga

SEQ ID NO: 24951 - DNA, 1200 bp, Mus musculus
tcaggccgcctcccttgtgcttcctgactgaggaggacagccttgttcttcagtggacagatacgtcctgtccagctgcacttgatttttgtcttttcaactacccactgcctttttctccctacattttcagttcattctccctccctgtcttggagtgttttcagaggaatacattgggttttctgggctctgcttttcctgctcctatattagggactcacatcgtgaaccctcttggaactctgcaaatcattgttttcatgggattgaggcaggtgctaagtctgtggccttggactggtgccaagttccctgcccttcctcacctccccagccctggttggtatctcccagttcttttgtttcattctggtagatttcttttgcactttctgccatggtctctactatttagtgccagtcactgtctttcagttcatatggtttggggggggggggggccctacaccttcctgacatactgggctacttcttggctgaacagattctggtgtccaccaggtttatcccatgttacccgtggctgggcacaataaccccctgtccatgtgggcaggtgtaccagctgctggctgtcctgtctgaactgtgagggtccctcctgcatagctccccatgcttgagtcaaggcaccaccattcagttcacagcctctgcattttctcatgtcacctgtaacccacctaagtttcccttccctgtccatgtcctggaaactctgggtctgcaaagtgtcagcccttccctatggtacagtggctgctgccttcagggggcctggcaggggtcaggtgctactgagcaggcacttttggctatgcagggtctgactaggtttcatatctatccgtgtggtgctctactggctctgtgtactgtttgagaatcttaatcttgtaaggcaaactgctctaacagattaagattctctagaatccacagaggttgactaactagagctgagtaccgaggacaacagcagttatgggtgtcttctgttgcttggtctataataagccctgtgatttttgtgacagaggctagatgcatccttatataggtgtgttctttcccttggaggtcatcggagccaaggtggtcaccaatgcccgcagtccaggggctcggtgctatggatttgtgacaatgtccacgtcagatgaggccaccaaatgc

SEQ ID NO: 24952 - DNA, 1210 bp, Mus musculus
acatcactctcaaaaaaacaaaatcaccaaggggctggagaactggctcagtgtttaagaacacatgtgctcttgcagtggacctgactctggtgcccagcactcacaccatgtgccctacagctacttgtgagtccagggcctaggacctgatgcctaatctggctcagtaagcattagtgcacctgtggcagacatgtaagcatcagtagaaatgaaaactttacccaatgctatggatgaattaactgaacctgtctttgagacaaggtttgactatataatcctgactgtcttaaactcactatgtaaaccaggctgacctcgaactcagagatctgcctacctcctcagtactggggttacaggtgtgcaccaccaccgtctggctaagattttggatttttattatgtgtatattggggagtgtgcaaatcaactaagtgcctacagaggccagaggatggcaggtgcttactgtcacagctagcaaatgaatacctattcttttgcagactcacaaaagagagaactttggtacttcaaagtaaatactaacctggttcctgctgtagcccaggctggccttcacctagtagtgtggtccaggttgaccctgaagtcctggtctgctggcctctgactctttggcctatgagctctggccacctgtgtactgcattctttcccacctttgcctacctttggttgtttgtgatgagttgtgagggtgtgggtggtctctggttgacccaagctgttatggctgggtttgtgggctgtgttgtgtgtatgtgctagttgcagtggccatgctgtcaggaattgcactgtgattgataggagttatgttctaaactaggaaggccccagccttgtcagtgggtgaagtagatggtttaatgtatgtggtttaattctgcatattgtgtgagggtgtgagaagggggggaaaacaacaccattttagtaagatctcacctccttgtcaccctcgagaatacagggtgctgactgcctcctggagctgttggctttgctcattctagaatctcaccaatatagcactagagccacaaactcttagggctgatttgcagtttgagagtatgttacatttgtgtggttgtagcccagcagagggcaagggtctgttctttccttcctccctcagttctttgccacacaggttgttgtgtagtgtcactga

SEQ ID NO: 24953 - DNA, 1135 bp, Mus musculus
agcgtgaacgcatggagcgggagcggctggagcgggagcggatgcatgtagaacaggagcggaggcgtgagcaagagcgcattcaccgagagcgagaggagcttcggcgtcagcaggagctgcgctatgaacaggagcgccggcctgctgtgcgcaggccctatgaagtggatggccggtgagtagtcagatacaggctaccagagcctgtgtcaaaatagatttgtgctcaatgtggcaggccccatgtattcagactatgtgtcacactcactgaccttactcaggccctcctgtgactatcagtgtgtgagaaatgctctctctgtgccagctcagggtaggaggagctttgccaaaaaccaaacactcagcactacaatggcactgaggcataggtgggagtgttaagccaggccttggagccatgctggctttgttcaagctctagggtgcctcatgagcacctagatcacacctttgcctcccacccaatcacaggcgagatgatgcctattggccagaagctaaacgggctgctctggatgaccgttaccactcagacttcagccgccaggaccgctttcacgacttcgaccacagagacagaggccgttatcccaaccattctgtggataggtgtgagcccatggccatgttgggagggcagtgtgcatgcaaaccctccccatctgggtctcactgaaaccaccttttttaggagagaaggttcacggtcgatgatgggagacagagaaggacaggtgagcatagggtgctgcttcagctgtggaatgggttccgtgtctattgactgccagtagagcatagtgctactcttgagcattcatacaatggcaagtgttagtgatatcccacataacctatccagtataccctatccagtagggagcttgcagctctgtatgctgcactgctccttagagagggtgaccagaggcgcctagcatgtctgtaggattggggctcacccactgtgtcaagttctcactgcacagtgccatccttactgcctctcagttaccatcctacacccttagcttcccattcccaggttggcacgaggggtatcttatccctgggccttcattggtgtcaggttgtcatcctggtt

SEQ ID NO: 24954 - DNA, 1210 bp, Mus musculus
cagggctcttaacctctgagacatctctacagagcccattcccctcaaaagcacttttattgtcagagattaaattacttcaacagctaacaacagtgtgaggcagcattccaactcctaacctaagggatgattcccaagccgaggtctcacgggtgccgtagaacctccggccaccagaggtcgcccgcagcgcgcctgtctctctagccggaaaggcctgcaagtggcatatatcccaggattctgcgcggtgccgttcttcctgtcccggccgccatcggagagcatcaggtaagtgggcctcgtcggggctcatctgcccccatcgggcatcccggccccatggggagtccctgcgggccggcatgcgggcgggcgcgggccgaggtaccgtgtctcagccgctgtcttgtccccgctgcccacagccatggctctgcgctaccccatggccgtgggcctcaacaagggccacaaggtgacgaaaaacgtcagtaagccgagacacagccggcgacgcggggtgagtgctggggacgcgaccgcctcgtcagagatggggacgggggtgaagaagtgaatatcgacacctgcgtagattctgtgtcgttggaatgggaaggtctgagtggttcgtgggcccggtcgttgattgggcgtctgagactgggagtcggtcggtgggctgttgcgttcggccccctgtaaggcccattttggggttcgtgacctcggggctgtgctcgcagcgcctcaccaaacacaccaagttcgtgcgggacatgatccgggaggtgtgcggcttcgcaccctacgagcggcgagccatggagttgctcaaagtgtccaaggacaagcgcgcactcaagttcatcaagaagagggtaggcagcgtgctgcaccgagcacgggtgggggtgtggctggctgcagtggccctgggtgacatgcgactactcctcgcaggtgggcacgcacatccgcgccaagagaaagcgggaggagctgagcaacgtgctggcagccatgaggaaggcggcggccaagaaggattgatgaaccctcccccaataaaagatggttcctacagttttgtgtatgtgtgagctcacggcgacactgagactcaggcttagggcttttggaaaggttttctttattcatgattctacagctgtgctcgtggctccgccacaccatgatttat

SEQ ID NO: 24955 - DNA, 1153 bp, Mus musculus
tgtactgcagaagagtgggtgacagcagaagccacatgaatcagggtgctctgtttttgctctggacagagaatccttgttaactgtatccagatgcctcttgcctctgtgcagatgctctagctgagagaatagcctggttgagtgcaaggctctgcaggtgttggcttctaagctgagccacacggcaagttcatgctagagctctcatgacagtagctgccctccagagccagtgtcctgtgtggcaaactgggcccataaagcccagtgtcttgattctcatcggctgtaagcctgagcaatatagcccccagatcagccagggcaaggggcctccagataaggggagctggagatcatctctaccccctgcttcacagtggctagagcagcactgtcatgccacttggtgacagcgctgagccaccaggccagcgtagggctctcagtggggaagctgggctgtctgccaaaattagtcttgtggctggcgcgttgcatagatgtactataatttgggtgaattgggctgtaaatcaagttgggtggaatctgatcctggggacaccaggctgagctcaccagtccctgtgctgcagagtgggcttttatcttgctgtgccctaagtcttagtttagagaaccacgtggctgcccagtaagctccttcatcaccccagtctgtctgtactctgtgccactcttccagggtatatagggtgaacatctgtgatgtgcggttgcccaccaagagcctgtgagcagcctgctgtcctggaggttgtggatagaccatgctgtgcagcaccgtgcatgcacctgagcccctgcattgcccacagcctttggggtgatgccagccttgagggtgaatttttgtgttcttgagggtggcatctctttctatatatatttacttaaatgtatgtaattaataaaatgtatatataacttttagttgtgtgtacatgtgtgggagatgtgcatgtcagtctgtggccaggcaggccagaggccagatgttcctggaactgagggtacaggtggttgtgagtagcatcatataggggctctatcctgtagaatgtagaagagcagcgagtgctcttgaccactaaaccagccctcagggtgtcctctttgattgtca

SEQ ID NO: 24956 - DNA, 1119 bp, Mus musculus
gctgtcagagagcctctttccgctttgagactcttccaggcagtgtgacacgtgcttgttttctgggtgggcagtaggagggacttccccagtatgttccctacagctgagtatttcttcaaggcatccagtgctcctttgctgtgagaacttggtggcatctctctgtgcttggatttgcatttccaaagtcacccttgtttacatccttggacagcagggtgcatggctccaggccagagcctcctgtgtaggagccctggcttctgttcccagcaccatagaaactaaagccgtacaacagatgactgaacagagagtgacaaagcggcccactgtcctcagtgtcctggccttagtctgtagactgtcagacaccccagcctcactgctaactctgagcttgaagtgggacccatgctttggggtgcagagggtatgggtacccccaacctggtcactgatcccatgtgttacagatccagtgtaagctgtttgtgttcgataagacctcacagtcatgggtggagcgtggccggggacttctcaggctcaatgacatggcgtcaaccgacgatggcacattacagtcccggctaggtgagctctggggaaggacagaccctctcagaggtgggcttaagttgtaggctccacagctggagcagggaaatgactgtgagcaaaggcagcagtgagccccacacctgcttgcgatagcctgggcctgctgccctcacactgggttcctgctcaagtatctttagtggacttctaaaaagtatagcttggaaggaaggtgggggcaggaagagtgccagcctaggcttcagagctgtccctcctgtttgggggactttatgtgaaaatggtctctctctagcccaggctggcctggtctgctctgagcctgtcatgtcctaattttgtcatgtcctaacatttggttacattccccttaaaagttaaggccagaaattgggaagcttaggcaggaggactgaaaagagtttgaggtcagctcaggctactgagaccctcacatcaggaaagaaaagtaaaaaaaagaaaggttaaagtcaatgtcaacaggacctgctcagcagttactatgtgtga

SEQ ID NO: 24957 - DNA, 1616 bp, Mus musculus
gtggcctagtcacaggctagggcctacatgtgtgaacactgcccagtgtggccgttagccacacactgccacgtaacaccctgcctccccaggccagctccaaagacacaggccaactgtatgctgcactgcaccaccgcatcctggctctgcgtagccgggctgaacaggaacaggaggccaaggcgcccccacctgagccaggagccacccgggccaccgaggaggaagacagtgatgaggatgctgttctggctccctccggtgtcacgggggctggtgagcaccatgggaccagtgggagggaccccagctggtgactgtgtgctgggactgagagacctgctctccccacaggcacaggtgatgaaggagatggccaggctcctgggagcacatagcggcggagccactgcaccaggctgctgctttgttgtctgtctgctgcccgtccctccctgcaggccgcatcatggtggtgtctattgccggggtggccacaggctggatccgagtgtcccctctgcagcagacggggacgccaggatgcggcttgggactcagacctcatcatattgatgagtagaaagaacgttcccccgccctcctccgatcgaaatggcacattgacacttgtcacagcttcgtggtgaccgtccatccctgggcagcaacaaagagaactccaggctcagcattctgttgagtaacttgctacctgctcggctttccactctgccaggtccacatggcaggtgcctctccttcatttctggtggcttggctcttgaggtcacagatgaagctacacgtgggctgagctgacttgatgctcctatgggtggtgcccggcccccacgggggttcactaggtttgggcctgagaacacctgtctggacaaaggtgatgaaaccaagagagctcctgccttcttgcctgcctacgtgaaccacctgggtctcccttagcaggtacccagccctgaggtgactgaccacctagggcccctgagaggcaaagggaacctgcaaagggcctgtccccgggcagaagatgaagcccctacccgtggactgtgtggttccatctctggccaggccacttccagccagcaaggacaccagaggctgccttagcagatgggtcacactgcttccagccttagccagccagtgacaagtgaatccagacgtcacccatgtgttttggaacatttatgtaagattgaaatgtatttgagaactgcattaaaacttttaactaaagccccagactcttttgcacctggcagccagtcaggctggatttggccatgggcccctgatggggtcagtaatcaatccagccattgctaggcttgtgggtggccctgcaggagacctggtccagccagttcttcagcctccattctcacacatccccccctccctgtgtctagctggggccccctgggacagtggtggcagaggatggcaggtggatcaagggactaggctaagtgcagctattaggcaggtgagagtagctatgtcagaggtgccaggcgctgtctgctgtagtagtcttggaactcagctagtgtgacctgtggatgtgctggctgtgaggggaccca

SEQ ID NO: 24958 - DNA, 1885 bp, Mus musculus
agagtcctggacatcacctagaggggtcttgagacattacccggatcccatctaaacatcacaacaagtgaaaactcaagatctcatttaaaccccccccccccccccagtgctggagtatctgctacattccactggttttaaatagtttcaaaaacaaatgaaggtaagggtggtaactctgggaggagcattctccaccaggcatacacaaagcccaagccagacaggcaccccagcatcagtgagatggtggggactgaccctgaaacctcggtgtttcctgtttgggacagggtcccaggtagccaggcttgctgtctcaggagtgtggcatggatccctgctaggctgacaggctcccactacaggccctgcctgtggggagtttgtctttttgcttgagatggggtctctctctataacccaggcttcccttgaatcctccttccaagtacttggaatctagatgtgagccaccgtgccctgctgatgggagcactccctacctttctttctactcactcttgtgcctcctgaaccatccttaatgccaagacaaatcattaatcttggatctctctcccatagctctacccttctaggaagaacaagtgggttgagacaccacaacccagagtgcctcaatgtctttccctgattccacactcagttccttgacactcaggtctctctcaaatgcccccttctggaggggccttccaaccagcatctctgaagtcattcctgccagctggtcactgccctgtactgtgattgtttggtctagtttttctgaagcttagtcttatgtagctcaggctggcctctaaaatttttatgtagctcaagctggatttaaacttttgatcctcctgcttcagcatctccagtgctagtatgacaggctttgtgcaaacacccacagccccatcctgggaccaccttttcagtgggaaggcagtggctatgaagcagggaattttgtcttctgtctccatcagtgcctagcacagcccgggaggccctgccttagccaggagccttctggatacctgataagccctttcctggtttccagggacaatgatgtttttgtagcaagacgcctttttgataccctaagagaatctattttttaaatcctggtttctgtgctgcctagagcctatgatggtgagggtgcattgcccttgttagagcagtgagaggaaggggccccacaagcccttgcacccagaggtggtgtctgttgaattccatgacctgtgcgctcagggaaattgtccttgagcagccaccaagatagaaggtagggggtgttcgaaacagaagggcctccagccatccagtctacccagagtctgacatggaccctcagtgtgggagacagaggcccattttttcttggggatggaggaaagaagggagctatctgtatagaaggcagactagggcctgtctgcaccagaataaattggctatttctcaacctggactctaccttttttcctgttgtggggtagcacgctgctaggccttatacatactttacagcggagggggctggagttagccagctgtcctgcagcttccatgttcaagttattcccagagacaattgaaactcagcccgaagaagtgaaggaaaactacttctctgcacaactgaggccacttgcaattcaggggacaagaggaatatcgaaactcatattacccaggctttctagccctcactaggggattgtaggtggaactccacgccctgaccacacccccagcccctcactggggtatgtatcttgggtggggtctgtaatgctaagctatccctagccttgcatcttactgctaagacttgcaatagcttgggctgtatctt

SEQ ID NO: 24959 - DNA, 1195 bp, Mus musculus
cctttgatgagcctggaggaggcactgtggcagctgcatattgatggctggaggtctgggtcaggggtcgtggaccagcatcaacccactggggcagggctctgccttaggtattgggctctggcctagcagccgtggccctggatttgagttctgctgtatcctggaaaggcatcccaacaacctcaaccctctctccctccctcccacaggcataatcggctccgcttacagcgtctcactcaaccccgcagattccaccctggaagcagtggccagagtcggccggtacacattcactgcaggtgagctagtgtcctgctcacagtgacacaggccattcagaggcgactggaaccactgagtggggtcctaggacactgactacaagactggctagggggctcagaagggcagagggtggcacccagcattatctgcacaggacagtcactgcctcagtttccccacctccaacccccattgccccttacagctgctattggagcgatgtttggccttaccacctgtgtcagtgcccaggtccgagagaagccagatgaccccctgaactacttcattggtggctgcgcgggaggcctgacattgggagctcgcagtgagtggccattccctggggacagtatgtaaccactgatcactccagcccctcccactctgtcccctgcctacggcagtcgctgccttctcaacagcaggcagctccgtgataggggagactgtgccctgcagtgggcatccctgcccatctcttcactattggggtgtgacccacagcctgactctaactcggacagacttagccccaaactgcctctctccctctttgtattcctaggggtctggggacaggaaagccatgccagccacagttcagctgtgggaaaaggctttagcaggggagtatccccactgccaggagtcagggctgaccacatccaccctccccacacgatgtctcttgagttaaagggattgatgcagggcagcctttggcctcagtttctccatccccttaactctgttgctgggctattagagaggcccctgaggaagcctcgctctatcagaccccatcttcctgggaggctcttggatcacacctggagcaccccatacctgatgctgtccttctccacagctcacagctatgggacagcagccatgggctgtg

SEQ ID NO: 24960 - DNA, 2092 bp, Mus musculus
cccttcccttacagttcaacgatctggcctccctgtcactgaccctgctggacaaaggtgggtgtgccctggttcccagcccccttgcacagtatctataagaggtaccattgtgacagcctctgtgttgggttgaggatcccagggactagtgtgcaggtggtgggagtcctggcaactgggcatgggctccagtgacatcctgtggtagcttaacagagtgtgaggagagattatcactggccagtctgggcggctgaggccagtggctagtgaccactagagacccaggttagaagcccagcctgttgatgaacccaagggtgaccaggcaggacatgggggcagattgacctgaagaaaaggcaaggcaactctgttcatagtggcacctctgtccccttatccctgcagaggacattggggatggacacagcagtgaggcagatgtggatggccgcagcctgggtgagcccctcgtgaaacgggaacggagtgaccccagccacccactgcagggcatctagccccttccctgggcgtcttccacgtgcttccggaaggcgtcacctggccctctagggacctggactctcagctgtatcacactagtgcctcttcaatgatgccatgtttactgtgacccaaggtggcatggggtccccacccacagggtgccagagactgtgggcaactaagatggtcactcaagctgccatactctgctaaagtggccctgaccctgggctgtcccccaaaggatacagcagcctgctgtgtgtatgtgagttgtggggcacatccccagaaatgtcccaaccacctcggtggctttcccactcagctaaccaccatgtcaaagaaaaaccactccaacagagcccagaggggtaggagcctactattctctggccattgtgtggaggctctgcaggtcccctgcgctgtagtctccatgcatctaatggcctctcatggacagccaagaactccaggcacacaccctggatacatgctaacggcatctcatctcatcctggacaggtccaagccccaaagagataacaggctccaagcagggccagtcaagcccagatgatcgacccatctgcttgactatagactttctgtccaattcatggttaataccaagataacctggggggcctgtgttagggttccccaagtagccacaggggtcagcaccatatccacgcctcccaacaaaactccaaaacctgtgctcagggcagtgcctgagcccctgcagtcttccagacacctcccccaaactagccatgcttgctgctggccagtggccaaccccttctcaaccctagaccatgagatctctgcagacaaatgaacaccaatgcctattgggccctgagttctagaggccctaacatgttacaccttgctgctgtcgtcatgttgagaattctttcccaacacaagccctgccctcccacacctaggaagcgcctaatgaaatatgatagtttttttttttttgaaaaactgttccccccaatagttctgtgctgtaattgttcttagaaggttcttatgaatgtgtccatcgcaacatacctggtgtccgtgtttgttcattcaggcggcaatggtcaccaacacagagcttttagacagaacagctttaaaggatggtgtccttcgggacattgatgctttccgtggctggactgaccagggtcccccttgtggaaagcaacacacactggatgccagccttgcactgtgttggcctttgttgactaggcaggtccccatccttactccagctccagaggagctaatggatgtcttccaagctcactctgggacaaccagcctcccatttagcccaatggctcctcaaaaactgagcctttggcctcaaggtctctcccttctgggagtgatggacacaaatggacttgtgtccccagcaaggccagcttggagctggtgacaggaggatctgtttgcacagggtagcccttccagacccaacagaaaaaatggcacccaacaggtgcttctctgagtgagggcaaatggcctctcctaggaacttggggtgtgggtc

SEQ ID NO: 24961 - DNA, 1175 bp, Mus musculus
caggagcaggagggtccctgggactcgctggccagcccagcagagttaacaggctgcaggttcatggagagaccttgtctcaaaacagaagataagagagttctagctagcattgacctctggccgccatgtgggggagatgagcctaccacagtgcccccaactctcctttactggggccttgctatttaaaatagtgtgacagagtcattcagcgcaggttcaaacctgctgttcttccctgcccgcctcttttgtggggcttgagactgggtccttcatggaaggttccagaagtgggaagaagcccatacattcagctgacaaccatggagccaccgccgctgcctgtcaggccatctgtgcctccctctgccgctgctgctggcgtgcttctgtcttcttgcctgcctgtgcccagcacggatgggagcagagagtggacctggtgtctgctcacccatgccctgtggtgctctccgtgctgggtaaagacagcctggtatcctggctcatccaggcgcactgagggagatcgcagatgcagcacgactctgagggcctcagaagccatgacccttcctatttccttaccacactgtatttattgtgtgcactcatgtgccacggcaggacaacttgtggaagtggattctctccttacaccacgtgggtcctagggattgaactcaggaggacagcttggtagcaagcacctttacccctgagccctctgttttgactgtagttctggtgtgcctggtgagtgaaacattctacttgcccttgcctaaaaccctgagaagcccccactcccctgagtgttttaggtgctttcctggctgatgttagcgccgactgcactataaggccaggtcacactcaatgcagcaacaggtctttcctcctctgctccacccaggcccatagccaggtcaccacacccctgacagcccattctgtccccactcactttcctcagctccatgtccattgcttcccctgcactgtctcctaactccagctccttgtcaggcagcgtacagtggcccagagtccctgagcatctgtctaggaggccctgatgccactagggaaggtggcccagggatcagtgttacccaccatctgcagcagcaggtgcgatgtggggcatgtgtgggggatgggggctg

SEQ ID NO: 24962 - DNA, 1558 bp, Mus musculus
tgggcatggtgggcacgggaggggctgggcatgagggctggcccgccatggcttccgctcccggtaccacccccaactaaccatggtgccccagtacccctcagtggttggtgatgaaggggtgctgcaggccacacacagggtggggtgacataggacacacgtggcctgcagcccctcacttagtccctgccagttgtccattgtgggtgggactgaatggcagattactgcctgggcctctctgggtggccaggatgaccacagtcttccacacagttcacaggcctctctcagctggcctgcctcctagacttgagggtccgttagcctggccagagccagctatgtgcacctgcttctgccatgcagccttgtgcatgtgtgtgctccaggtgcagccagcagccggggggctcaggccacccctctgctggaggcacagaggatctcccctctagatcctaggatgccactgcctctcgaggccccaggccagagaacactacaatgggcaccaatcttgggaccccaagggccaccactgcagccatgtgccagctaagcacccacagttccaaggctagctggactggcagcactcctgggccaccattccccgtgggcctcctcctctgctctctcactgatcaagtctttgaactttgaaaacatgagcttttgccaaatatgataggatggtgtgtgtgaggccggcccaaccctagactgcctctgttcctggccacatgtgcgcctggagaggctttggacctgtgccctgcaaactgccaggggtcaagccagcccccttcccctgtctgagcctggagtgccaccccttccccaacttcagttgtcggtgtttgtgccccaaccaaggtgtttgaaagaggcctgagctgaagccagctcacagttgcctcgatgtgttgcttcctccccattgtgggttcacccctggaggcctggcctcccagctccctctccctgtctgtcccactcccaaactatctgtcaggaagatcctgaacactcctggggaccccagcctctaaggcttcctttacccccagagaaaggaaaaggcctctgcctgtagcccctgttcacactccctatagctgggaggaaacagggctcgtgccccaacctctttccacacaggccgacaatactctccatcaggtgttctgcagcctctaagccttttcatagaaggccctggcatcgtggcagctgttggcctccacatggagtgcgccagggtcccaaacagcctcagcccagggcaccattcttcctctcatggtcgctagcggcccagcccttctgctgccctgggccttggtgtctagtccttccagatgcttccagggtcgtcctgaaaacacccacccatctcttcagttacctcctctggccagaaggtcacaccactgtcctccagagccactctggggcccatactggctgtctggaagcctaaagcagcagcctgcagccagagccgagggttctagggacttgtccataggaaggggtggcactatgtata

SEQ ID NO: 24963 - DNA, 1836 bp, Mus musculus
cctttctccttccaacccccggccaccgtccatcctgccttagtgggtagcgccggaaaccctttcccctgcggggtgtgcccttgatgccagcctcgggctcgtggccagagtctcccagagcctcgcagccccgccgctgggaagcgctcgatgggtgcagaggcttacggaagaggctcctccagtagccactgtcgtgcgacgttgtcgggtgctgggggcaccggccgcaaaggtggaactctgaactgctggggtgtcccgggtgggggcaggatgtggggactgtgctgggtgccacaccggttgctgaacctgctcgctcaaaatctggccacttgggaagaaaatgtctatttttttcccccttctcagcatcactattttgggttttgttctttttttattcttttttcatgtccaagtaactgtgtgttgcaggcggccctggctctgctgggatgaaggggagcccactgaggggactgggccctccctgcctggcaaggccatctcttgtgtgcttgcctctgtgtcccggtcttgtctgtgaagtgggcatgacgatcgttgccaccttccaacctacctcacaggggtgttgtggggacaccatgatctgaatgttgtgacgccgagctgccgcctccctcctctgtccccctcccccctggcaacttctcccctgtgtgccctcttccacacctctggcttctgctgcagacttctcctcctcttcctcttcctcctgcttctcctccaccaaggagcagtctggccagtggagtccccaagacagacagtcacggccccctgcttagcctgtgggggcttgggcccggcctcttggcccactgcctggagttgtagcctcctgtagccaggccgccctcctgccatgaccattcctgtctctccctctctgcaggcaaatgaagcaaatggatatgaacttcatctgtgaaaatatttttttttctccatttttgttccatttgggggcttcttttattggtttctatatttgattggtttggcgagagagcagcggctgcctaggggctggggatccccttcatgccgaggcgctccctctctcactctgtgtgtctcatctttttcctttccaaaattgggatccttcatgttgagccagccttagaaaatagcaagaatttaacctctgccccgccccccaaaaaagtttaaaaattaaatcacaaagagcagaacaaaacctataaaatgatatatgtatagaaatatataaatctctattccccagcctccgagcccaccctctgagggaagcggttcactatctccctactgtctggggccctattcttgtttttaataaactttttaaaaggaaagaaacagtcactattgctatctctttttttcttttttttttctttttcttttttctttttcttttttttttttttttttagttagagttggaacattccttggaccaggtgtgggtttcacaggcccctcctgccctgcccatctctctctgtctctctttctccctgcccccgctcttccctggctcctccttatacccaccccaaccccaggactggcctggtacgttgtcatctgttgaagatgagataaactgagaaaaaaatgagaacaaaacaaaaaaattgtatggcagtttttactttttatcgctcgtttttaacttcacaaataaatggtatcaaaaacctccctgtgtcctgctggctgtgatctgttggtctgtgtcccctgccttcgagtaggcttctgaagcagatgtatgctgctttccctagttataagcataaccctggg

SEQ ID NO: 24964 - DNA, 1115 bp, Mus musculus
cgccgcctcccgctggcggcggagggggagccgcgggtgcgggaggaggccctccgccgggcccgccgggcgcgggagaccggggcggcggaggccctggcggcggcggcccgggtggaggaggcgcgtccgggggcccctcacagcctcccggtggcggcggccctgggatccgcaaggacgccttcgccgacgccgtgcagcgggcccgccaggtgagggggccgcgagggcgcgtgcgcgcgcgcgggggagggggcagcggcgcgcgcggggtcgcgggagggtcacgtgggcggcgggctcggggcggggagtctggggccgtcacggtgtgagggtgaccctctgcgtgcgtgtagttaagggtgcgttgaaggggggatctccgaaaactagactttgcactggacggtttctcttgggtaccagggcttgcagcctttggggtccctgagacccacccctgtacttgcaccaggtcttctctattaggagggttgcagctttggagttcccacgatttttttcctgggtgtactagaggattcctctaggacccataaaggttgcagtctgggacagtgtccccaagagccaccccccgagcttgcacccgttatttccattcaagatatagggtttgcattctgaggaccactctaaagtccaagactgtttgtgatttggagaggtctcctagttttccaaaggcctgagcttgaatgttatgaggatgtccccaagaatcactcctgggttttcacttaggcacccccttaggacccatggggttctagaaactgaggcagatctgtaagagcaattcctgagttcatgaaggatggggtcagagatgctgtgagacccctctttgaacccttggagtcttagggtccccaagggcttctcagggtttgtaaagttgcatcgcaggatggtaggagaccgctattcagagacctgagggttcagaatatattagttcccaagacggagtcctaggtttgcacagggactgagcttggccgtatacttagaaagtgggggggacccatcttagcacacatttgcacccgcccagaaattcaactcccttttagaggatcttgctt

SEQ ID NO: 24965 - DNA, 1592 bp, Mus musculus
gatcctgggctctgccactgggtccctggatccctggattacaggtcccttaacccaaccaatgcattttcctctgtttgaggttccatattcccccatttttactgctaggtctacattccaagcaccaccctcaatctctcaccactggaccccaagtcccaatccactggattctgtctcctggaagcatgggtgcgagagctccagggtccctcatgtggatcccacatgccccagctgctaaattccagatcccagattccttcaaccccttctctggaccacattcatagaaggccaaacttccaaacaccttcatactccaaggtctttgctcctataccccaaatgtcactccccaagtctagatcccaatagcccagtgacagcatctcatatcccagacacaccctggagctgattcccaatgcatggaagcatgccatccaaagagtcttctagaagctcaagacgccagaccagtggctccctaccaggcagtaaggaatgggacatatgaatgctgcattgcacctcagctaggacacacctcccttcccacccccacccccaaatcactttgttccccgtccccctctctctgcaatgtcttccacattcccctgccttccttccaggctagtaactcccagatcccaggtccctctgggagggctgaatctgcttgttcatgggttgggagctaccaggggaagtcagggacaccaccaaggggaccacctgcctctcacactgccagtcctgctcaggcctcagaaagttgcaatcaaggaccaacacacaacatccttcatgaaacccagcatccagtatgcaaattaagtatccccaagctgactcggagtctatttttctaccagagaacaaagtcccctggctcccaccacattcccataccctccacacttcaagattggattctgagcttagacctggggtaccccgctccacctctcagtctttagggggacctcatcaagggactgagaggaaaactgggatgttgggggggcatggtttccacctctccctccaacctacaccaagtcctacctccctgcccatgtgtgtcatttcaaggaaaaaaagaataaattttctaagctattactgttgatttttaattgtttaaattacattcgcttgtttgagggaggggcatatggcagggaagcttgtggggatctgtcctctctttccctgtgtgggtcctgcggatcagactcaggcttggtgtggagtgcctttgcctcactgaccttcatggtagttttgttactttttaaaaagtacgaacaggtgtacgtgtgtgtgtgtgtgtgtgtgtgtgtgtgtgtgtgtgtgtgtgtgtgtgtgacaacactgaggtactaccggaggagaagagagagacatgggtctctctccctccccctccccccctcccctccctccctctctctccctccccccctctctctcacacacacacacacacacacacacacacacatacacacacgtcctttatctcttctccatacctccaccctcactcaccttgtatcacccttcccctccctccctcc

SEQ ID NO: 24966 - DNA, 1197 bp, Mus musculus
gtgcagtttagcagtaaagtgctttcctggcatgtgcaaaggtcctaggttctagctccagtatgggaggtggcagtggggagcagcaaaaactggccctttctccgtgtgacaggggacatggagcccctagccttccctaaaacagacctattgcatttttgttgaccttgagtctaaggtccaacttttggataggaatataaagaggccccatggctgttgggccttatatgaaccacgactgtttctaacaggacaaacacacacacacacacacacacactcctcaacaagactgccaaggagacaggattttataaggaaaatctgggtgggcaaatttgggaaacaaggtaatgaatgagagagaatcagagttcaaggtctcgtcctacagtacagagaatgtgaggctagcctgggctatatgagacaggtgtctcaaaattgaccaaaaagtgcccccaggttgccacttcccagtactatgaccttgaactgcctctgtgactctgtagagtcctcagtctgcctagggactgagacaagaggcagattcttcttatggcctggggctgctcccttccatgaggaactggggctctgagctcctgaggcatgaggcatattctagctgtcttccccacacacgccctgtgggggtgcagtctgctggagtccctgtgtccccttttttcctctgctagggtgtctcctctgactgggatgctgatcctgatggtggcctcagcctggaggagtttactcgctacctgcaggaacgggagcagcgccttctgctcatgtttcacagccttgaccggaaccaagatggtgagatgggctctaggctggggaatggacaagtgggttagaacccgaagcgccgggggaatggggagggctgcttctgactcatggactattttgggagttctcagctgcaactaggtgatttgagcctgaactggcccatcccacctcctatcccttttgcagtaggacccctctctctgcccatacacgtttctcttcagacagtatacttggttcggagaccctcaaatacaaggatagacccttaaccaagcatcttctgggttccttaagtattaccttaaagttggagagctagatcaggggtaacgtggttgccacaaagccacaagtccctaagctcaatcccttgtcccc

SEQ ID NO: 24967 - DNA, 1194 bp, Mus musculus
cactgcaaacacaagatgtttcttgctaaaccgggcagtggtggcacacgcctttaatcccagcactcgggaggcagaggcaggtggatttctgagttcgaggccagtctggtctacagagtgagttccaggacagccagggctacagagaaaccctgactcaaaagaagattcttgctgtcaaacttgacaagattttgatccctagaatctgcatgagaattgactccccacgttgtactctgccccccacaccagtgccatgacgaatgttccctctcccccaaacaaatacataaataaaattaaacacacacacaaactctgacagccaagatccatcaattaccttttgttacttagcttccattcttgatttgggagtggggggagaaggaggtctggagctcaaatattctttcagaccagcctttacatttcagatctgtccatttgattttaatcctatatacagtggtcaaacctttggtttatggcagggtgactccctccaggaatattgtgcatcaaaggtataaacatagcttggaagatacaaaggtggaatggggttagaaaacacttgtgtctgatactgtgtcgggtcatcacctaggcaaagagtggcttgaagggtatgcagaacctgctcacgattaaggtaagaccgcccaaggtgaattcctcatccacagatatttcaggggagtggaggtgggaccccagcccacacatgcatcccttcacaggatggagactctggcctgcagagggggggctccctgagaaccccaagcctcaccagccgctctgatcgtctgcaacagcgcctgcctattagccagcactttggacaggtgaggatgcccaccgtccaccacacatcagatccttcccgaatcctgcacctgtccccagtgttcaccaaactatctccctttgtggaagttcacatgtagttcactcactatacagccaaagatgggtttgaactcctgatccaccatacccagcttaaatggtgctggggattaaacccagggccctgtgcacgagaggcaagacctgtactaacccagttacactctcccaacccccttggggcttttttgtattttagaccaaactggtctacaactcagagatccaccccagcctttgttttgtttttagaggaatcatccaggacttgaa

SEQ ID NO: 24968 - DNA, 1371 bp, Mus musculus
tcaactactacttcatcaacagccagggccaccccatcgaaggcctcgcggtcatgcactatatcacacacctgtgagtcgcccagctgtgcgcacaggtgggggaggcaggcagggagggctgggtccccacctcattatcagacacacacccccaccccctggtctcccaggctgaagggcgcccttctcttcatcaccatcgccttgatcggctcaggctgggcctttgtgaagtatatgctgtcggacaaggagaagaagatttttggcattgtgattcccctgcaggtattgtgggggaggggggctgggggggggtcccaagaaaggtgcagggagagaggctcaggagacgatggagacatgtaaggagaaattcagagaggaatgctggggattgatacaggctgggttgctccggtgacatacaggaagggaattccgtctgtggtgttggggacaacaccacctggcaccctgccatccccacaggtcctggctaatgtagcatacattgttattgagtcccgtgaggagggtgccagcgactatggactctggaaggagatcttgttcctggtggatctcatctgctgtggtgccatccttttcccggtggtctggtgaggacctggacctgcctgcctgcctgccttccagccccaccgaggcccctgccctacccaacagaagactcctgtacactggacggggtcaatactgagcacttcccatatccctccacctgtccaggtccattcggcatctgcaggatgcatccggcactgatgggaagggtgagaccccctcctggactttgtcccagccctgctttctctctgacaccaggtgctgggggccactgtctccacggctgtgcgtcttactcctctgtctgtacccagtcgtccagtcacccgcacacacttctcaattacttttgctactgttcatcctattgccccgggaccactccccacaccttgcccccttctccactgccctcccctcctgccagttttcgttatcctccccccaccccccttaccctactctgtgcccacccacagtggcagtgaacctggccaggctgaagctgttccgacattactacgtcatggtaggagtcctgccttcccacaggcctgagtccctccctgctgccctgtgcccctgagccccagccttgacctgacctctgtcctgtgtccatacctccctgtcccctgccccccgccaaccccgtgcccccaggtcatctgctatatctactttacacgtatcatcgccattctgctgcaagtagcagtgcccttccagtggcagtggctgtaccaggtgagcaaggtggagtccccaggaggggag

SEQ ID NO: 24969 - DNA, 1171 bp, Mus musculus
agagactacatctaatagccagagaagaccccacgtgggtgaagagggacaccaaaccacctataaaacttttattcgagaataggtcctgtctaaaagaaatgcagggacgaagatggagcagaatggaggaatggctgaccagtgacctgtccaactttagactcatcaatgggcagacaccaacccctcacactattactaatgctatgttgtgtttgcagacaggagaccagcatggctgttctttgagaggctttacccagcagctgactgtgacagatgtagatacccacagccaaacattggtttgaggccaagtacctttatggaagagttaagggaagaattaaaggctctcaagaagacaccaatccaacatgaacagtgtcagctaacctggatccctggaagctcccagagtctgacccaccaaccaaagagcatacatgggctagattcagtggatgtgcctaaccctgcaaaggcttgatgtaccaggatgggggaagaccagatggggtggctgccctctcagagatgaaggagaaggaacttgggagaaggaactctgcgaatggggtccaagaaggggtcagcatttgtgatgtaaataaataaataaagatatgatttttaaaaagaaaatcaagttaaggtaaatgtgatactagcataaagcttgaagcataaatagggaccaaggaattgaaattttttaatcttatttttatattctaaacctattcaataaattgtctttctcctgtattaaaaaaaaaaaaaaactccccttatttggtcttagagaatacgatccacagttgaattgaagtatgatatctaacaaaataaaatatctatctatatatcattacaactgtacgaactccatttcaatagtggtattgccataaggcaaataagttttaaataattcccaaaggatcacaaaggatcagtatttaaaattgattactttgattttatgataaatttgacttggagaaaaataaaaaagaaatcggctgaataatttaacgaaagtaaaatttccttatactgttgcatcccaactcagtccacagctgtataaataatgccattcacaaccagaactggaaaaattcaattcagtctctattaatgcagattgtgctaaaaattttcc

SEQ ID NO: 24970 - DNA, 1199 bp, Mus musculus
gggggaaacgcgtgtttatctgtgggagataaacaagatggagtcccaaagactttgacaaaatatttttttaaaaatccactagaatagaaaatacattatttagatatactttatgctgagagtgagtatatatgcttgtcctatttaaacttgtgagaaaaagtggtatcccttggtacatttagaaacacagggggttatcttgtttcatagtggggtttggggcagaagaatgaacatgggatgaccctgttgaaagaaacttagcatggccgaggggttggttccagctgattgccaggaaacacaagcagtgggggtctccttgtggggtgtcgggagctttaaaccccaaagccaagcgagacagggaatagtgtcagaccaatggaaaagtgatctagcctatttttgctattgcacgacatcaatagaaaccatgcctttgtaaacaagcaagtcagtaaatgcaatgatcatgtaatgtggaaaattgaaagcattccagtttaaaaaatatggaattttttatatattcgtttttaagatgtatatgtaaaaaaaagagttcacattatagatggacttcatggatcggaaattgcttagaatttcgagtggtttcaaattagaaaaatatgtgagtggaaggcagctgtgaacgaactgcaccctagagagttgtacgcacgttggaatgtaagctgggcttacttacctggtccctttggagtggaggcaactggagtctgctctcacctgaaccatgtgaccggagtcgccagcctcaaagatatagttagtcctctcccctcttctcccaacatctgagacttctctggagtagcagagtctcatcacagaaggcacccaacatttccactgaaacagaacttcaaagcattggatttctttgcctttatttatgcgctcgacactctcagtgatatccagatgtattctttttattaatagttacaggtttgtgggttagtgggatttcagtaaagggacaaaaaaaaaaatcccttctaagatggatcgatagaaccaagataatactgcatgtactacagtcaaggacaccaagtgatcctatggtgattccagttagtcctaacgacattagtggttctaatgtcattgtagaaatggtgagtcctgtgattctagcatttgtctctaaccaatgatga

SEQ ID NO: 24971 - DNA, 1122 bp, Mus musculus
ggtattaagagttgggctttgcatccttaatctacagcttccctgagcaccagacacaaacttggcttcagttcccagattggagtttcttccccccccgggggggaggggggcttttcacaatcttcgggtgatctggaccttaaagccactgcctctaccatctatctctacatcatcttaccttagcctatggttcttcttccccaagctgacactcccaaattggtaactcttggcacatgatcttcatcttcttgtgcccattcattttaggctgtatgatgtactcggtgactgtcacctttttgacacctgaagctgtgatttgagacttcttgtacaactgtcagagtgtttgggccttctgtcctgactactgggtcaggaggaaagggtgtcccacccctgtgatgtattccagaatagatcccaagttctcccagtctgcatttcagatcatgccctcttattccccagtcacaacaaattgcctctggttaatttgagaaatgtctgtatttggtgtttctgtaattttattttgtgtttcagttgagtaagtgttgctgaatatctgtagaatgtgtgataatttttgtaaaaaaaaaaaaaactcaataaaagaaacattaccatagaaaaatatttcatgttgtgtaaaacacttggctgagaaaatgttttaatgtattatatcaaaattcctcagagtcttaacagtttcgaatacaggaaagagctccatttggcactgaaggagccccaactaaacattgccaggatgggagaagggcatggggtgggtgtagggagcctggatcagaaaaatagttgactttcaggaatctttgcttcattgatcagaagccgctcttcagtggaaccagcactcgtccatctgtctccgtactccgtaacactcattcttcccggttccttaggaaacacattgatgagtaatacatctaacctgccttcctgtggcttccaagctagcgaaggactgcatacagggacatcaatttatctggtcatctaaatgagggctggtgggaggcaggcgctgtgcaggatggcaggaataaagtgaaaacagacgtgaactctgccctcgaactt

SEQ ID NO: 24972 - DNA, 1235 bp, Mus musculus
accttaaacaacagcttctgttcccctgggtttcatagatcttagtccatccacaaggaggaatggaaatgcgaagaataaatttttagggttctgctctcaaatattcccctaatttttaagaggctggagccagtcacggatacaagtaaaacacatttcccccaatgctgagtctgagactgtgaattgagacagggaaatggttttcttttctagatgactatttttcaaactagaaatatgttttgcatcaatgatgtgttaaggtcaagtcaaggaaagagacaatatgtcccatgtcacggagaccgggataatgagagtgttctctgggagctggcgtgaggctgttcatttcaccggcgaaaggttacaccagacagattgtttctcatttgatgtcttaaattaaaccgctgacatggcctgcctcaaagttagaagcttctgttttcaccaaacagaccctaaaggaaaattcctatttgagagagttggtctccaagctgcagcctttgaggattttctgttttcgagtcttgcttaggaattcaaacaggttttcaactgctgggcagctcctaatgtgatcgtgaaggggggcccggtggatctgaggcttggcagtttgttaaagtgctgtgtaggatagaagcaagataaatgttgtctaagtaagattcagaaacagtcatatacaagatgcacacgtgttcagacaggaaattgctgctgctacaaagaatccatctacctatttgagatgtactttggtcatcccctttgttctaatcctggcttgccctcctcaatgaccattttgcctgcctctaaaattcagaaatcaaacgttacggtgagagctcagctgaccagcaacactaatatttcagcatggcaggggctggcccaggcaccgatgtgcagctgaaccaggtccccagatggttgaggaatcctggcccacagatcttaaagaaacgtagtggtgctatgccagacacaagatggaggctggggaactgggcagtaaatatcttaggcaaggcctgcttacagggcactttcgttgagatagggtagggagagcatataataaataaggggacagctgggaacatttctggtggtgttaaggattaggacagggaatcagagaataatggggtggggtgaggaacactactataaatagtgagcaaggaaaaccagctagagaggaaaaattgata

SEQ ID NO: 24973 - DNA, 1143 bp, Mus musculus
tatgtcttatgtaaatgttcatgatgtgtgcttgtgcgtgtgtgcttgtgcgtgtgtgtgtgtgtgtgtgtgtgtgtgtgtgtgtgtgtgtgtataccaccccagaaaattccctaatttcctactagcaaagccaagggctgtttttaaatgccatcacatatttcttgtgcccgttacctaacactttatgaatgaaatcaaacaatatgtgttattggtgtaattttctcccagatgatttttctttgtggtttatctattgtatgtcaacttgatgcaagctatactctaagaggaggggaaccttagctgagaaactgcctccataagattaagttgtaggcaagcttataaggcattttcttaattagtgattgatgagtgagggcccagcccgtgtggatggtgctacccctgcacttgtggtcctggattcaacaaaaaaatcaggctcttcaaaagccattgaagagcaagcagtatccctcatggtctctacatcagctcctgcttccaggtttctgccctgtttgagttcctgtcctgacttccttcagtgatggattacaatgtagaaatgtaagccaaataaacccttcactctccaacttgcttttggtcatggtgtttcatgatagcaatagtaaccctaagacatccatgctgtgctaccaaccgtagctgagtagcaagtgtataatgggagcactacttactccattctactaatggatacctgagttattaccttgttttactaagttaattttaaaaataagcaaacacacacacacactcagagcactaaagcttaagaaacaaaaaagaaaaagaaagaaagaaattgctcatttgacaccagaggacagaaagcagctaaatgtttttccataaaccctttggcaagtgatactagccgccccctcccatctctctctctctctctctttcttgcaaacacacataacagtaaaattcccgagtcataggatctgttatgtatggacctcgggggggaaacttccaagctctcctaagtcagtggcaacttttaaggttgtagcacccaagaataagagatcaaatcagcccacattccaactggcacttgatatcagtcctttaaacttagcttgtcgc

SEQ ID NO: 24974 - DNA, 1176 bp, Mus musculus
tgtttcctaaaagcggtagataaggtaattctgtgttctatgctttttaatctgaagttatttccattaatttgggggtttttgttactgtctccccagctactcaatagctgtactagcttttgagaattttaagactttatgctgtatatttttttctgcccaaaattcatatggagacaacttgcaaaagtagccattgacaggatcagactgtgcctcagaaaattgttgtgccttccagcctacctgcctaccctccttcccacctgcccacttaccctcctgccctccttctcacctgcccctctgcccacctcctctcctgtcctcctgccccatatagaaagcaagttcacacacagaaggaagtgccttcactcacttccaggagagatcccagactttgactgctagagctatctgggcttcaaaatatacttaagtatttatcttgataagacaaggatgggaattttggtgcaggtagtaaaaatatgtagaagagatgagcgtgccatcagaagataggtttgattcattccgtctgagtgattactttaaggagcctggccttgaggaggcatttgggttacatgtcttattctcaataaagcacccgtgccagtgaaccaatgtatcaactgtgcgttctttgtatgtgtatgtgaatgctgtcatgatgacacagtcacaggagagtgtgtttagaatcggaatgagtctgtgcatatctccagtgtcatatttgttcattgagcactagaattcgttttactaggggtctcacagtttcaaagaaatcctctctactccctagtcagcattttcccctgtgatgttccttgtttccaattatttttaaatgctgtgattattagtattacttattactgctacttacaaaaacttgaggaggaataaagtcagactgatctttactgagaaacacatagcatctttgtaccaaagaaagagtgcttgtgatccaagtggagctgcttaagaggatgaaggcagggagcacctgcagacttgggtgcagcgatctgccctgtgccttatcactgaggccacatagctaagatttaagtcgttagccagcttttaagaagcttctttgttggaagtgggaaaatttccctagacagcctttgaaaagttactgtgtgcaac

SEQ ID NO: 24975 - DNA, 1101 bp, Mus musculus
tttaaaagtcccacagtctttacttattaaaagttcaatccttttaaaatatccaatatcttttaaaatccaaagtctttttacaattaaaagtctctcaactgtgggctccactcaaatacttccttcaagagggaaaaacatcagggcacacagtcaaaatcaaaagcgaaatcaaactccaaccatccaatgtctggaatccaactcacgattttctgggctcctccaagggcttgggtcacttctccagccaggccctttgtagcacatgcgtcatcctctaggctctagctgcctgtactccactgctgctgctgttcttggtggtcattcatggtactggcatctccaaaccactgcatgaccccttcagtcctggtccatcaattgcaactgaagctgcaccttcaccaatggccttccatggcctctcacagtgccgagccttagctgctctgcgtgaccccttcatgccttcaaacccagtaccacctgggtgactcttacacattaccaactcctgctgcagcacgagatacaatttggctgtctctggatcacagcctctttgtgctttcagaaaacacttcccagaagatgtcacctcaatgatgctggtctcttcttaatcacagctaattttttagctccagctaaccagcatcaatagttccagtaatgcaaaggcttcgctttactagttctggtatcttgttaatcacagctgattcttcagccctagctaaaccagaaccacagaatcttcacaatcaaaatagcagtggccctgaaaagagtcttaattttccctcttaaatttcacaagccaggcctccatcttctgcactgttctcaatgttatcttccaagcttctacacaacatctgacagagttcttaacaccgaatggatcttctagcccaaagttccaaagtccttccacagtcctccccaaaacatggtcaggttgtcacaggaataccccactatgctggtaccaatttgtcttagtcagggtttctattcctgcacaaacatcatgaccaagaagcaagctggggagaaaagggtttattccacttacatttccatactgct

SEQ ID NO: 24976 - DNA, 1190 bp, Mus musculus
gagtgcgtataacctgatctccttggagcattgtcttcccctcttcagaagtcggaggtgtggtagctctactctctgatgacctattgactggttggtgtgtgtgtgtgtgtttcttactgaagtttgaactagcacctcttgcatgccaggtgagtgtgcttgccctgagggcgagctctagccttacgtgttgagtctctgtagtaacccgacttacctgattactctattcaggaagggtcaaagggacctgtcacggatgaccaatgactctgacactcggaaggttccaagggttttagaaagtttatacagcagaactttgaacaaagaacaagtgtgcatatatttattgtactgcagttattacttattggtagaaattaagtaatacaaaatagttttccacttccagcaaagtttaatttattatatctttttctctcataggttactgatgaattattggaaaaaattgcctccagaagtcagaatataattgagattaacatttctgattgtcgaagtctgtctgacagtggcgtgtgtgtcctagcatttaagtgtcctggacttcttaggtatacagcctacaggtgtaagcagctttctgacacctcaatcattgcggtcgcgtctcactgccctttactgcagaaagtccacgtaggcaaccaggacaagctcaccgatgaaggacttaagcaggtaaatccacggccttttctgagagatttcacacactgattaaagaactgtcaccgcaacatttagaaaggttgttgcattaaaatgaattattagagactaaactaagctgtattttctatgtaaaaatgaatatttgattaggctagtgagctccagggctgtggtgatgagcagatagatcagttttgctgtgttttacagtgagtgcctaatctcttggccagccattttattagctcccagttttattagctcctgtttttttctttttattgattcatttttaaagtaggtctgtaccatactgtgctttaagttacagtattcagtttaggtcagaataagtatttaaagttattttaaaatcttcttttttttttttttttttttttcttttttggtttttcgagacaaggtttctctgtgtagccctggctgtcctggaactctctctgtagaccaggctggccttgaac

SEQ ID NO: 24977 - DNA, 1809 bp, Mus musculus
cattttcatggattaaacactaatatgtgcattgatgtatgtgttaacttatttgtttaggtgtgtatgtgtatttactttgtatattcttccccataatacctatttatgcccagatttgagaagacagacactgtcattttatttactgccatttgctctgccgtgtataggatttactatgtagactcagtaattaaataggtttttaaaattttggacgggctattagaattcttggtaagaaagaatcattggatatttatataaaatatttttctaagggaaagggggcattttcaagcaacagaatcatgcctatttccagagtctctgcaaagactacagtatccagagagcagtctacttgggttttagaaaagaggttgacaggaatatttattgaaggctatagtgtgttaacttaccattggattgggaaatacacttctagcatggcccccaaacttgtttaggtttagaaggaaacaatgcttaaccttcagagatgtgaaatcatagatgtctaactcattaactctatggcctttgttttagcaactgggaaccagtgtatcattcatatgattactgtctatacatgatctgaaagacggacggtctgcttagcaatgtaggtgatttctatacttatgcttatagaaaacaaaactgaaggcagacatgatgcaaaaggaaatgccagatctagcttacttctgggagtaaactaagcatcaaatatagctgctctagatttatacttctggatgcaaatattaattttcatttatttttatctccaagattgcttccagatttaaaattttgtgatttttgtgagccttggtgagtggctggcacctagtaaatccttactgaatactgaaagaataaatgaataaatagaaccaagctgtaagtaagcaacaaagataggaaaatgtcagtaaatttattcagatctagaagtcacatttacttgtttaaaatgagctagaaaaatgtgagaccaacaaaggaaatcaagaaccatcagtgctgttcctgagttcatcgtcacttagcagcagagaatcagtcaactgagagtatctgcaggcttccttctaggagcagtgctttgggtaagggacctgacctgagaaggacagttacagaaatgtcctagagtgctttggatttcagtcctgacccagcatttgtaaactcagataggaagtagaagcagtgtcccagggacaatgagagggactcaatatgaggatgtggccatgggaatttactaacctctgtgtgccacagcttgagcatctgtaaactcagataggaagtagaagcagtgtcccaggaccaatgggaggattcaatggaaggacgctcatagccaggacagtgctaggtcataagaagctttctatcccgcttcctactgttatttattaatggaaaactttatgaaactttatgtacgccaatcaccactggagtacaaactgagaagtttgtgataggcctgatgtaaacatgagtggtttttatgtccagtaaagtgaaaaactgggcacacagtcaagtagtggaattgcacagaatggaaactctactttgattgatgtaggatgtcacaaggtgacacatgctggtcttggactcacatttcctccactccaaccaaatggcaggattgccagcaggtgccaccaggcctggccttagttctttcaagtatgttaaattgtaaagaggaggaaaatttaaaggagaaatgtttatgtcagaattgtagtctcactaagttttcaaacc

SEQ ID NO: 24978 - DNA, 1156 bp, Mus musculus
taagactagaattcccacttttattgtgttcttgttcttgttcttgttcttgttcttgttcttgttcttgttcttgcttgtctgaggcagggcctctgtaaccctggctgtcctggaacttactatgtaaaccaggttagcctcaaactcacagagacttgcctgcttctgcatcaccagggctggattaaagaggcatggctccatgctcagctctaacaatacttcttagctgtgaagatgatcaagggtaaagctttataatgctcttctcaaagagaactttagaaaactttccctgattttgcacagtgggctggtcttcctgcttcacagcttatggttttgtttttatcttgttaagatttatttattttattgtatatatatgaagagagcatccagtcccctggggctgagttacaattggtcatgagcagctgtgtgtctggacagtccaagagcagaaagagcccttaacccctgagccgcctctctagcccctagattatggtttgaatctgagagtgacctttaataaggaatgcaaggcacctcgagacctgttgaagcatatgtgccacattttagatgtggataagtgggcatgaggaaaattatgcaaagagctggggcagattttatatgctggatcagaaccttatcacaccgccccagtgccacagcccttacctgccggtttcattacggcactgtgcttttgattgaggtttctcatcacacagccttgacttgatactgtgctgagagtattgattcagcattgtgagaaggcagcaaaatgcagaattacagcaaaacagtgttatactcactgctctagacagattcagaagattgttcaataattgcttttactttttaaaaacgtcactgttcccagaaattaaaatgactatgactaagccataccactatacctctgccttactttgtaccaagtcactctgtagagatttttaagctataacaaacaatcaagccagaccagattaaaagtattaaaacataagaggtcttgctcctatattttgtaaattttttctgagattttaaattatcttatgtcaggtgtggtggtgtacacctttaatcccagtactcgggaggcagaggcaggcagatttctgagttc

SEQ ID NO: 24979 - DNA, 1185 bp, Mus musculus
tgggagggatagagagtcaagccaccatgttcatttccacctgttcatttcctcaccaccccagccttcccctttcttagggagactctagaaatggtctcttactgtagcagccacatgcctctacgtacatataataagctagaaggatacaaaatgaaaagtccatttctcagcctcactgaccacgctgcaggtactcagcagcaactgtgactgagtcaccttgtgcacagtagctgacagtcctttatgccagcagcccttgggcagtgctgccctaggaaagctagtcaacagagagacaatgtcaaatgctcttagcctctcctctgtaactttctctaatggagaatctgagcttttcctatgtaaatggaaatctatctggtgcctgctccatatgcaaatgttctcctgggcgattcttacctgtgacagaattgatggggagtctggtaaatcacaagcactcttcacctcatcacaaatacactgcagatgtgaagttgcaaagtgtggaagccagaaatgcgaatgccgctttcaatgtgttttaatgggtgttttctgcatcttgttataacccagggacctggctgcacggaactgcctggtgggtgaaaataatactctgaaaatcagtgactttggaatgtctcggcaagaagacggtggagtgtattcatcttctggcttaaagcagattcctattaaatggacagcaccggaagctcttaattatggtatgaatactcggggtttccttttgatagtaagcatggcctggatcagcacgaagcactcacaagtgtggctggggtaaggcagcgtccgggctggaactacttgaggagcaacactggatgagaagtgttcttgtgtgtgagattgctagtcaatgaacatgactagacgtctgagaattctgtgcagaatgtgattacatgcgatgttgctgtggctctggcccattggtttgaatgtcttgtaactggtctagtaatctcatctaaggttaaactgtcagtcaagactccaggatcttgggctcagcctctggaacttatataaatcttgaccaaagagagagttgggtattgctttttataagagcaggaatttcttttttccactgaaattttttaaaatatctctatcctaagaaactcagaagacaatgca

SEQ ID NO: 24980 - DNA, 1146 bp, Mus musculus
ttagcagtccgagcccagcaagggacaggaggctggcttggctctgcctctgtgaacaagacatgaagcttaatcccagcattctggtgtacagagaacatggcactgagactcgctcatccaggctcttagaatttgcaattcacatcataactctttgcttaaattaaagaggcttttcaaaacatcatgacatctgcaacatttaaattctattttattctttgtcccagagcaggcagaggtatagtttaagattaactcatcgggagcctttcagaatcatgtcagtcatctagaatattaaatttaacagaggcacatgcattaaggaaagcttatgcaaaacattcttactgttaattttgttatgcttgaagcataatttattcatcccttctgtcgatgataattattggaattatgtactttaggaggctaatccatacccaaaaagtgcacatataaatacagttctgatttgcaagttgatttagggaaaagagcctgcagaaatgcacagaaatgcacaaaactctacgacatccttgcttaaaaaaataataattgtccacagtggtttcccggtaacactggtgtggatacacttgaacctggtcacggttccttatttctctgtctgagagctttgtgggcctgttcatgactgcgctcatcggcatccctttaggtcagcaagctgggcatgaaggagaaggctggcgaacatgagcagcctgacttccctctgctgtatctaccttgagtcaccaggaaaccttcctgagaaatgggaggtcattgcttgtcaaagacagaaaacttttctgtcatggccacatttggtgcggacttcgtgtgatctaagctttctccttaatgccgttttcttaggaagacgataaagaattacttggcctttttcagcccatcattctgctaccaggaccacagggggaaaatcccatgtgattctttctcctttttccaaggcttaccagggacagtagagttggttcctgagtcatagctggccaccttctcacaaacatccatccacacagcctgcagtcattcagtgtgagtctcacagagaaaacagaattcctatgactgagagtgtgctaatttcctaaaacaaccaag

SEQ ID NO: 24981 - DNA, 2869 bp, Mus musculus
gccttttacagagatgctgagtgtggttcataacagccaggtcaaatgaattacagttgctgtatctagctcttggtaaatcttaacacactgtggctccatgggtacctgacctgatgtacacacacacacacacacacacacacacacacacacacacacaagttaaaacaaatcttttcttaagagacacttgacttgcttcgaggataatgatactatgatttctgactgactggttggttggttggtttgttccctctctccagtccggaacatgccctgtgtgccgccgtcacttcccacctgcagttattgacgcatctgcagctgcttcctctgaccctgaccctgatgcctcgcctgcaaatgacaatgctgaagaagccccataaaccatcacgtggaaatgagatcaaaatcctacacagtaaatctgcaaattccttctaaatctgatgtgcaaataattatatataaatatatttaaaatgctctatatagtatatgccatagtttaggaagagaatattaccctttctaaactgaacttaggtttgcagaacacactaaacatttccagctgagtgttgaagccgtgcatcccttttcttcggttgaccatggtgttgattgtgacgtcagcagtcatctctgtggcacacctttcccttttgtctaaagtgctgccactaagagatcatccttacgctcccttcccacatgagatgtgaagactgtggtcacaacagtagtagtacaacttggtttcattgaaaataaactgaattctaaagcatgctttctcactggtccctttgcttttgctacatcgaaacctcttggtttataacaatactgagaaggttaagattggagcttttcagaatgccaaacaaagactaaagttttgaccagaacaccaaaaaataaaaaaataataataaaaatacatcttggatgtaaacctcctgaaatggtcacgtaataaactcttcagtgagcactggatgtgtttaacggcgagtaaaacatgtgaataatcggatgtgctccatgcatggcacagttcatggtttggccttatgaagcactgtctaagccccgatccagtctgcttctacttgttaaatacttgaaggtccaggacactcttgacatgtttgtttaagaagttggatatagttagcttaaagtagtttgggttctactttagaaggtctgaaggtttgcacatggtcatgttcataactatatcacccccataagaggtgcacagcttttaggtgatcacaggagtgggcaagtgtgtatagacatcggtgtaacgggtcgctcacgagtgaaaccagacatcagcactggggaacaatggcttagacggcatagagcgagtgtgcacccacctgctcctctgctcatagtgtcgggaatgtttatgtagcttccgaaatgcagtttcatttaatagctctgtgtaatatctctgagcattttatattctttctttttttccagtcttaaaaataaatgaattttcacttttggcacatttgaggcttaaatataagaaacataacacttgctttctgatttttgcatatattgtaaatgtggctggtatttacagcaaatactgtgtatccttttatgggtaaaacacaagtgaacattgcatgcaagtaatgtggtgaatttgtaatttagaggttttctggggcttctgtgactttggatgcttaaattgaggccttaatgttgctctagctagcatgtttcctcctgatgtatatagtcagcgttgtataaactaatctctgcttgttttctactctgtgatctttccataccgtatttcattgatcagttagtgtcagaagtcataccagagtaacattagttcctatgtgtatactgtggatatttgtgaattgtgtggtttgtttgtttgttttcttttatgtactgttgactagttatggcacttactgattaaacttacactgctgcagattgctgtgtaacaagccacatgttatgtttagtcactattatgggaccttggtttttcttctagatagcagctgtcccaaagaaaatatttcttctttgcctattaagatgtagctattatctgccagttgttaaaggggtttggttccaaactcaaccagagagttgaacgtaagaaagctgttgtactttttgcttcccatctgttaccgtccctcactgttggctccttactacgcatacacagctgctgtggggagaaagctgaatgagacttgtttcaatttttttagaaaagaaaatgaagttttaggactttcatggtaacaaacctgacaagttcagaccccagtatattatttgatcttatcttggatccttttgaaaagttaagaatatatgaaggtaaattagaaatagtgaaaatattgataaaatgtcatttatcttatttctctattttatgttgttacttggcctattaattttaattttttgaacattttcttatttctcgtatgtgaatgctgatatttaaagttcaactcatgtggatttcttttgtgtttcttagttgttatctctaagctaactaacttttaagattatttgtgatatggatttatatataagctgttaaatatatatgaactgttaaaacggaatgcaaggttttcaaaagcccaggtctaactgtgatgattggtttattggtctacaatcccagcctggcattttccgtgtaaatcataaacaataaacaggatatactcggtgttcatttctaatatttaattgtgtgaccctatcacttctataacataaccctgaaggatttagagtcagtaacaaagga

SEQ ID NO: 24982 - DNA, 1195 bp, Mus musculus
tagctaggaggatgcctatatatttaatttatcaaatacattaaatatttgatcagatgacattgttataagtagctattaaatagattgacatgagctacaaaataagttggataagtccctgatctctgtgagttaggaattgctagaagacatccaacataaagaactctaatagttaaattcaacactgctctgagcaagctgtaggataaacattttttaggggagcagaaaatgatagaattttaggaggtaagtcacaaggttcaaattgatttgtaagaccaactgtcagttaaatagaattaagatatttgccatggaggccatgatctttatgtaaaatcttcaaagttctaaaatcataaattggccacaaaacttgatctgaaattaacttttttgatagatattatggatccaaactaaaataagacatattttccaagtaatcatattttgctccagcgacatttacatgtttgaaaagtatttgctgacctggattctattgggtgttgtcagccattgcttctgaacttgggagaaaagatttaagtcctaaacattcagctctaagatcgttgggtttgactgtgagtctctgtctacttctagatcactattgaaaagaaaaaaagagtctttagcagtttttctttggcaagtggagggttgttactggtttttcctgttacacatttcttgaaaaaaaaaattacttcactagtgtcttcaccattgtggacccctagagcaaaacaaaaataaagacctttaatattgctgacttttttgttgttgttgttttgttttgttttttgtttgtttgtttgttttatgttttttgttttgtttttcgagacaggatttctctgtgtagccttggctgtcctggaactcactttgtagaccaggctggcctcgaactcagaaatctccctgcctctgcctccccagtgctagtattaaaggtgtgcgccaccatgcccggctattgctggcttttcaaatgaaaatgttaaaaattgttttgtttttgtttttaaatcagccctaaaacaaaagtatagttctcatggctcctgcttttcaataattggggttcccccaagtgtgttcttagtatgtttagaagtgatgtcaatattatgaacaatggtagttttgtaaatacagtggacatgaggag

SEQ ID NO: 24983 - DNA, 1148 bp, Mus musculus
tgaccacgtagcaattgagagtggcctttacggcttttctctgttgacacacatacattttagtagaagcagatgtgtggagaaatccgaagaatccaagtgttgacaagctaacaactagttgaccagagcaatctacaacctacccgaataaggctgatgttttgcctttttttttcttttaatatgacagtttaaatgactggaaatagcccttgccatttcttctgatatgccagggtcaatggcttggtgggaatttaatgaaatcggaacgaggacttgcggattctgtcattagtacacagcactagaagtatttttttcttttagaagtgtggaaataaaaagctggccacagacagatgtttccaaatgtttacagcttctgcttcccctatagagcacagagagaaaatatataacacatgctctctgctgcctttaaattttgaacttgggagtttgcaccggccttgtgcaaaggctggagtaaactggcagccagggcccgggagatctgagctttgtcccacatgctctctaattttggagttaaatgtacctttctccccccaaccccattttcagagttttctctttgcacgaaatatataaatggaactcctcttgcccagtgacgtcttaatagtgtcctctagctttggctgggtgatcgcttgaacatgatttatgcgaacatctgcatggggttctctggcaaccttgacatttccctctgtttctaaagcagcgagtgactcattctgttactgagacatctcaggcagttggttctcccattttcgtatgaacccccagctcactgagaagttgagggtttgcctagagtgtacagcatttggcagagcggtggtggtgaccttaggaagtggtgcgttgtctgttccgagagagagagagagagagagagagagagagagagagagagagagagaggtggggggggcttgggagtggcatcctctgtgctttatctggacttcattgtagagagaaggtttagaataggtgggccactgaatctcccagtagctaaactccataagccctcttcgtaagtctcacgtgtttgaccattaacttcatgtgatgaacctatctccccagctactgctcagttggtg

SEQ ID NO: 24984 - DNA, 1169 bp, Mus musculus
tgttgagctatcttcccagtcctgacatttctactctttcttactttataatttattttttgatacaacaaagattaatttttttcataagagatcatgagtgttttgtatcatgggttgtggattatgtgcccaatactttcatgtcctagagcatggtgggcaacagcctttcatgtgttccttggttttctcttgtaatgcataattgagatgctcctgagagtcgggtgttgtgccagccatcaggcatggggagcaaaacagctgcccacttagtggggaaagagggatgtcacgcatgagtcatccactgggtgattgtgataatgctgtggagaaaatgaagtgacgtggagaaagagtactataccgaaggctattttagatagaatagctgagagggcatttaaggtatcttttagggagacagttgaagcattgtacaaagggaaaaaaatatgcattaagtcaagagagtcggcaagaaggagctgacttggagctgggatacaattagggcaaggctaagttgggaaagattgttgcgtgcatcccggtgttaacggagggggtcactctgtgctttgactgtgatgaagaatgctccaaatgcagtaagaagctacagtggatattacagcaggctgttatctgggcaaggcatggatggctaaacatgcacatagggagacagagttgattcggaaaattactagtgccttgtagtcagggtgttgggagggtggagggagagaggtttattgattcaacaagtatgttggagatagataggaattaggtatggaggcatcctgaggacagaggaagaatcaggacaccaacattttgaaggagctgcctggggagaccagagctgctttccggagataggagaatgttgtagctctgggagaagggtgtgttcagcaggtagggttgatgtcaaatagagcaatcagtaggtgcttgcagctctggacttgcctttcagaggtttctgcagaatatgtacatgagcacaacatgacatttaagcctctgagtggatgagcttatccagtatagagacgtcgtagacgttgtagctataggtgctaacccggaggctgacattcagaggtcagagagagaaggagccacaggaagaaagtaagggcacatggaac

SEQ ID NO: 24985 - DNA, 1144 bp, Mus musculus
tttgataggtacaatgttagttttatagaaaattttatcattaatattttctataaaaagaatttgcattgaaattgtatatgtgtgtgtgtgtgtgtgtgtgtgtgtgtgtgtgtgtgtttgtgtgtgtgtgtgtgtgtgtatacacatcagtgagccaggtatggtagtgcttgtgtttaacccagcacaagtgtgaaggaatgggggtgggcagagagagacaggtggatctctatgtttttaaggccagcctggtctacaaagtaagaccttgtctcaaaaaataaaaacaaacaataaaattatcagtgattgtaagttaaacgtttgtttcagaaaatatattaacggctcttttctgcacttagggctgctgaaattctttaccagttggccttgaaacaagctcagaaatacaagataaataaatttctttcatcacctcattacacaacactgacagaagccagaaggaacttaggactatttcagcatcatgatgccatcacaggaaccgcgaaagactgggtggttgtggactatggtaccaggtaatgcagtatggaatggaaacacaggttcaagtacaatatttttaatgtgcgtgtgcgtgtctggagatgaagctgctattgtatagcagagcacataccaaatgttatttgttctaatatatatatatatatccatagctaaacatcaccaactttgaagaactctgtggaagcgtcgtcgtagccccagtgttcaacttcggtccctgtccttgtctccagctgttaagctttgtcttaaagccaggcttgcgctcttcttagcccagtgtggcagctgaggttgtcttctttatccaatacttgacatttaatcagtcatacatatcctgggcaggtaattgagtgccattccctcgtacagcagcttaatcctgtcttctttcatacccagtcgtccttgaatgcttgacatgtcttagagggacaccgattggaaagccagataaggggaaaagcagcaaggactgcagtaagccagatgtgtggggagaaaaatggcggaagtgcgaatggtggctggagttaacaggaagggccttcctcaggaggatctctcaggcagctaaggaagcagggactcagat

SEQ ID NO: 24986 - DNA, 2198 bp, Mus musculus
ttccactttaggtaccacaaggtgtctttctatacagctcatttgaatacaggtgttccaaggtggggttttctatttttaaattaccatatcaaaaataaatgtgccttatttttttataagtcttgttaaatcttattactgtccatattactgtttgggaggtggggtattgggaggttgggatagggggtgggtactttctatgacacataaattatgtaaaattttttgcttgataatgctggccacatcctgatctgtgtcattacatttgtggtgatgttactctaaacattttgactatttgaatgtactgagatgtcagaaaacgaaacaagggagaaaaatattgctaattaaaatatgctgctgccaaggaaactgcaagttgaagcaaggatttcgtaacccacaagatccaagtacttcttgcatttcacagtacttaaccgcgttaaagagagaatgctttaaaaatagactgttttctaaaatcctctgtgtgtagctcatcttatgttccttactaaagaacacgttccaaacatttgtgtgtggtaaactcagcgtgttagtctagcccatgtaccatcatgggacctttgaggtcatttgagatcattgtttctgtaatagaataatagtatttaattttggtatagaaagaatgctttggctatatccacttttgaaaaattctcctcagtgtcttaacctaatttagtattctttgactttaaacctccacttacctcttaccattccagtacattacagagaaaagcatttctgcctcactgtttattctgatcgtcatctggattcttcctcaagatgcagctcctacattcgctgttctgttgagttcctaaaatcctttgcctataatcattaaggaaataccagaatgacaggaccattgcaagggtataatttcatgcagtaagcatgtgacgtacattcccttcctcatttgttggggaataagcaactgaaagtacaacaaaaccacttcctcctataacctctgcagacgctagctaggacgaccaagcgccagtcccacgaatatgatctattttcttgttgtatcttaagtgtatgccttcctgtggatgttcactgtgctctgtggttaagtggctatgcttaatcactacagaagttctgatgaggccaaatgaaaccagtggctgacataaataataaacaaaaacagcagacacaggggacccactctgtgttctggccaccagctccttattcacaggtgaagcagaaactctatgtaaccagcaagcttctgctttttaaagttattttcacattacaacactggggaaatgaagagagggtgtcttttgctttgggttatggtcagaaactggtttctctggcacacgtgggcagtcagccacacttcagacctgacagcgggggagggggggggcggtctgtttagttaggcttggtacatctgttatcacagatgctcagtggaccaagactgtctcgctactctctccccactctctgaaattttaattttgtttagaggtgcatggttcaaatatcagcattctaaaaaaaaaaattgatttaagaaaatgctgtatgatgttagaagacattgtaattatcatcccgtgtctttgctgtactcgtgctgaagtgttttcacagtcctttgtctagaagaaaatgtttactttcattgtgattattttgctcattgaaatcaacaggttttgatatttttctcttggaagatttttataactttttgggaatatgtaatataagatctctaataaaatataatcttatcctgtgcattgtcttctggagtaattcttaatcctactttcaaacagatctattaacacttttataacaaagaagtagagcaaagcagccgaggggccaggtggctgttcttggttctgctgtgacaaaatcagctctcttcagcccagccctagttaaaagggtgggggggggggggacaggatgagggtgtgttctgtgaacaggtggtagatgaatattagtgagttcacatctgtgtgtgatagattaaaggaacactttggtcagattctagatatggaaagaacagggcagaacaggatatgaaggtaaatcagcacacagagctaagaaggcccttgtaaatagatccagaaaataaggcc

SEQ ID NO: 24987 - DNA, 1444 bp, Mus musculus
taattttaattgttttagcagatttatagaattattcggctttatttatcgctttagtacagttttagaatttttcctaattccacaggtttccaaggtagatgggaatttattcttgctcctcttcaaagccatacacatgtactgaattcctttatgaacttttagctctgctactcacctgtgtgtgctgtttaaaaatctttgttttgtgtcttttccctaggatgaaggcctaaggctcagaaaggtagcacattcggataaacctggatccacctcagccgtgtccttcagagataatgtcaccagtcctcttccttctcttctggttgtaattgcagccattttcattggattctttctagggaaattcatcttgtagagtgaagcatgcagagtgctgtttcttttttttttttttttcttctctcgaccagaaaaagatttgtttacctaccatttcattggtagtatggcccgcggtgaccatggcccgcggtgaccaattttttttgtgtgtacagcgtcatataggctttgcctttaatgatctcttacggttagaaaacacaataaaaacaaactgttcggctactggacaaattgtatattatcagatcatcactagcagatgtcagttgcacattcagtcctttatgaaattcataaataaagaattgttctttctttgtggttttaataagagttcaagaattgttcagtcttgtaaatgttattttaataattcctttaaattttatctgttgctgttacctcttgaaatatgatttatttagattgctaatcccactcattcaggaaatgccaagaggttttctgtgggggaaatggtgcctcttactgtgtaaattttctcctttacctttgctaatatcatggcagaatttttcttatcccttgtgaggcagtttgttgactgagtttttcatccttacaatcctgtcccatggtatttaacataaaaaaaataaaactgttaacagattcttgctcgatagcttgtttgtgtctgtcatgtcatttgtgctgggttgggcgtagggtcagagtgggatgagccagcatgttcactctgcagtgaactttattggacttaattgatttgtttgtttgctttggtttggtttttcgagacaggttttctctttgtagccttggcagtcctggaactcactctgtagaccaggctggccctgaactcagaaatccgcctgcctctgccttctgagcaccaggattaaaggcgtgcgccgctgccacccacccagtgggctgtataatgtgtactgttaccttgtatgaaactctttccagtccttgattatttgtaatttaaagtcttgagactgttttaagaaatgacaagatttcaagccaacgtaggtattttggaacatcttaattgagtttatgaaatgta

SEQ ID NO: 24988 - DNA, 1196 bp, Mus musculus
tgagtactgtcaggttttagttttgtagttggcctgtgaacgtaaagattagcactggtgaagaccactgggggacttgtgtcagtcatgtgatgtgttatgaacatgctatatgagtacagtttggctgacaagatggctcattggatggagatccttgttgctaagcctgaggactggagttggatttttggaccccacataacgaaaggagggcaccagttgtaaaaagttgtcttctgatctccacatacgtactgtgacatgtacatgttcatatgtgcaacacaaacatgataaatgtaaccaaaattaaagaacaaaaatcatagttattttatggatgaaatcatcaaaagttgaaaaaaaagagagacaatttttgttttctttagaaaagtgggattgagattatattaacttaatcttgaattatgcttttgttgtgactccagttaatcttttctctgtctgccccttacctttcaggccccttcacagatgtagtcactacaaatcttaaattgcaaaatccatcggatagaaaagtgtgtttcaaagtgaagactacagcacctcgccggtactgtgtgcggcccaacagtgggattattgacccggggtcaattgtgactgtttcaggtagtactccatgtcctagacctttgtaggtttgaatattgacatttcatgactgttgcatttgatgtttagtgtttttatctgtttattatttggcttcagtgtttgtgtaaagatgttccttgggtatcttaccgtacagacattttattgaacctttcctcctcgagacttacgtgggagtgtatgattgcctagggtcaatttgaaatgttatctattctgtatttccacagctttccactgtagcttgtgttcttatttatctttgaaatggcactgttttgtgattaaatcatgttctgtgcatctacagaagcgtttgagtcttaaaaaaaaaatgcctgttttgggcctacttttaaaatcagatgagtttttattcctttcagtgtaaatgacaacagtgtcttgttccttgtttattgcttacagtagttccttccatacacatcacgtattcctgctgtgagatctactgtgctatccaaatgttcctttcttagacagcctttccaaggagacagtactttgtaacacgtgccataggtggc

SEQ ID NO: 24989 - DNA, 1213 bp, Mus musculus
ttctcttttccagggcagacaagacgccctcggcgagccaaaagccgcgtcagcggccccacccactcgcctccaacggacccaggtcgccttcccggttcccagcagccaccgcggaggcgccgcccgcacagggcatgctgggagtcgaggtacccggcgcttcatgactctcttccgttcggaattccacttggaacgccgtgaggtagcgtcgtagtcggcgctccagccccgcactcgcagctccagggccccaagaacgacacccccttcccggggcgccgtgcaccgcgtctccccgcaaagagccccgctccgcccccccgaccctgctctacggagattgacagcggcgcggcgcccggagctgcggccaagtcggaggtgcgcaggcgcactagctcagcgttgacccctcccaccccccagttaggcccggagggcggggccagcacgagggctccaggccgcgggggcgcgcacgtaggcacgtagggcccgtcacgtggggcgccgaggatcgcagtgcgcgtggccgcggcggctggtgtggggttgagtcagttgtgacacccggagctgctgagcggacaggctgccctcgggacccccgcggcccggcagcaggcgcggagcttcgggaatcgtgagcctggccccgtcctagagctccgcggagccggcgccgccaccgtcccctcgcccccgccagcgaaccgccgccgcgggcgcgcccccgctctgcgctgcgctgtctcctatggcgtccgcctccggggccatggcgaagcacgagcagatcctggtcctcgaccctccttcagacctcaaattcaaaggtaggctggctgggacgctccggagcggagctgaggctggggctggggctggcgggcggcggcggggtggccgggccgtgctcccctcccccacgccccggccgagcgtcggagccgcggccccgctgcgtccctcggccccgcgcctcgccgtccgccgctgccgggccgggccgggccgggctgggctgcgctgcggaggggaggggagggagccgccgggcgccgcggagggctccgccgccatcttgcggccccgcgggggcgccgtgggagcccgcccgcgccttgcccgccggcccgcatggcgtccttgccccaggggcggccgcggcgcggcgcggtgcggtcgggcggtgcgggagggcgac

SEQ ID NO: 24990 - DNA, 1759 bp, Mus musculus
agcaaaccaggcagagacatgttaccaccctcaaattctggacccctaaaggtgtgaaatcagaagacatccttaaactttgccaactttggagagaaagggtgtcaaacagtcagtgcccagttcattgacggtgcttgtccgctccaggacgtgagcctcaacatagtcttcctgcttctcccaacttgggagctaattgagtcctagaatacaggggatagcaaatacttgtcctgattcaagagaatcaagactcctacatgtcccatagcaggagtctcactgtcagcaaatggcatctgtatgctgtgccagacttctcaagaccatcagtgcctatcccatgtctccaatatcagcagctgacaggattccccatgctggcaaagacattcgtccactcactacaggtcaaacaaacagagaacgattgagctgaagttgaggtgacctctctcgagtaccaagcttagttttgaatctttccccatttttggggggaaccttttgccgggagcttgtatttacctggatgacggtctagatttccaagccaaattggtactgttcccaggagaggatgccccagctttggattgggtttgcagtggttgagttttgcatgaactgtctgggcttcaccttgagagtgagctgccctgggttggatcagagaagcattgtgagggtacgaccccttgcttttccccaggctgcatgctgttgatgtcacagccatgcagggggtaagtgtgcacacgtgccaccagcctgagcagagagagacgtggcttgggcacacaactactcacaccactttgagccttctctgcaggtaggtgctaaggcctttgatgcttctcctcttggcttggcattccttttgggatgtttttaaccactgaccctcgacaaagacctagacacgacaattgctccagacataggatgtagtgtccttatggctactccccaaattctgttcccaacccccattttcttatctctcacaggtgagcgggtttgtatatgtgtaaatatggtttttatgtcaactgcacctacatgtaatccattttagagtggctgtgtttggctcgtgaccttgtgcccataagtgaggcacagaatgtcaaagggattctttctcaggagacgtccccaaaggacagtggcagggctgtgcaaatgttttatacaggtacagaattgactcaccatttttttttcattaaaagtggtatattagggtactggatatgacgtcatcttgcagactaacctgcatcctagccaacagcaagggctgtgccccagtaggaatcccgttctttcctgaggttaggtttggaggatcaacatgtttcctccgccataatggactctggcttgtgtaggcttcttgctgctccgtagcattccgggcgaggcgtaaggaggcagtggtggtcagccagggattctggctgtgctcatgtgatcacggctttcaccattgtcgtgacacccagtgactcagcagtcataccgtcacacagactgtcgccctctccggtgtttttgtaaagggtttccacttgggctggacccaggtttggtacctagaagatccttctgcagacaccgaggaccttcgcatcttgtactctgttctctgataacgagtttcgggttggcgctcctttgtatcaattgcttttgattttaacccattggtatgattcctactaataaatattttaagttttactgagtg

SEQ ID NO: 24991 - DNA, 1184 bp, Mus musculus
gtcaggccccagcttcagcctgattgatctgtattgcatttgtcctccacgaccctggtgggttgctgggttaattgattactatcccgtgggttattggggactgtatcattcttctgccagctggtgtgatgcgcttcctgccagtcattcctctggaatctcaagtctctgttgaatttctttgactgtagataacagagctcatcataggagatacgacttttaacgtaacgaatgtgctttaccactcctgtgatgagacgataattgaagtgaaaattgagtcactaaaatttcctaattatttggataaagcttaaaaaaaattggtaataaccttatcagtaaaatcattaccaaattttgctttttagaaattacagatttagtatgtgacttgcagtaagaaaaactgtctttatgagacataaggattctgtattttgaattctaaataacaggtactagtggcactgaacactatctgactttctcctgtagacaaatggtggcccggagtttgctggatactctgagggaagtctgcgatgatgagagagactgcattgctgtcttggaaagaattagccgattagctgatgactccggtatgtgtctacagagagacagcacattgtttctagaaaggcttttgccactgaacctgtctttctaagctactggagagacgagatagaagatttcccaagaccttggcaagtgaccccacctctaaccccaacactctggaagagcttgtgttccaaagctattccgtactacacagagagatcctttctccccccccccccaaattcttttttgaaaggaaattattaacttactagttctatgtgaaaaaaaaatccagtttacatatgtccatttacttaattttggaaatttctcatcagtataaatgtaagaaattaggttacttctgtgatttatgttaacataaccatttttaaattatttagagtaaattggaagaagtggaaagggctttaaatgtttgtgggaaaataatacttcctgtctgatttacatgaaaaacatggattgatcgctcttggttttgctttggtctctctgtgtagccctagctgttctggaactctctgtatagaccaagttggccttgaactcacaaagatcctcctgcctctacttcctgagta

SEQ ID NO: 24992 - DNA, 1160 bp, Mus musculus
tataatttgaatgttttttgggtctaacctcattgttgtattttccagaagtgacttcttatcttagattaaggtgtgtggagagtctaacaaatttattagaacccttgatcccgttataaagggtgcccgcttaccagtcttcacccagtgccctcagtgacactctgtctgtcaggctgtctctgtaagaactgaagggagtacccataaatacctgctagggtttgcaagttacaggttcctacattagaagttttcccatctgcaaaaacaatgttgtctctacaatttgtttggttttggtttttcgaaacagagctttctctgtgtatccctggctgtcctggaactcattagaccatgctggcctcagattcagagacccacccacctctgcctcccaagcgttaggattaaaggcgtgcactgccatcacctggttgttgtagaatttattatatatttgtcttttttatactgtggtgttttcttggtaggtgaggaaaaccagtcaggcagctttgctggctctgctggagcaggaactgattgagcgatttgacgtggagaccaaggtgtgccctgtcctcatagacctgactgccccagacagcaatgatgatgtgaagacagaagctgtggctgtaagtctgttgcctacctttcagggagctttgagagtgtgctggtgtgtggtgtcactcccatccttggttcctgagctgagacagggggataggaaagtactaaatgaacctgactggacacggagcattagctctttatacctttaacactgatcttttgttggtataaaaaacaataacagaaattgcgagtgattccaggttatctgtgagaacagtgatgatcatatagttttctgtctcttgaaaaattcccttttcattgtttcttacaatagtagataccaattaacaaaaatgtagatttttttttcctcaacagttttcattgttgtgaaattcataaaattagccatttaaagtatagtattcagtggcatttgatacaatcacaactgtcttagttagggttctactgctgtgaacagacaccatgaccaaggcaacaaggacatgaccaagtcttataaggacaacatttaattggggctggcttacaggttcagaggt

SEQ ID NO: 24993 - DNA, 1127 bp, Mus musculus
cacgagctctggggggtactggttagttcatattgttgttcctcctatagggttgcagacccctgaaagtattttgtttacaaatcaagtttctaatttagcttgctgtttaatggttgtaaaactcactgacttttttgtcttttaattaattgactgtgtatttttaccaggtattgaggatgtgaatgtttgaccctagcactcaggaggtagaggcaggtagctggaggccagcctgggctgcacagttaggtcttgtttttgaagcgtacaggaacacagttctttctgtgttggttaggatatgccactcagctcctagtgtctgaatagtcaagtgaagagagagtcaggtttcttttacaaggctttcctgttatcctgaacatactttggcttttgtatatgcataggaagtatgtgtgcattaaaatatatatacctctttatgcttatgtttattattgtcctttttctcttcttaggttcgccaagcagcctttcagtctctggggcctttcatatccacgtttgctaatccatcaagctcgggccagtgctttaaagatgagagcaagaactcagaagactcctcggcagaagacaaagacaggtatgatggtgaagctttgtatacttgtgacagctttcccactgcgttgccggataatgttagttagtgagtgctttatagtttcttggtgatacatacattgtcctttggttagctacccattgactgagaaaatgcttggaacacacagcttgatgcctcacacagagagtggcaaacctgacttactgagtagttagtgaattatttgcctaggaaactattggtgcttacacaatatattgaaagcttttgtcttaaaaagctacttgaatgtttgcttctgtatatagtctactctgactctttattgttccttacagtcaatttaacgtggatcttggattctctgtacaaagagatcattataatccctcactgagggaagcattctttttaaaaagaatgatttatattgtttttatgagtacaccattgctctcttcagagacaccagaggagagcatcagatcccattacagacgcttgtgagccaccatttggttgctag

SEQ ID NO: 24994 - DNA, 1121 bp, Mus musculus
taatttcaatatcaaaaaaggagagtgaactggggtgcgatagagatgcttaaatgttgccgcccagaagactctgcagccgcaattgttgcatgttggctggtttgtgtaagtgcctttctgctagaatagcttagtgagacttagcagcttgacctatggactcctgaacttgaggcctgcaataacggtgcaggtgccttcagcaactagacaccgtaatcagacagcacactgcacacttttttccgtgcagtctcttgaaggaccagtgatttcgccacggtagaaaattgtttccagctctctcacagcagtgtcagaaacacccgtgtactgacaccagcgtggggagagaagtctctgcgggtgttgagcttgttccgttcacagtctcctttgcccacagcacaggtggacgtgctgtcggctgccctgcgagcttccagcctggatgctcacgaagagactggtggtgtagagcagcggagtgagctacaagatgaagtgtgtgtcagtgagcttccagactgtaacataagtcacgacacttgtgtgcctttgatcagcgctgctgaggaggtgagctcagtgcgtcaccaagcgagagctgcatgagcagtctccgtggggaccgtggggaccgtggcggccagcactccagccagcgctctgctgtcattctttctctagctcttcctttgtctaaagtaaaaatagttattctcacctcatccatccttgtgactttagcattgtgactaaaggctcaaaaaaagtcaatcctgtctatatgactgtttagatgggcggatgttgatgtagctcactgcagtgaaatagtcttactggaaacaaagccctttatcaagaataattaactcttcccttttctttttggagaggtgctttgtttctgatcggaccatttcactgcagcaagcaacacagtactctgagcagaagaccaggacttgaggccatgctgcggagggctgtggcattgtctggactcaagtgtgagggtgggtactgcacagcatcgtctttgctgcatccacgtagccattcacatgatcctaccctggtttcctactgcctttccctcaagccagaggcag

SEQ ID NO: 24995 - DNA, 1086 bp, Mus musculus
acagagtatctaaataattagctgatgtctcattttttttttttttaaagatttatttattgattatatgtaagtacactgtagctgtcttcagacactccagaagagggagtcagatctctttatggatggttgtgagccaccatgtggttgctgggatttgaactccggaccttcggaagagcagaagggtgctcttacccactgcgccatctcaccagccccctgatgtctcatttttaaacctcgggttgatcgttttgttgctgtttgtgtctctgcagacagctgattttacttctggagttatacagtcccagagatgtttatgattacctacgacccatcgctctgaatctgtgtgcagacaaagtttcttcagtccgctggatttcctacaagttggtatgtttgtgcttgttggcctttgcatctgtggtgtgtccgttccgaggacaggagacaagccttacattatgtttccttctaggtcagtgaaatggtgaagaaactccacacagcaacaccaccaaccttcggagtagatctcatcaatgagctggtagagaattttggcaggtgtccaaaatggtctggtcggcaagcctttgtctttgtctgccaggtagggaaggcctggggagccctgctcgtgagactcctcccagtcctgcctctctcccctataatcatgagaaactgacgctgctctctggctgtctttcatgaggttgcatgctcctccaagttaggcatttgttggtttcattcagccagcacgtcctcaagctggcataggcacatagccacgtgtgccacaactccctccatacatcacagtgcccaccagaagtcaggttggaaatcaatgtatgcgctggctgccctgggtctgtttaaagccaagcatggtagagtgcacctggattctcagcacttgagaagtggacagagaggatcctgacctaaatgacctaaatggaatgggggaaggcagttgaaatttaccttatgataaccctaagactcaaagataggggctggagagatggctcagtggttggtagcactgactgctcttccaga

SEQ ID NO: 24996 - DNA, 1644 bp, Mus musculus
tattgtgcaggcagcgagccttctgcacctgactgtacttgactaaactcccaaacaccaagactaatgttgtgtcctgcacatcgtttccagagtacttcttagcctctgccagctgtcaccaggaggccgtggagcagacaatcatggccctgcagatggaccgagacagtgatgtcaagtactttgcaagcattcacccctccagtaccaaactctctgaagatgcaatgagcacagcttcctccacctactgacccacggtgtccatcctgcatccgcaagagcctggcctcgactgcctgcaccactcgggacagctgtggtgggggccttcctcctgccaactcattcgcaggtgcaggttgcctactcccaataccagtggttttaagagtcaagagaaagtacagtaaacactattatcttatcttgacttaagggaaagtaaatctcagaggattataattgtcaccaaagccttaactcgttccttcatcttcctgactgatggcttgaattggcagagcattttcccttcgggaaggatgaggttcccagagacctgcgttgctttcttctggttttatttaacggctgataaatgacattcttacggccagaaggtggatgtgcaccggacaggaaaggccttcagtattagcctaagcatttcttctaggtgctgagcctgttcagctccttggctgccctgcccagcccagccctaagtgtgaatagttcttggcgtgtataaatgacaaaggagtttttcctctcctaagggcttgatgttaacactaaatagaatctgattttgactcctaatgcagcacattgctgtacacatttacagaatgtttgcagaatctctcctgatatttttcatgctggtcatgacctgaaggaaatttcttagcacgaatattgtgtcaggtatttttaacttgatcatggtcagctctgaggtgcaactgtgtcttcccgtgctgcacccctgtgaccactctggggtgtgcagcctgaatcatgctgttagaactgttgtggtacaagctccaaataaaatttattaataggatctataaagagagacaccacccactttgtttcctaaatgtctacaaataaatgcagtatgtggcctgtattacttagcataagatgggagaaaggcgtttgtctttagctcagtgttcacctgtcagccctcctcttggcaggcggcagcagcctgaagtccaggctgctatgaacaccacctactcagtgcgccatggaagggcagccagggcgggtgttggcttcacttgaggactgacccagccttaggatgctaagccttagcttccatccacgaccccttcggccttgcagcttccatggtgggagagcgcgcaccttcacgggtggcccctgacctctgcaggagtgcaatccaggtaggtggttccaggccctgctgctccctggaactgactcaccctctctcacctctcaaaaccaggaccacatgaaacagctaccaaacctgagatgcagatttgcccaccctggaccacaccttgtatgtgctgaccctgagtaaacatccttcccagagcttgactcagtgtgttggtctcactacccagtgactagcat

SEQ ID NO: 24997 - DNA, 2055 bp, Mus musculus
cgggaggccatcatcgagctccgagtgcagctccggctgctccagatgcagcgagccaagtctgagcagcagccgcaggaggaggaggagcccgagaggcgagggggcataggcccaccgccctgtgacggtgtcctcgaggtgcgggtagccaaggagcaggcgaaggcctcgcccagcaaagaccggaaggagacgcccatctgagctgcgggccgggccctgtgcatcttactgtgagtgtgagtgagccgcctgcctgctggacactctgtaaaggctcgctctcagagacgtcccctctcacacacgtctgactccgtgtcaggctcagggcctgggaggctgaagcagtggacacacggggggcttgcagggaacacaggcatttccagatagtgtcagcttatttgaaaaataattttctttgttaaaaataactattttaacctttgagtggcttctttttaaaccaaaaattcttttctttggctttttttttttaaatcacagcagaatcaggctctctttcttatcaaagggtaggaaccaaatcaggtcacttctgcgcctgcctcgtggacgctcgtggtctccccagccctgcagggtctctggccactcttgtttgtgccttccacaccttttggtgcagattgttcagtggggagctgcctcatattctctgactggccagaaaggctctcgctggggttccctgcaccacgttgcttttccacttccgagttgggtctgtctgtgtgagtcaggacggcccaggttggtggcagacagaagttacctgtgcagcctgccaccagcctgggcagtgcaagccactcactcactgccagggatcagcaaaggcctcttctctgaggtggtcggaggtgaccaccttgactctgaggcgttgcacaggaagcttctcaaaccagagcccttctccacactgaccttccaagaaaaccacagtgacttcagctgctagcttgggctaggatacacacctctgccaggataagccatgtaaatgctctcacgcagaacgttcacctttccgcgtcatctcaaggggctgctataaggactctgacagaaccgagccgaaccggtagctgtgactgaccccacctggtgtttgcttctaactcagatgactgctccccgagtctgggaggcctgcctcttaggcagccagatctcactgtcagatgagtggcccccagggaggtcccctgtggctctgaagacaaatcccacactctaaagtgagcgacaaacccacaggagggctctggtctcctcctagttagtatttatttcagcgcctgtcttttgtgcggttttttgttcgcctctgcctattgcactgttgtgacttgttggccattatttgatttttgtacggaaaaaaagctttgttatagaaatcagcatactatttttttaaatctggagagaagatattatggtgactggaaatatggtcaggtgtcaaatataaatgtacaaacgccttgctgcatcccgtccggtgtacaacatccactttatatttgctggcaatattgaagaattctttttgtttgtgtaaactctaatttctatcaaggtatcatgggtttttaaaattagtatttcattacaaatgtctcgatgttggttaactaatttttgccaggaccattattgatcaaggaaataaattcaacagccatttgagaaaaaaaaaaaaaaaaggcttctattgtccactcttctctttgaaataattgcatagccagcatctggcacgaagctggtggagatgcccaaggtggagagcgagtgggaagccttattccacctcgctcctcgcccatgctgtgtgtgtgctcctgctgtggtctcttggccctctgcccaccgtgcttgctgctgactgggagggtttgctcagactgtgtgcagttcctgaacctgacagtttcctggtgctgttgggaaagcaagctctgccttctaggtcaagtccagaaggcttggcccagttgttagaggttacagaggttt

SEQ ID NO: 24998 - DNA, 2175 bp, Mus musculus
ttctggtatgctaggagtgtgttaagttatatgattgtaactgtgctttttatatctggtgcctattagtgtaggtcttttccattggattcaatggaactttagtcacatgaggatcgggagttcagaggagtcctgggaaaacctgacatgctgacagaaggtgccgtcttcttccagctttccaaacacttctcgttttgaacgtgatagcacaagcctggtacatgtgtggttctcacctgccagttgtagaacactaggtccctatagtcacacatctcttaattgtgccttggctggcttacctgttttgtatgagtaaatattacagtttataattctaacaactcacattcaagccatgctgaaacttaatttcaaaccactttacattggttttagaaagtaaatatttactatattttacaacagaagagttttgcctagggccagcgagctgactcagtggataaaggcgcttgctaccaagcctgataacctgagttccatccccagagcccgtacagtggaaggacaggaccagctgctgggagttgtcctctgacctccagacaggcacagtatcatgcgtggaggtgtgcttgtgtgtgcacacacataactaactgtttttaaaaatataaacctcttacatggtgaaatctaaatctgtcgtgtagctctcacactgacagtggtttggatgttatgtcccctgtccgcctgtagtgctggtgtggtgagacacagagtcgtcactgctctggtatagaagagttttgtctaccaagagtgtcatggcatacctttggaacttcatcaaatgcacttgaggatgacctgggtcaggaagtagccaggtaaaagcagcgggactgtaggcgatgctccattagactccgtgcagagcagcaggtgcacagcatagctgggtgtgcggctgaccaggagagggtctgactccgcaccagcagaacagcagggtctccagcacgtgtgggaagcacgtgggagagggttgaggaaggatgcacagatgtggacagagaagcataaaaatgtcgggaactcctagtagggtccaccttaaaatcgctttatagtctctggctttgttactctgtaagattacacttgtttctggatatctgaatccaaataagcatcatattttaagaagctctgtttctgaacttccagggggaaatctgtttaatgtgtttactcctagcatactacagaattttctagctctatagcttcttacctagcgtttccatagtgctgagcttcattactacacgcccttcctagtaataaaattctcaccttcaagcatgaatcaaaaacaaatatctataatacacaggttcaattttatagaattgctattttctctagtgcatatctcattaaaagtaactttttaggaataatctttatatgggtacatattttggtacataaaatagaaaatgttcttaaactcattttgtattatttgaatagttacaagatgatttgtggtatcatgggtacccattataaaccatgctcttcccagtagctgacgaactcaaggtatcacagccttctaagaagccgacttagaacatggctgtacatgaatattatacattaaggtgtcctctcacttctacccagagtgcctctgttcaaaggtgccttggaaacatttcagccccttccttcttagctcccacagggctgtgggtgttcttgaaatcaggaggcgttttgaaggaccacagctgctccatttcagccgctgattcttaggaaagttcatgctctgacagaagtgtgctttgatggcttctagcggtgcatctcgtctcgttttctttgtttgtttttgttgttgctatcatggtttggtttggttttgagacaggatctctgtgcagccctggctggcctggaatgtactatgtagaccaggctggctctcctcatgttttcttagtgatggccataaacattgttaaaatacatcaccatcttttaaaaacttttcattattaaaatttaaaatatagcatgtcatttttttaccccatacatttgctatgaaaaattttttaaaccacctgctttaacttttttattgccctgtttttcctattagaattgatccccactgaggtaaat

SEQ ID NO: 24999 - DNA, 1176 bp, Mus musculus
aggaggaagccagggtgccattcggtcctctggtcctctgctccttgcccactgggatgtggaaggtaagctgtagctgcgtgctcctgctgcctcagaactacctgtcaccatgcacccttccatggtgaactgagagccaaaatgaaaccctcttccttacgtagcttttgcttttctcaggtattgggcatagtgtcttagtcagtgtggtactgttgtgaggaggcaccatgaccaggatttcttttttaaaagaaagcatttcattggggctggcttacagtttcagagggtgagtctgtgaccattatggtggggagcacggcaatcaggcgtggcctggagcagtagcttcgagctcacacctgacccccaggaacacacttcctccatcaaggccacacccactccaacaatctttcaaataattctactccagctgagcctctcccagtgagccagtggggaccattttcattcattcagaccatcccagacagcaagtaactgctgccttccttagcacagcgaggtcctataggaatctctccttccttttactctgacctgtggctacgcagttagatttttggtttgcacccgtctcctctctcaaacatcttctgtattggctttctcctgcccaccccttttcctgcattttagtttggctctgcgttctgttttttaaggaagggttaatatggctccagctggtctttagtttgctgtgtcgcaaaggctagtctttaattcttgatcctcctgggtcttccttcctgagtgctgggattaaagatgcctgctctcaagcctggctccatttctgctttacagtttgtacttgccggaatgtcttataactaaagccacgcactgtgagtctgtcgcccatacctgccctctctcacgtagtgtatattaaatgctgagagttgagctggagaatggctaagcaggaaaggtgttagctatgacatgacctgagtttgattacggtgcttgtcccatgacgtgcacacacacaccacttcatgtgtgcccatgcacatgtgtagacacataattaattttaaaaattaaacagttacactcaaatttcaccttactttcctttcatttaaactttttaagaagtgtgcatattctcactaaaccctcctgctagtttct

SEQ ID NO: 25000 - DNA, 1202 bp, Mus musculus
aatgttatggaagtagaaagtagatttatttattattttataagcatgagggatttgttgaaatgtatgtctgtgcacacatacatgccgagtgtctgtgggagttccatcagctgaaactagagttatagacagttgtgagcctccatctgggtgctaggaactaagaactgaactcaggtcctctacaagagcaacagctgctcctaaccaccgagccatctctccagaaccttacagaactttaaagtcttctaacactttaaaaaaaaaaaaacaattttaagaaactgccaattttggagagggaagatttttctagaacactaagaattcttaaacttcttaaagctcctgggagaaaatgccactttatgattaagattaattagtttaatgtagcttaaattattttttctaattccacaaacaactttatgatttctaaaaattattctgtgttcaactaggaaaaacttattgtatccaatgaacaagaagttctgcgagttcattacagagctgcaagaacactggccaatcaaacactgccatttagtgcttgtactgtcttactggatgcagaagtgtacaatgtgcccttggactcacaggtaaagagctagtttatacagtgctttcaagaactgtggtgtaagccgggggtggtggcgcatgcctttaatcccagcactcgggaggcagaggccagcctggtctacaaagtgagttccaggacagctagggctataaagagaaaccctgtctcgaaaaaaaaaacaaaaaaacaaaaaacaaaaaaaaaaactgtggtgtgcctatctttcaatatgctttcgtagaagaaagcagaattaaagtcaaagaataaatgcaactcttaaaagtcctcctggaggagccaggcctctgtagttgtttgttataaagccagataatcttctgggtgtggttgcataagcctctagccccataacttgacagcttgcaaactatctgtttagcaaaaaatcaaggactgagaacataacttggtaggtaaagtgcttaccatgcaaatgtgcggatctgagtttgaatccccaggcacggtagtgcacatctagactcttggtgctcctgcagcaagaagagaggagactgggggactctggcacatacagaagcaagcacagacactttgtcttagacaagtggaacat

SEQ ID NO: 25001 - DNA, 1239 bp, Mus musculus
ccttgaactcagaaatctgcctgcctctgcctcccaagtgctgggattaaaggcgtgcgccaccactacccagtaagaagaaaaatttttatcttttactcttcatgtggaaggccaactaaaagaatgagtatggaattgatcaccttggacagagtattataaatgaactcattggtcaagaactgctgccagcttgtgggtaacatgatgaaggagctgtggaatgaagatcagaagtgatcatggactacgtagtgatgtctaagtgacttgtaaatgtcatcattcgacttctagaagagatgatgcttacaaagggaagtgcaatctaagcatcaaacaaaaccaaagcatttgtgaagaggagacaaaagcagtcagttcaggaaacttgaaaaggcacgttatggggtgggggtggctcatcaggtaagagcacggctgctcttagcgaggccccaggttctgcacccagcacccacatggctattcccaaccaattacaactctggtttgaggataaccagtatcctcttatggcttccatggactccaggagcacacatggtgttaaatacattcaggtggcacacttgttggggttcaggaattgtctcacaaactgacctcagtcagacagggatggtttattgagcataagccccaggactggtcaaccaggtccacggcctgattcgggaactgaaccatgaccctaagatcccacaggatttttaaacctaaaatccacaagcatctgtgccaagttatttcaccaatcaggatttagggctaagggatttccttgggaacatgtctttgcggtacacttatcctgctcccattggttagggtattcaactgtggcagggggcttgccttgtctgatatccatgtcctaacttgtcaaccaggatgtcagttactcatgttcatgtctatttctgctgagtaggaagtcaggtcccagggaggtcttgggaatttacattttactagaccactattcaaaatggaagtcttattccaaatcgtttcttatattggtgcaggcatctctcatatgttgggtctaccccaggggcagcttataccataaaagctaatacataggtgcagggagtgctgttgggtttttgctttgggccccttcccgggaccaagggtctctcctcctattgatgaccgactaggccatcctctgctacatatgcagctggagccatgagtcccacc

SEQ ID NO: 25002 - DNA, 1182 bp, Mus musculus
aaatataaaatataaagggtttttagctgactcctaaccaagtcattcatattttgtcttttttctatattttatatagttgagataattattatgaattaaaccatattaatattatgtaaattggatattttatcaaataatttagttacattgaatttttttaaagatttatttattatatataagtacactatagctgtcttcagacacaccagaagagggcaccagatctcattatggatggttgtgagccaccatgtggttgctgggaatcgaactcaggacctctggaagagcaggcagtgctcttaaccgctgagccagctctccagtcccaaaattgatattcttgtatattttaaatagtttcttcttctttctttccctttcctttctgtttcatgtttggtttagaaatcctattacatgtagataatgactgtggaaagcatctctcttgaactcgtgttcaattcatgttctcactttaggttggacccctttgcatgaagcttgcaatgttggctattacgatgttgctaagatactgatagcagctggcgcagacgttaacacacaaggactggatgatgacaccccgctccatgactctgccagcagtggccatagagacgtgagtatggtgaaggggaagctagcgtctgctcacaggtcagccagcagggacagagcacactgcttgtgtcagggctcacacttcagtcactgcttcttctcatctttatttcgttggccattttattctattttctgacttctaatttgtacttagtttgatttagctttttttttttttttttcataaagtaagccgtgtacagccaggcattacctttaatcctagcatttaccaggcagagacaggcagatctctttgaatttaaagtcatcctggtctacatagtgaattccaggccagccagggattccccagccccacccccaaatcaaataggtgattgaattgcaggcattttattataagactctggcctgttaggtaactcgcttactcactctaaggttagaacacacacttagaggagaagtcatgtgctgggctgcttctccttgtaaaaggagctgtagctgtcaggttgtatttgcagtgaaaagacgggttcacttttgattggccagtttactgtgatcttattt

SEQ ID NO: 25003 - DNA, 1190 bp, Mus musculus
tctccttaagcctgtataggtttcaggttttgaacttgggttgctgtccttatcaacaaccactttttcctacagacccatgtcattgaccccagacaagatgatctttaattattacttttcttgaaatagctatcttgtattctccctatctttttgtcctatttaatatcacagatctttagttttccttatgtgccatagtttggtctccatgggatttctagttggcttgtgaattcacagtgatacttaaaactaactgtagtacagtcagtcatatgtcacataaccagcaatagacaacagacacaatgaagtccataaagttacatcaaagctgaaagtgcctgttaatattatttcgagataaggtcttacgatagccctggctagtgtggaactcactatatagaccaggttagcaacttaaaaacgctctgcctgcctttgcctctggagtgctggctgggattaaaggtggccagttttttacagtaaaaatttacatatgctaatcactaataatcattacttgcttttcttttcaggagtggccgcttctgttgtgagccagctggaggccttacttctttgactgaaccacccaaaggacctggctttggtgtgcaagcaggcctttaacttgtattcaactgtaaaaaatgtcactggacaaataaaatatgaacttccctacataagctttattcggtttgcttattcccacctgtacatcctggcagtaatctagtaacttgcagctgctaaatattatgtcaaaacaacaggaccactatctcggtctacctgtgaagacctatcattataacagaatcaagttaagaattattttagtgttgcccattcatagagccatgtcatttttatcagtgaagtaaaagttttgcaaaacttaaaatacatttttcctttgtatctttagacacagccaaattgttaaattttttataagctttatgtcaatgttccctttaagcgttttaacatttaagagcatatagttgttactgaagtttctgactggtaagacctccctatcagtactaccggtaagagaattttctcaaagtattccatttatgtttgctatctcattctgtagccctgcttgtatgtttaccaggctggccttcaactttgggtagttttgcttctgcctctcaagt

SEQ ID NO: 25004 - DNA, 1149 bp, Mus musculus
atcttcaggggctggtgaagtagtacctcactgtctgtctgcctgtctgtctgcctgcctgcctgtctgtctgtctcattgcctctccctcccaggtatctctggaaagggacctagcactggaaccagtgagggacctggaggagccttctctcgaatgtcagactccatcccaccgctgccacccccacagcagccggcaggagacgaggatgaggaggactgggagtcctaagagtgctttggccattctcccacatggcagagcagctggcaggggctcctcggccagttggggcctttcagggcctgttgcccaaggaggtgcagggggctgggcaggtgtcccaggcctgtgcctaattcctcttcatggagtcgggactgtatgagccatctgctggctttgctgaagagcttcttccttcaaaggatcctgagagaaaacagcaacacggcggaataaagaaagtaactgtagacctgaacccaagccaacagtggcctttaataaatgaagagtagccatgcgggctgcggcttctgagagtgggagctgtcctttttcccaggtgtgctgaggcatggtgcaggatgactgggggaatggacgtctttctctgggatcaaggcaaatggggatgaggtccgcaggggacagagggaggggtagctttccactggaaaaatgccttgctgtttgctgaggtggctgaggacaggagggactgcaagccacagggagggcttggaggcaaaccggggagggggacctgtgaaggactcaggagggacagaactgcagttaggaactgaaactggtgtgaggtccctgtgaacacagccctgaaaatgtgggtctctgcggtttagatgttgcctccacagaggcctcctgtgatggaccaggctctgtcctcagccaagcctggtctccagcctgaagtccagcaggacattgatccaggccttgttgagccgggcgggcggatctcaggctgaactgccctgggtagttgcagtttcctcaagataatcgagatttgctcctggtgtctctttgggatatgggccacttggggaccactcgggggtgccacagggtgtcagaagaccttctctctgggtgaaactgcacattcaggaacg

SEQ ID NO: 25005 - DNA, 1150 bp, Mus musculus
cttccaaaggtcctgagttcaaatcccagcaaccacatggtggctcacaaccacctgtaatgagacctgatgccctcttctggtgtgtctgaagacagctacagtgtatttacatataataaataaatctttaaaaaaaaaaaagaaattcaattctcaacaaccacatgaaggctcacaaccatctgtacagctacagtgtactcatatacataaaataaataaatctaaaaaaaaaaaaaaagaacaggaaacctgctgggcagtatagtggtgcatacctttaatcccagcactcaggaggctgaagcggggggatctctgtgtttctggtcagcctggtctacagccagggctacacagagaaaccctgaaacaaaaaacaaacaaaagaacaggaaaacaggctcagactacctgctctggagagtgactggctcaagctacactcaggtgaaccaagggtggctggatggggccagtgttgaaacccagctagacccatcctagatcctgctctctccctgagtgccttccagttttcaaatcagcgtcccttaaactaaccttcggccatcgtcattactgtgatcctattggtcatctttggtacctttctctgcttttgttaagctctgaacagttgtcattccccgtagttcttggttacttcagctatgacccttgtggtaggcttctttctccagcttgcctcaaacctccccctttcactctgtaaaggctgactgaagctttcttcatccgatgccaggcttggtagcagtctgtctaattccacagactctcatgctacattgtgagctgagctgaggtgaggcaccaagctgactgagcaccgagggagactgcatctggaccttccctggaccggcgcatttcctttctgccttgatggaaaggattgggcttttttgttttctgttattttgggtttttgatgtttcaagataggatgtcactatctagccctggccatcctggaattcaatctgtagaccaggctggcctagaatggttttgatttttggttttttggttgtttgtctttagtttttaaagatttgtctttttaatgtgtatgccagcacacattcttgttttgaattcaggtgtgcctatgccacagtgt

SEQ ID NO: 25006 - DNA, 1164 bp, Mus musculus
gcaagaacccgagggccataaaagtggtaggagggatggggcatggatcagtgagtgaggatgcatgctcagaagacacagcaacaactttgcagcacacacacacacacacacacacacacacacacacacacacaagcctgcatggttgtatttaccagtaagcactgtgtgtcagagatgacaggcccctgggtagttctgctcatggaccctaggattgtgtgaacttcagatttagtgaaaaaccatgtctcagagaaaaaggtgaagagtgtcggagggacaacacctgacatcttcctctggcctccacacgcatgtgtataggcacatacaccctaaaaggccatgaaaccacatgtaacttgttctaaatatcagtgatagctgcatgctgacttgatgctttaggccgtgtgtgtgacccactacaggtgtgtggtgatggtggggatgccatatcccaacattaagtctccagagctgcaagagaagatggcctacttgaatcagacacttgtgagtacctgtcgtgtttcagagggctaaagggaggaagcggtgtgccaccccctaggactggatgacaaggccctgcagtatgacctgttgtacaaatggttgctttcctctctagaggttttggagtatacctctagcccacttgatcttctctactgcatgaactatatagcacaagctgttgaccagacatgcaacctgaccttgctccaaagcctggactacaaggcaggcaaaagtagattctaatctttcctcttctgtttccttctcagcctaggacacaaggtcagcccctgccagggacggtattgatagagaatctgtgtatgaaggctataaaccaatccataggtaagtgtggggctgctgctgggtgcagatggatgttttgaggcgggagggatgttagtactgtattgtccatttgaggggtcagtgaaggaggagtcccctatgcacatgcagtattggtaggtgagttgaactcaagagtctcgacttgtgcatctacccaggcagggccattaggcaccagagggactttgccagcattgtgctcctggatcaccggtatgcgcgtccttctattctggcgaagctgccagcctggatacgagaccgagtggaggtcaaagc

SEQ ID NO: 25007 - DNA, 1105 bp, Mus musculus
cactgtaatttgcataaccagaccatcaccgccatcagccaacctccatcccaaaggaaagatgtagatcctttctcaaggtcgaaggatgcttttaaaaacacacggctactgaatgttcaacctggtaaactgagatgtttcgggaatgaaacagtaaacgtgcctgtaatcattttttcatagctcagaaaactatttttgtctcccatcttttttacacatgatatattaaacaaaaaaggtaaataaggtataaatagatttaaagagttttaaaatgtacatttgaagagattccgagcacccttgttctcagttctgcctgcctgttgaatttgcactgttccgttctggttgggtttctccatgttgagttcggagtgttctaagttaaattttattttgtccagtcttaatttttcaggagtctttcttaacgctttagactgtcttaactcagtgaactttttgtaatgataaggccgtgaggccagaagacgagagtgtctgtcatctgaaaggatgcaggccaaccttgctgaaaaggtacggagcccttcagatagacttaagactctgcgtgacccatctgcccagcctgaccgcacgtcctcgggcacctgtacatacactgctctgtccctgccctcacctgcgtgtgtgtcagtctggtctactgtaacttgttgtgaagttccttgtaccgtgtgtactgttgctgttggtctcttgtaccagtaagacaatggctccattttttttaattattgttaaaacattaactgatggtgtacaaatctcacttgacatttttcttgtttaaggaaaagcaccataaaaaaaaaaataaggaggccaaaccgagacagacaaaggtgcctcaggtctgcctgagaccacggtgacatggaaataaagtccttacaagaaagcaacagggtcttggtgtcaccgtttattgctggctccttcttctcccttgtcttcttcagctctaaatggaaagtgtctctgggttttcctgtagcggacagagtgcaggggacttaaaggaagagctgcacacactaggaaagagggacacagcagcgctaggcatcac

SEQ ID NO: 25008 - DNA, 1709 bp, Mus musculus
gcatggcaccagccctggcttcctggtgacatgaggagacaggtttatgtcctttgtctccctcaaattacacgtggggggagaaatgattaccttccaagtctagccttccaaggagtacttaacgcaaaatagagttcaaaccagaagcaggtcaagccggtattgattttgacagttgcagtcctctgacccgctcttcccaaggtctgagttgtcagggcagattggttacacgctctgagaagaatgaacattgtagggtatgagttctcaggtagcaaacggtgtcttctctcatcttgtggcttgggagggtctgtatatgtctactctgccttcagttaatatagagcttgctttaaggcgtcatcagttggctaccttgagtttctactcgtattagagatttattgggggcacaaaagaacctttgtattcttgacagtgaatgtttagggcagtctacgaacatagataacccagaggacatggtttctcccccttctctcagatgttcacgtgttctagatgccaggagaatcagtcattgctgtttggactgaccccctcacagtagtcacatcggaaatcgcctttcctctcttggtgaatgtgtgccaggtctggttttcacgcccagataagcagagttgttggtgtttttcctcgcctgtgccaagcaccctgtgtggtatcaccactggaatctcaacatctgagagacaggaagtgtttcttcccctgatttcctcacctctcaagtgaccttgccctctctctcaaagcttggcagcgaggcagagaggtgccgagagaatgatgcaacgtaggtggcacccttccctccaagagcctaatgtaccctggagggaacggttgagcgtgggcagcggtagcttgtggtgatcagaacaaagcaggccgtgtggccagccctcctattgtcctccctccctttgccacggaagttctgtcagagacctgggaagaccctgcccctcggttctgcttcctccagtgtcttgactcacagcagaagacagtcctgtgagctgagccacggcttccttctgcccggtctccctctgagtgaacacagaggccaccgctccctcctggaggccatcttggagcaggggctctctacttgtactgttttgtttgagacactttccaaccgacttgttgtttttttttctcttctttctctgtctgtctgtccagaaccaaactgtcttactaactgccccctggggactctagccctgcctgcctcacactgtaagtgcttcttccccacctccacccgtccacagagctgtgtgtgtagctgatgtactcgtggttggcattcggcatccatcctcatctgtggacgtccactctcacccccaagggacagacgctgagctcagacatcccattttgcccacctccagggtggactacttaggatctagattctgctaaagtttctcctcccctgcagttcaacagagaagcactggccaggagggaccatcttgggtcttgcctatgggagtctttggctttacccaccactgctcactcgcattttggtgatgccgtgggctggggtatggcctgcataatgtgctgagccttctctttctcttgttttttcaaacaaacatgaatcaagagtaaacccccaagtctcttgtccttccaagtcagtccattga

SEQ ID NO: 25009 - DNA, 1294 bp, Mus musculus
cttgggtctaagagtgtccccatctttaatcccactctggaacagttctgttcacacatccccgttgttgcagagagatgtcagtctctgaggtcatcacccaggagtcttcgcttctcagccaagctcggtggtttataaaagcctggtgcacaaatgtttcttggccttgcacatcccacatactgagtccatccctcagctttgtaaggattccttctaagccttacaatggtcattctgtcacctctgacatctatacccatttaaccggtgctttgcaattcctagattgagagagcagggtttgttgctttctgcttagtttcatttccatagagagagcaaggttggttggtcaatgagtgtctcgcatgtatgtgtgtgtctgtgtaccatgtgtgtgccagcagcacccagcagtgggtgtgggatcccctggaactggagttatggatggctgtgagctgccatgtgggtactgggaactaaaaccaggttcctccttgcaagggcagcaagtgttcttagcctctgagccattcctcttgccccttaggattttgtttttgaaacaggatttttggctgttttggactcaaaacagccaaaaacagccagcctaggctggctttgaactcaagattcttagtcctcagttgctaagattacaggtttgggccatcttacttggtactgaccaactctttactgcccaactgagtgccctgtggctttgcatgtcctgtcccccagtctcacttgctgggcggcctgggcagccacacaggcctctaactcagctatttctgtgttgtgagaacttggagccctttgagatgccagagccttttgtctgcctttgagtaaacaatgcatgccattgaagttaccctgagaatgccaattctctctcctcagattgaggaacatccttaaaaattaattcaaccaggttcccaggatccatgccatggaaaaacatggtcaagcaaatcctagacgtggctgtgaagtttcttgctaaggaatacactggaattcctcctctgtcattcacgtcgtaatttacaaaaaaaaataaataaaagttttcatgagttcttttctaataaattgagcacccttcctagactgcttaaatgaaagaaatgcagggagtggaatgggcctcttagtggaaaagacagagaaggacttcatcacttccaaagtgagcagttaccccagcaggccacgcgtagttctagtgtgaggcttgtgtgagaccaggtgtttaagactaactagtctt

SEQ ID NO: 25010 - DNA, 1205 bp, Mus musculus
tgcaaagactccaagactcactgctgctctggcatggcgcctctctttccacaagccaacagcaccaacaggaagaatgtgtgtgtgtgtgtgtgtgtgtgtgtgtgtgtgtgtgtgtgcaggtgcatgtgtgtgtgtatatgtgtgtgtacatgtgcatgcatgtgtgtgtgttaagggtaaggtgtgaggggcccataaaaagcacacatttggtattttcagataaccctccctcgggctattcttgcctggcaggatgacagtgcggatttgaagtgtcagcttcagtttgtcaaagaggaagcttccctgatgcgcaaaaagatggccaagttggggcgggagaaggacgagttggagcaggaactgcagaagtataagtccctctatggtgatgtggacagtcccctcccaacaggggaggctggtggtccccccagcaccagggaggcagagctgaaactgcggctgaagttggtggaggaggaagccagcatcttgggcaggaagatcgtggagctggaggtggaaaaccgtggcctcaaagcagagatggaagacatacgggttcagcatgaacgcgagggaacaggcagggaccacgtgccaagcactcctacctcacccttcggagactcaatggagtcctccacggagctccgccggcacctgcagtttgtggaagaagaggctgagctgctgaggagatccatctctgagattgaagatcacaaccggcagttgacccacgagctgagcaagttcaagtttgagcctcaccaggagtcagggtggcttggggacggtgtgtctaagggccccgcggccagcgttcccctgcaggaggagctgaagtcagccaggctacagatcgatgagctgagcgggaaggtactgaagctgcagtgtgagaaccggctgcttctgtccaatgcccaacggggtgacctcgccgcacatctggggctgcgcgctcctagcccccgggacagtgatgccgagagtgacgcgggcaagaaagagagcgatggggaggagggccgccttccccagccaaagcgagaaggccctgttggtggggagagcgactcggaggacatgtttgagaagacctcgggcttcggaagcggaaagccgtcggaggctagtgagccatgcccggcagagctgctaagggtccgggaggataccgagtgcctggt

SEQ ID NO: 25011 - DNA, 1101 bp, Mus musculus
ggctctgtgtctgtctgaattttgtggagaataaagtttatgtagaaataaaggtttagactgctgccggctatgctctgccttaaatgtttaaataaatgtttgacgtgtttggacatagctcgtgtgggttctgtcataaaaggccccagaagggaactgtgccaagtttgggttctatctttcaaattttataggcatatatattaaacgtgcctcttccagcgaccacccaggagcataacatgatgttttatccatgtgtctaaggatgtaactaacgttactactgttatggggccgtgctcaagagtggctatataattttttctcgaatagaatcctggatgctctcctacagttgttgttgttgtttttttttttttttttcctattgggatgctgtgttcatatcctatatgccagtgctctgaaaataattgctgtattcttggcctctagccttatgtagcctttctagcatggaggaagcctgaagtgaattctgacgaagttagaatctcaatgacccagtgcacaactaggttcatgggcagattgcgtgatgtggctgaactaagattggcactgtgcacagtgccgtgggcttaagtgtgcttgcggtagaagttacctgtcactcgtcatgaaagaccaggttaaagtagaaataccaacagctggacagacagagcccacgtagctcccttttgaatgtatctcactttcttgggcatcgtgtttaagatccacttaaatcaggaactggaggcaaaaccagcctggtggcgctttgattgggctgttgatgtgtgtgtgagctgatgggcagaggagtgagtgggtggtagagcagacctgctgctctgtggcatcctgagggcatccatctggggagaagagatctggggcaggtgccatactgaatatgaggctagattaaatgtcgtcacatgtgttaaaggagagccttaaacagttaatgtgtacgttaaacagtaaacatcatgactattcataaataaaaatcccttgtatattagagcagtaattttgaaaagtcttgtgcatttgtactgactgatttttgtgtgtcaactt

SEQ ID NO: 25012 - DNA, 1178 bp, Mus musculus
cttggtttgcccttctcttcctgaccgcttcggcagtcttgcacattaagactttcctggtagcaccagctcctcacagaagctttctgtaacgttctagactctgaacagatgtttttaatacgatgaaactgctagatgattattgtggaaaacccgagggatgaaactatgagagacagctgactctgctgaaactggaaatacgcagtgtggttcattagggtaggggcgaggtgcaatatcatgtcacaaatcacacggttcgttgtcattcaggaagtgttccttttcctttggatcacactgaagaggagtggcataggagaacaaagcccctgggctgggtatactaacaacactgccagttccaaaaacatcaaggtctcattgcccagttaggcagggctttggaaactacagttgctagttctaccttatttgtggctgcgcttcccagtgtttccatcatcgtaggccgactgtgacaaaacatataaagtgaaaactccagaaatagccgatgcaggtgcttttattccagttatgtcatctcttgttattctgttaagctcttgctatggctaattgtaaatcaagcggccataggtatgatgtggtcacatagaatcagaagggaggttctgaacgattcatccttcgcctatgcacatatgtagatatactggttgtcttttcacaagctgagctgatgataatatcactagggaccaccttcatgtgtgtcgcatacgcagtcagctatggaccacgtgtgtacacctgtgcttattttctccatatagttctttcctagcacatcctatatctcctaagagctttggcatctctaaagggataagggcatgtacttagtagaagagtgatgattgggaccctttgcaagctctcaggagagttggccgaggagaccgtaggctttatactctgtctttggggatgggaggaaggagagacccattatgtttatctggctacagatgtggccatatggaaagtgtccctgctatgctggctagtcttacatcagcttgatacaagccagagttatcttgaaaggaggaacactcaattgggaagtgcctccatcagatctggatgtagggcattttcttaattactgattgatgggggagccagcccatggtgagtggtac

SEQ ID NO: 25013 - DNA, 1175 bp, Mus musculus
tcacttagtgctgacgtttgaatcgtggaatagggttttagagatgtttgcaggcttgcagtaattccagggcaatcagcagttattaccctactaaagtttatgtcctttggagggggaaggtctgcctggttcatcctggtacccaaattgtgcctttggcttgaatctgaaggcttaattatttgcagagcagatatcctctctctctgtctctctgtctctgtctgtctgtctgtctgtctgtctgtctctgcatgtatgtatgtatgtacatatcaagatagaaacttcggggaatcatggtgactgagttttagagcgtctgttcagaagatttgaatagttgatgacattatcatctcctacgaggagcagcggtccctcgctgcttcaccctgaatggccacgagctgctgggtgtgcatagacatctgacatcttagtgtgttgggtggagtggcgtgggctgtcttttggagaggagtgcatccttctagctctctcctgccagggtctggctcaccttccatgtctggattccctaggacgagctggatgagctccgtgcagagatggaggagatgagggatagctatctggaggaggacgggtaccagctgcaggagctccggagagagctggaccgtgctaacaagaactgcagaatcctgcagtaccgactcaggaaagccgagcagaagagcctgaaagtggcggaaacagggcaggtggacggggagctcatcagaagcctggagcaggacttgaaggtgagtgaggtccatcccgttcctagggaacttcagacaccacccaacacatttcactactgcgcttgcagaggacctggatccgattcctacatccacacagtggtttacagcccatctctaacgccatctctgaaatctaccatgccctcttcaggtctcagtgggtccccagaaatgaacacgatgtgttgacatatatgtaggccaaatacccctacccatgaaataaaataaatctgaaggagagtaaggaagagggagactcactggttgaagtgactgagaagaaatcccagactctctaccctttttgctcccagtgtggactgcagagacaccttggtccaatgatacacgtcgatgtgggctatgcaggatggatgtcctctaggttgtgag

SEQ ID NO: 25014 - DNA, 1180 bp, Mus musculus
agggagccccagcatgctctggggttgttttcctgtggacttcaagagccttaccaagtctactagacacaaatccttgtgtctacccaggctcactgactaggggggtcttgtaggtgagttattgtagcattctgggcaccaggtgatgctggaaggctcagtttaagaacctccttttgaagagacaggaagccgcaaaggatcgatcacaaagactaataaggaagggaaggggacagctctggtctgtgcttttcatggttcaaagtggcatccttttaataaataggttgtcatcacggtggaagtttagacagcgaccccaagataagctccttggtttgttgttcccacaccagactggagttttgttctgtgagtgtaaacagctgatgctgaccctgtatccatgataaccacaagctgcggaccagcttgggctgccccattcaggaggaagctaaggaggagtctaatgagagtttacttcaggggcaacatgtccaaacaagtcagaaagattttgatttgcttggctcccaccgacacagtaagtctgggacacttgataggttatttcactgctgccaccggtaaagtgagccaatttaaaccaaattagattagattaaaggcagatttattgggaagctgttcttaggtgggcaagttcactgggcgcaaggaccaaggccagggagtcaccatggggaaagggcagagggtgtaggggacagagagagaagagaagaggagaagagagaccgaaatgtctggatagtatagggggaagcctctaggaaacgacagcccagcctctgggctggaaagttcagggttgggggcagggtatgccaggtagggactgagggatgctgggagaacctggaggtcaggtctgctttggtatgtgaaatatgcacctcagttccttgttcccagtccaaacaacagtgtcccattcccaaccgaagacattaaaatttttgacaggtgctaagagctactaacacctttcttagagtgaggagcagaaagaagtagtggctgcagaaacactccttggaagaagccacaggcagtcagtctcctgacttacagactggtcctcaccaaactctcctcccgttgttgacttctctttcctgtgcatcaacaacagcaaccgtctttcctg

SEQ ID NO: 25015 - DNA, 1177 bp, Mus musculus
ccaggaggagttgacttcctgttgtaacagaacccaactgaaacaaagggatgggtctttggggtttgcctatataaactcggagctgaaaatgaaactttgagccatgattggaactctttggcttggcttcattcttctctcgcccgcctatccgatctcattctcagcctccctttcaggtgtacctacccagttctctgtgactcctggacagctacactgaatgctgggagttctctagagaatgacctcacagccctgagggcacttcaccagtcttacagctctgagatcctgacagggccagtaagtggccccctgagagccctgactggaggtgtttctggccctgtttccacagagaaaacaacttgagttatccgtagactctgccccacagttatccggcaatagccaggtatgcctgactctgtaaaaggggctgtttggcccctccgctctcttactctcttgctctctttccctcttacacttttccctctctgccccttctctcccattcccctcccccctctctcctctcttcacgtgttgttgatagactacctctgtgtgtgtgtgtgtgtgtgtgtgtgtgtactcccttcccaactcccctccccatgccctaaataaactctattctatactatcccgccctatggctggtacctcaagggaaagggatgcctcagcatgggcccccagaggcacccccttccacctcaccatactgcacctataccaaacatatccctggcttccctttctggaccaaggccacttggtgagctctctgcttcagttgctaacagttggctcattagtgctaattcaggcgatctacaatcctttcctcggctattcatatcttcattcattcattcattcattcgttcattcattcattcactttcctcattgacctgtttgcagtgctgggggctgagcctagagtttgacacatctggggttttccttattttaaatcttgggttagctcaatgggaaaaggcacttgctacccaccctgaccaccggagttcagtcttggaacccacttggtggaggaagagaattaagtcccacagtttgccctctggcctctgtgtgaaaactgtgttaggagtggggtcacacacacacacaaagaaataaataacggcaagtctca

SEQ ID NO: 25016 - DNA, 1892 bp, Mus musculus
acccacccagcatttcacaaccgtctgtaacttcagctcccagagatccaacaccctatcctggcttccttgggtaacgggcctgtggcacaaaggcaacacacccgtgcacacggaatgaaaggtttacagtttaatacaatcctgccgtttgcaggactgaagtgtgtctgtgctctcttcttgtcctccagatgcctcttgatgttttgagaaacgagttatccaatagcatcctttctctacaaccagagcctgagatcccaccagagctgcctcctcccagaccacacgtccgatgctgttgatttgatactttggagatggtgcaagcgattcctagaagggggaaacgttctgttctgcactacaatcacgtgacaatttcctttcgcactttgtaacccaagtcagctatacactaacttgtaaatatgcaaatatgcaatcctgggtaaggtcgggttatataagttacacacttcccttcaaattatatttcctcattaccccagtgtctagtgtacgcacactgggaggcgtagtacttctaatacgaagactgggagagaagaaagatgtaatatttcctgagtactataaatgtccttgttaattacactacaaggcagacgctccgatgagaagagaggacctggtgcttcgcttgctgtttcaacgaaaatctacaaaactgaagttttttgaaaaggaagacatgacagccaccttttctttatttatgggctttccccacacggcacctcaaggtttggagtgtctctgcaccaaagcagagctccctcacggccacagtgagagcacacatgggccatgtagtgagagggttcctggataggggactggacttagtcccgaggctgcagaaccctgggtgtttcccgttggctgtgacctgcttttaagaatgaaaaggttcaatagagaaagaacggaagggctgggattgcagctcagcatttgagcatctgtccagcgtacgtgaggctctggcttcaatccccgtcatcgcaaggaaagaaagaaaaagaagcgtttttgaaactatagaaaagattttaaaatcacactgctgtcctacacaaatcctgtttaaagggattttaagagttaccttttagtatatcaaagaatacacatgcatttgcctaaacatcctgtatctttgtaatgacaaacttctccccttgatggtgaggcttattcctattaagcctagactgtgttctttaagttttcttggtccccacccccccttgagggtttttttttttcctggtctgataaggaatttgtgaactctatctttggtatatcttttattaagctgcactgttttgtttagtcaaggtaaataagtatgtatttgaataacttggcgtgtcctgagtgttgtgctatgagaagcatcatggtctttctacactaatgaagtgcaaataaaattttgtatttatgaatgacagttgaatttgccgtgtgtttgtgcagttatagattacatgtgccagtctttttcacgagctccgcatcttaatcttttgagtgtttttttcggtaagaaaagcatgctgtgttctgtgggaaacactctggcagctttagaaggttccgcatggatctctcatacaatccagcaacttggtttctaagtctatgtgcactcaggaagcagatcgggtactggacaaactcttccagcagtgcccacagcatcagttttcacagtagtcaagagttaataaacccaggtggcattcagtggaacagtggggaagcacactgattcaaaaacagtgggtactgttcaggaggcagcggcagaaagaccacaagatctcagccagcatggtctacctagcgcatcccac

SEQ ID NO: 25017 - DNA, 1928 bp, Mus musculus
tcagcttggaggtttgaaaagctaaacactggtgcacatattttccgttgtaaccattgatggttcccgttttgagatgagaattctgtagagaatttcagggactctctttaggtcgtaattggtaagttgccgggtaacaaaactaccacggttctaagtacttagaccggaaaattaaacctccagttttcacactgacttaaatttcctttttgattatgccccttcatgcctttttttttttttttttaacagaccattttggaaatatttatgctccttctaccctgtttgttttttaaatgtttgtcttggggatgtgttattagaactcagtaacgtaattatacccactgcaaatatccaatcttggatcctaagagtatacagggagttattaaccaggaaatgaggcttatattgttttgtttgtttctgacataagtgcagtaggcttgaatgcagttgagaattaccagtcgtttatggccccacacttacatatgcagaaatgaaagctaatggttatatttaatatagaagggaaataggactgcagcactcggaaggctcgaggtgacggactggggtggggagagctggcctttatgacagcacacccacattctaggaagttttcctagggctcatagaagtggatccgtggagagctggcctgtcctcctgagaaagatgggcctactcagtaagctttccccttgttgacaaaatgaaactagcttgagacatcatggaattacatagactatctggaaatgagcggaaacaggcctccttacatacataattatatgtacaaatatacgggtgtctccccacactgagggtggttgaatttttcccttggatgtttttgtttacttcatatccagcctaaagtaattaatttcagtaagtgtttcttgtgggaagttcggaaaaagatggtaaccataacttaaggaaagcctgaagacactacatgctaacaggtgcctctgcctcttcaactcctgcctctgggttgagttattttctagccagcctgcggtttgttgagcacctgctgtgtgttgggtgttgtgccgcctgtggggtaatgtggaagcccagcgtgggctcagtgtgcaagtggtgccagcaggcgccagattacagtgctcaaggggagcatggacagagaagggtacttaacacacaagcctcctggctggggccaagggcttgttagaagattccttcccactgagccctgaggagccaagttcattccttaagttcctttagaaaatgctgtttaaatatgaccctgggtgtggtatagccttgtagctactgcttgagcagagcttctaggtcttcctgtggcctgttttctagttccttcccagccttatacaaagagccccacaaagaagaggagtgtcttccctgatgctttttttactgagtcaaggctgcttctggaagagaccacagtccccagcatgagtccaccaagataggtcacatggcacctgtcattcagaggctagaacgggcaggggtgggagggcctgaaagacacctttgacaaggaatcagacacctgtggaccttgtgtaacaggatctgtggaggtaaatgaatgtaaaggttgaatcagtgagacattgatatctttattgttatgattaataatcggtgcatagtgggcataaaacacctagaattcgcaaggatgtgaaacgatacagtgtttagatgatttaatggaaattattgtgatttttttttcgaatagatttgtatttgcagaattgaattagtggaataatcagccagcgctggttattaataattaataaaggggcagctttatgaaggtagaaaggtaggagaagaaagcttgtttgctacagacgttggcacccagctgagctgtg

SEQ ID NO: 25018 - DNA, 1104 bp, Mus musculus
cacctcactccttttggatgtaccatccccagctgttgaaagcagagagcagagcttccatgagaacacgtgggaggaactcctcgagagcaggaggttagcgagggctgagtaagagtgagagagggcacagaatactggccaccggggagatgtggtgatgcactgaatttcactgaaatgatgacctcatttacaaggtgtgcatagataaggagagaaagcaggaggagggcgctgcaagccacacatctgcaaaccgtaagaacaagaacatccaaccccttagtgtttaatgagcaaaagggttaacaaggatcacacgttggaagagaaagcgtggcgtgtagcttcatggtagaacccttgtctagcatacgcaaagtcctgggtttgattcccagcactggagagagagggaaacaaaaacaaaaacatctaaagagaggtaaccaacaccatttggggtttagtggaaaaatcctcattaaaaccactgcttgcccatcagaacggctgaatatttgacaacacaaaacaatgttcccaagggctagagatgctgtagaactgaccagggtacagcagtgtgaggaagggaggaactcgggggctgacggagacactgtgtgtggatccgatagagccagcgaatgcacatttgcaaaacgtaactccaatacctactggagagttatatactcagtgatatccaaccagccatgttaggccaatgagatatctcatcaggtcaaggcgtttgctgcacaagcctgcctagaactcacataaaagcgagaggaaagaggatctactccacaaagctgtcttccagccaccatgtccatactgtgtctcgccactccctcagaatgatagcagtgccaggcttaagaatgtgggaaaggctagttacctctcacaaaagaagccagtgcatggagagtacaagaagatcattctagaaaatacagatgtgatccaaaaaaaaaagaagaaggcggtaagaacatggactcctcatggctagagcaggattgtttggggggcaatgaaaatagtgactggtagatcttagcacacataatacagttcccagctttt

SEQ ID NO: 25019 - DNA, 1192 bp, Mus musculus
caccaagggaatctaaaacattgactgcagctgtggtgtgctcacccacacacatttagtggataagccttccagctgttatgaataacactgctatgagcattcatatacatctaattttgtgagtgtatattgtatttactctgggatcaggagtggagctgcagtaacacatggcggcactgcctgtgggctttaatctcattgtctctcttcatatcagcgctacagcaaactgtggcccatgggccaaataggcacactgctgtttaaactgtgcacatttgcctatgtatagaccatggctatgtgagagcagttaagagtgactgtctacttagctttacctgaaatcttgctcaaagaggttgcagttgtcccgcgttggccctctacagaaagtttacaggacccctgctttaaaccctagaacttcacatgttaatcagtactgatgtttctcccccaggaaagtggccaggtcagtgtccatgtaggaaaggttatgctggagataaatgtgaccgctgccagtttggctaccggggtttcccaaattgcatcccctgtgactgcaggactgtcggcagcctgaatgaggatccatgcatagagccgtgtctttgtaaggtaagtgtggaaattaaggaagcttttttctttttttctttttgttttcgagacagggtttctctgtgtagccctggctgtcctggaactcactctgtagaccaggctggcctcgaactcagaaatccacctgcctctgcctcccaagtggtggctttgagtctcttctggggttctctgctcccctgggacagatgatcgagtactgtgaagagcaggaaggcttaagttagaaacagcatgtcccagcaagatggccctattctgtgcccttggattgagattggacaccaggcttactcttttgcggcacctctggctaatgaccatggattcccgaggtgtttctgtggcttcttagacggaacccaatactgctgtgccattttcttggcattgcctcccagttccgtgtttggaggcgcaccaggtacatactgagtttcccagaactctaatgaaatgcagatctgttatcttgcatttctcttgaaagagaattgtataatcacaggaatgcgcacacacgcagtgcccgagaagggtcttatttggccatatg

SEQ ID NO: 25020 - DNA, 1209 bp, Mus musculus
gcgttgctcattgagaagcactgtggctgggaagaagctgcagttctgaggtgaaacatacaatatttatgctctgacttgctcctgggttggaggaggagggccttcagtctaaagatctctgtggaccacgtcgctctgtgcggcacactttgaggactggctcacaccatggtgtgagggagctttccctgggccctgagtactcagatgctacgttatgactccatgggccgtggacacagatcctcattgccaagccctgtttggcaaagggcatcttgtgcgcatccagagcttccctgtggccatgacacagccatggtgtcttccgtttctcctctcagttttggtgctcagtgaataaattgcctttctggagtcagcatggatttcctttacagatcaaacacatttttttttttaacatttcacaatgatagtcacgtccgcagccccaaaccaaaagatacagaagtggcattcatccgtaagtgctgaaatgtgccactaggccgaggatttgcaagttgtaaaagttcattgtgctctttgatcattaaccagagatgtggccaagcattgcagattggcactgggcttgtggaagctggagactgcttcttgtcttatgtccacatcttgtccaaccattgtctagacgtgcggtgggagacattcagtcctcgtggttctaacgggaacaaatctaaaatgtcccgagggacaggagagctctacctttcatctcagagattgtagttagagccctcattcatccgggactccgtgcctcatcgtggacgccacaggctgcacatctgatggacttaccagcagttgcaacatttaagactcgtgcggctgtgtgtcagttcaaacaaagccggattacagatgcggaagaactgttccttacctgtggagcccgtgtccagatgtaatgcaaggacactgtagctgcatgtgcagaagaggtccccctgtgctgtgttatcctcatactgaaacaaagcatccttcactcccacagtcagatcatcttattgtggaaggagccaggcactcttgacatctgacgggcagatcatcttatttctgaccttcattcaggagtttgttgcacttttctagaaaccctcccccccccaaaaaaaaaaccagtttgtttgacctatttatgaatttctattttctcccgtttaagaa

SEQ ID NO: 25021 - DNA, 1216 bp, Mus musculus
ttccaggaacaactccttaagtgttcctgctgtatattgaactccgtgttaaaatgagaaatagaaatgaattgtagaataactatgccccgggctggatgggagggatttgttctacgtctagttcagagcaagacagaataggtatgtccacaatctaggaaattaaagccattggtagccccagagatatgacctgactgtgaatagtaactgtttgggatgccagtgttagaatcgagcagagtcatgttaagtcgttggttttgcccaaagatttggtccatagcatcccatccatcccccaccttccccagcaatgctacacccttcatccctgccccaccccactcccaccctaccccacaaagctatagcaggaatgtggattggccttaggcacatgctgcggcctgtgcctcctgtgctccatgacctgggtggcatttcccgtcctttggatggctgccattgctgttgcctgctatctggtttctttctgctaacttccatcctttcaaaaagccaaagagacctgtgagagtgtccagagagctctctttacccacttcaaatgcttctcgatgtttatgaaagaacccagcctcggaatgctgggcgtggcctctgctccatcttctctgctgctccctctttcccacaccctcctcctcccagcgactctacacttgttttgagactggaccacagcaagttcatttcccataaggcctgagccccagtgtacattgtcttaaccccacacctatcatcacgtagaggattcttgatatctgaatgttgcctaaatgacccctccccctgtataaagccatctctatccactcaactaaaagtagccagcgtctactttaactggtcgacttgaaaacatccaccccttgcagactaagtgcattttctctttctccttcaaatagaaggccggctctatcagagcagggaactcataaggctttatcccggagtcggaacagctgctctgggaatcctcatggaaggaatgtactcatatcatacactatgtaggggagaagctgataccaaaatctgcttctctgtttcttgactatgtcaataaagacagcagaagccgatcgttcagtgatggtaaagaggtgggatttcagggtcctaggagggagaggagggaaagagatagaggaagggctttttggtcaggctttggagagag

SEQ ID NO: 25022 - DNA, 1174 bp, Mus musculus
catcatgagcaaagtctaccctctgtgtgcacagctttgccctgtgtacccacctgccatgcaaggactcaggtggctgtgagcatccttgggtgggccgtgaatgctgcaagtgccgctgtagcagcttgctccttacttccagagtgatcattgaaaaggatttgtccagagtcatctctcgggtttaacatttcgattattgaatagtatctctttaaaaccaagaaaataaatgctaaacccacacagacttaaattaatacgattcttgaaagggaatgggaggaagattgtttcaccccacacacaccctgcagtgggcgtgggtgatgcaattttcggccgcagtgtgttggtttcctgtcagaatgagcgctcgagcttccgaggtactttttttgtgtgtgaccactcagatgttttccaatgagaaagtaacgaatttttttttcctcttcccacaggaataactcaacctgcacatgaacccagtcatgtgaactgttaggaaaaccggagcctacatggaattccctcttctaacccaactgacttctatccgtccgtggaaaattctgatccgggagagccgaccttgaccattggatgaaagaccctggcagagagatcttccccgaataaagcaatccaaatcagcatcactaaaccgatactgcatgaagcaacgattaaaaaagaaaatcacaaaaacagtaaaacttttaattttcaccaaaatgtctcctttttcaactctccctgcacgttcataaccaacaatgtaaactgtgatctcaagtaacccatcgacagctcatgcctttcatagtttattattaaagtctcaactggactacagtttcataggtgacaaattctctgtttacagtaaacggtaaccaccctataatgctatcagccgtctaggtccggtgtgtcagatttaccccagattagatgtgccaataaccaaccttattcagtaaaccacttgaatcttgtccttgtctaatctggttttgttctcctcaaccacaagcagtaacactctctgaccctctagaactatttaacgcttacaatcttgctttatgtctctcctttgttataacgtagcactggttttagcttacactgaggtaatttcttcctcctcacttgctctggtctc

SEQ ID NO: 25023 - DNA, 1358 bp, Mus musculus
attggctgtagtcagtgaacacctttgaccgctttgtggcaatttacagcgttgtgctggctggacctaagacagtgcgcactccggttaggtgattctcaaatttctcaaggcagttatgttcctacgttctgaccaaacagtttgctttttttatcttttggtttgtgtgtgcgtgtgcgtgtgcgtgtgtgtgttgtctagtattcatattcccagtaagctcccctacccttctttatggttttaatttgaaatctcctttgtctggtttaaaatgagtggcttctgtttcattcttaattcctcaactcttgccaagctggtgagtgcactgcacagagtcatggaataaattgatttcctagtcccagtatatgtgacttatgtcaaaacagcagttttaataactggatacaagacctttatatggatgcagaaaatgttggcacgcgctgacccagaacactgcagaagtacaaaaccaaatttggaaaaatggaatggttttagttttatatttggtttgtgatttttaaatctctctctctatatatatatatcattgtttctcactgttccttggacaaataatggttgctttgctgaagtgttccttcatccattacaatggcccctgtacccaccccaaatgctgcaggtcatgtatacctcaggatgagtgagaccaccaggatgctggtggtgttgggactcagtttccctttcattcagtgtggccatgctgtctgtgtgtgtccgtgcaatggaccagcatcgacaggagaagagtctgacacaaggttttcacagatacaaaaaacccctaggtcttgaaatcgtgactgatttcagaaatggttttgtatttaagatcaaaattaggacaagcagcagcaatgtttcttcaaatgcgtttttgtagtttacagatggtcaggcctcggggtctctgcatctctgcagcactcaatttcccttggagcagatgcttccttaaatacgtctgaaacccttcacgtgtgtaaatagtattgttggtcttatgtatttcgagaaaagggacagctgcattttttttctttcctttttattttttttatacagtggattaaagtacctttcattggcaacacatatcagacccctttaaccaatattaaagactatcagaccaaatgtttatgttttccaaatatgtcttatcactggttgcagttttcaatagaagctgattgccctgtcatagccataaatcggaattatgaactttgtttcagattgggtgtactaaaacgctcctttgactatttccttaaggatatattgaaatgcccacagagtttgaattatgttct

SEQ ID NO: 25024 - DNA, 1189 bp, Mus musculus
tacaaattgaaaaggaagaattcaaaatatcactatttgctgataaaatgatagtatttttaagtgaacccaaaaactccaccagagaactcctaaacctgataaacaacttcagcaaagtggctggatataaaattaactcaaacaaatcagttgccttcctctacacaaaggacaaacaggctgagaaagaaattagggaaaaaaacacccttcactatagtcacaaataatataaaataccttggtgtgactctaagcaagtgaaagatctgtatggcaagaacttcaagtctctgaagaaagaaatcgaagacgatctcagaaaatattttttaatgaataatagaaacagaattgccgaactaatccccaggaaatcaactttagtctttctagtgtcccatacctgagtgtgaaagtataacaaagtaaaaacagaattctaggcctttaggcccaggcttgggaatgtggcctttgtaaaggtatgctaatcataaaacagatagtgacattcctccacccacctggtatctttggtatcttccaacaatgtcctccccacttccttgagttgtggtttcttcctttaaatacccccttacccagctactcggcgcgccacggtcctctacccctgcgtggtgtatgaccgtgggcccgagagcgctcttgaatagaaatcctcttgcagtttgcaacaagaccatttcttgtgggtgattttggggtgtcgcctctcctgagtcagaacgtgggcgagtcctcacgttgtgggtctttcaagtgtatccccctttattttttttaatgtcttgaaagtatgttagcatagatattaatattaaaatacatgactgggtttgatgcatctgagaatcaagatacatcttctaacagatttagatctaaaaaaccctattcataggagagtatagtttaaaaattcacagaactttccacgcatgtcttatctttttatgcaaacattaggaagtgacttgtttctcctgagctacacccaccttcactgataaaagatgttttccttattgcacaacaatgtaaacagtgtgatgtaacagttgaattctcatgggtgctccttgacagtctaattgttggcttatgcaaaagacaacataattttgtcttttgcaacattatgaattatccttttctggat

SEQ ID NO: 25025 - DNA, 1292 bp, Mus musculus
cttcatgccaactctagaagagagcccatttcattcctgcgtagttggacccaacccaaccctagggagaccagtgtctcccaaacctccctccccaggatccattttggctcgcccgtcagtgatctgccataccactgtgactgcattgaaggatgggcctttctctctctgtcagccgattggtgtgggacagagtacagatgtaccgcaaatagcacccagcaactttacagacacctctctcgtgtacccagaggacacttgcaaatctggacccagtccaaaccctcagagtggtcttttcaacactcctccccctactccaccagacctcaaccaggattttagtggattccagcttctagtggatgttgcactcaaacgagcggcagagatggagcttcaggccaaactcacagcttaaccgttttttcaaacaaaacagttctccaaaatacggtcctgattgccgggggtgatggcaagagatgcattattttatatatttttctattaatatttgcacatgggattgctcagacgaagcttcctgttactaagatgtcttaagtggaatagagtcattccaagaactacaaactaaagctactgtagaaacaaagggttttcttttcgaatgtttcttggtagtttctcataatgtgagacggttcccagtatcatgtgatcttctcctccagactcctcttctttatgttccaagactgtgcaatactttagacgccctcgcacctctctcttcccatgtggaatgggacgcccacctacagtctaatgagtaaactttcagttttttgtttgtttgtttttttttagattcaagcaagtatgaatctagttgttggataccttttttcatgatgtaataaagtattttctttaaaagttattgcaatgaagagcattttcttgaaggaagcaatcagaacacagtaggaatataggaaatgggggcagggcagactgatttaggttgtgtgtgtgtgtgtgtgtgtgtgtgtgtcactgctttgaagagctgtggacggcaaaccactgtgaataatccgggtgggtgagatttcctcttgattggagggtgagtttgcccctcagtctttgcttacagatgaatggcagatagtagtgaggtatccgcatcaattcatgatgacatcagtagtgaggtcaccagcagtgagctgctgtgtatttcagaagggcccacgctgagtttatcttaaactctccaaggttgtaagtttgactgttgcggcatgtgcaagtat

SEQ ID NO: 25026 - DNA, 1144 bp, Mus musculus
gccgtccccctagcccagacgtttaaagagcatgtgagcatgacaagtgtctattcgcaacgtgttagatttcgaaactgccttgcaatccaatccggaactcagagctttagcccgggggaatagacatttgcccacggtgactatgtctgcctccccccacccccactgtcgctgttggcagaagagtccacgaggaggagggtgcgctgtgccgcgcccgcgtgtcaatggcagctgcgccttctggaagaagttgattcttgtctggaatacttttccttcggtgccccaccccttgaatcagaagctgctgcctccggcggctggagcagagacagtgaagtttggggcagctgtcaaaaacaaggatgggggtgtcttttcttctctggggtggacagaggagatgtccttaaacctctctccatcctttacaaactaaatgcactcttcgctagcccggggaggaaaggccccaaaagagaaaccagtgtggccgctgagagctgagggatggagatggtgctctcgccacgggcaggcaggcatgaccctgcttctgggttccgccagcgcgtagagggacgggtgatctcggcccccaggcccagggttgtggagctggaaggtgcgggggaggggcagaggagcgcggcggggcgggcgggggacggggcgggcggttgggggcggaggcaggacctcctgtaccttccctctgctctctcactctgacagcgccgaggtgcgccgagtggagcgggaaacaaaggagctgagtagggagggagggaattgggccagggagaacccccggctggctgccagaagatcccgactggaggaagcccaagtgtcacttgaattccaacccagaagccagcgcctgagaccggagcaccttgtttagcaatagtggttggaacactctcttgtaagttaccggagcactagtataggaggaggatcatcgactaccctcccgccactccacggctgctggctcctagaaaccccagcttcacctctcactgggactcgagttccagaatgaaaagcaagaagggtaaggtggcggcgggctgtgagcgcccggggcaccagtgcgggacatgtgcgggccgcgccggatcgggagaac

SEQ ID NO: 25027 - DNA, 1210 bp, Mus musculus
acaaggttaatacatggactgtaatggctataactgggacagagggtagcagctgcccacccagtctccagccactctgtcttaacataaccctatattttccatgtggctataatttttagagtgagcctattacattcttagcaagaaagaatgaacctgctctccagctccagcgccgtagccatcatgaatgacacagtaaccatccggaccaggaagttcatgaccaaccgtctgcttcagaggaaacagatggtcattgatgtccttcatcctgggaaggcaacagtaccaaagacagaaattcgggaaaagctggccaaaatgtacaaaaccacaccagatgtcatctttgtacttggattcagaacccacttcggtggtggcaagaccactggctttggcatgatctatgattctttagattatgcaaagaagaatgaggctaaacacagactcgcaagacatggtctttatgagaagaaaaagacctcctgaaaacagcgaaaggaacgcaagaatagaatgaagaaggtcaggggcaccgcgaaggccaatgttggtgctggcaaaaagccaaaggagtagatctgcggtaacttgatgttttgctgtgatgtgcagatttctgagaggacaaataaactaaaaagcttctaccaaaaaaaaaaaaaaaaaaaaaaaagaacctagcatggaataattgggacgttttgttttgtttttgagacagggtttctctgtgtagccctggctgtcctggaactcactctgtagaccaggctagcctcaaactcagaaatccatctgcctctgcctcccaagtgctgggattaaaggcttgtgcccccatgcccgactaattgctaccttttttgttcagtttatttgagacatggtctttctaagtagatctggctgtcctagaatgtgatacgcggaccaggctagccttgaactcacagaaatctctctgcttctccatcctgagtgctgggattaaagatgtgagcaaccatgctggttaattggtgtgcatgtatagtatatattttaaaataaagaatttcatataatgtatttagaacatattcaccctgtactctctcccttagctccttttagatccacccccaacttcttgccctcatttttgtttgttttgagacagggtttcattgtgtagctgtggctggcctggaactca

SEQ ID NO: 25028 - DNA, 1242 bp, Mus musculus
aaaacagcaatggccctgaaaagagtctttaattttccctccgaaatttcacaaaccagacctccatcttctgcagtgttctcaacattatctcccaagctcctacacaacatccgacagagctcttaacaacgaatggatcttcaagcccaaagttccaaagtccttccacagtcctccccaaaacagggtcaggttgtcacaagaataccccactatgctggtaccaatttctgtattagtcagggttctctagagtcacagaacttatggatagtctctagatagtaaaggaatttattgatgacttacaatcggcagcccaattcccaacaatggttcagtctcagctgtgaatggaagtccaaggatctagcagttactcagtctcacgcagcaagcaggcaaaggagcaagagcaagagctagactcccttcttccaatgtccttatattgtctccagcagaaggtgtagctcttagaccatagtgagacaggttagttttaccctactgatgatgtgttgttgccatggtaatcctgctcagtacgagaggaaccaaaggttcagacatttggtgtatgtgcttggctgaggagccaatggggcgaagctactatctgtgggattatgactgaacgcctctaagtcagaatcctgcccaggcggaacgatacggcagcgccgaaggagcctcggttggccccggatagccatccaaccgaggatgggaatatggaggcttgcgtgcagctggaaagaggaaacaggtcacattccaagcaggaagtttctagtaagtccttaaaggcaatgcaagccttctgaatggtcaaaacctaaacagagatagttatcacaaccaagctgtgatttggagcaagccgatgaaccatgtgaggtcagccaggagatccgaggcccaggcttctgtctcccatggtgtctgtcttagtcatggtttctattcctgcacaaaacatcatgactaagatgccaagagatgaagccaactgaagcactcatcaactgataagtgaattttaaaaaaaatgtagtttaggatgatagttcaggtgataaagtgctcaccccagaacccacataaaaaagttgtgtgtggtgagagcacatgtgatcttggagctggggcagagacgggcgcatctctgggacttctactgaccagtcagcctaagaagtaagctcagacaatggaagaaactgccttaagaatcaa

SEQ ID NO: 25029 - DNA, 1116 bp, Mus musculus
agggggaataaatttttgtaaaaaccgtaaatggagctgatgagatggctcaccaggtgaaggtgaattctgccaagcctcgtgacctcagtgtgagccccaggatggagaggcctggctcctggaaatcgttcttagtcctctctgagttctccatggcactgatgcgggcgagtgcatgcgcacgcacacactgtcaggaattctctagctgatgtcctacgatttgttttcgataggcacttaaatcagggtctctctttactgtgagtgttccagtccaggtatggcctggtggctcatccatcaacacgcaggaggaggaggcaggagagtaacagcacttgggttgacagtgctttctatagaatcattcaaaataagctgcaagccgtaagctgacctaaaaggtttaactcagatgatgagcttataagtcattttgaagcataccagaccacgggcaactgtatcatgattaaaaacgattagacaaatgttgatttgtcttgtaattgctgttgttgagacaacccttgatgaaccaatgtagaatcaatattcagcctgtgatagtatggtgttttgcctgtcaaactctgagagtttggggtgttgttgttgttgttgttgatttttaataaaaagcaatgaagaagatagcaagatggttccgcacagaaagatgtttttgtcttacgcttgtgggttttgatccccagaacccttgaagaagcagagaaccaactcctgaaagttgtcctcagacctccatacatgtgttatcctgaatattacatgtacatgtaataaaaacctttaaaataataagtgtgctagcatagcgatagccaaaccatgccaacctaagtgggttttctcctttgttccaatgtgcgccctcacagggaagaatcccactgatgcctacctggacgccatgatgaacgaggccccgggccccatcaatttcaccatgttcctcaccatgtttggggagaagctaaacggcactgaccccgaggacgtcatcagaaacgccttcgcttgctttgatgaggaagccacaggtaacgcgctgtgtgtgtgtgtcctcacttgagggtacatggagca

SEQ ID NO: 25030 - DNA, 1099 bp, Mus musculus
gaaaagacaaaattgaatttaaaaaaacccttagtttgggtcctggagccagtccgtgcttcctgccttcgatggctcctcctgtgaatctgcgcacacatcaaaactccctcactgcacacacacacacacacacccgtgtctcagctgccactgtagtgtagctgggctaaaaggagaatctttctgtaaagattttctttttaattatctgtgtatggggtggggtgtgtgtgagagagaggtatgaaatcccaaggagtggagttacaggtggttatgatatttccccacctaccctgagcagccatcttggtcctctgcaaaatcagtgaacattcttgactagctgtctctggccactaaactttgattgctttaagactcctttgcccacggaaccagtcccgcccttttctccttatctactaacgatcagcagtgagttttgtttttagatttttatggcttgtgctttttggttcagttttgttttttgtttgtttgtttttttgagacaaaacctcactctgtaaccaggctggcctgggacttaactgtgtacttagcctcgaacttgcggcaatcctcttgcctcgacctggagagacccacaccagatacaggtttttcaaccagcaattaagcaagtccaagggtagaactttgaaggaagcagtcattagaaagcaagaaaaacctgcagagcggtaaaggaatgtgagatggaatggtggtactcctctgagagagcttaccgaacaggggtggagttctattacggtcacttatttttttgttgttttaccagaaatagaaaattccccaggcacctgacttgtggtccctttgaactctgtggcgctaagcctgaaacaaagatgtttcctcctgtcactcagaaagaattcacagaacaagggctcttaactttgctatcaacacctataaggcaatacccgggggtttgtcgttgttggtggtttggtttggagacagggtctttatagccctggctgtccaggaagttaactctgcattccaggctggccttgaacttaaagagctcttcctgcctctgcctccagagtgcaaggat

SEQ ID NO: 25031 - DNA, 1144 bp, Mus musculus
caggtggcaggttgcaaggcacctgttgtattggcttgtgtggtaggtccagccttgtgctgatgagccacggcaaggatgtagggcagacagacagagccaaataaccacactaagtatctggttgtctgcacggggctttccagggctggtggaagtacacaggctgtgaagttgagtgtgggttctctgaccctccattccttatcctccaggcaccatccaggaggattacctgagggagctgctgaccaccatgggcgaccgcttcacagacgaggaggtggatgagctgtacagagaggcccccattgacaaaaaggggaacttcaactacattgagttcacacgcatcctgaagcacggcgcgaaagacaaagatgactgaagagctgcggcggcttccagcccattgctcccgttgccattggggtatttctgagattttctcctggagcccaatgcatgccctagctttactgctttttgcctttcttgttttatatttattctcagccattttgggccacatgtaccttataatactggaaatgggaccttctgtcattgtgatgagaaagtaagttcatttaacttacaggcagtcttgtcccttgtaataactgcagcccagaatcaatatattttttcagagaaagttatccactcaattttttctgatttataattaaactttctgataaaatgcttagttgtttagcgttatttgccacttgacttttagtttcacgtacgcctttctctctaagcaccgtgggccaagtgaatgacagtcctgtcagggtttggtccgactgcttccagttgtgttattaaagcaatcctggttttctctgctcctgttcatttctccctccagggaaatcagataaagcccgagttgggggccctagactttgtctttcttttggaagatagttcctgcagaattgtgaccctgcattagctctgccgccagctggacggacctgctttacctcgtccatgtaaacttcctgccaccgaaactagcagccgctgagcacactaagttttctgtgttctattttaaaggttctttggaatgcttttaacaaaaaggacagatttcgctgtgtttccagctgttggaaatatagtattt

SEQ ID NO: 25032 - DNA, 1217 bp, Mus musculus
tttactttattttcacactaagaaatagagagcaggaccagacacgcatggtggcacacactgttaatccagtgcttgggaagcaaaaactggttgctctccgtgactctgagttagaggccagccgggtctgcacatccagtgtcaggacggccacacgaggctatagaatagagacacctggtctcaaaaagaaaggggtgggctgggagtagtcactgctgcgctgggatgttactgtacgtggtaatattttcactagttaaggttactgctgttcactagccacacttagcttgaagactgactactgggacatgtcataattgtgctttgttgtgcttgtcaccctctgtgttactaaattgtcatagtttatacagccaaactctcacacatgtcccgtcatcctatgggtttggcagcttgctgagtcagatggcatccctgtggtgacatgttgttaccgttggaggactccagctgctgcaactgataaagcttggggagagtgtccagcactggtgttggtggggtccccacactggcatcttctatctcaggagcccaggacagacagtgcaagagctgagagagagtgcacagccatcttctgctgtggcccctctgcccctccgtccccgcacgggcttgctgctctgccctctcactgtccatttgaaggtgtgcattacagttaagagacagtttctccaaacctaacactccttcctagtctgagcacatctgcagatctgcacggctgccacctgcaaccccacttttaggtttatttttggtttttgttttatttttcagaagttcatattgatctcaccaactgtgtcatgctttgtcttgctttgttacaattttaagaatcctgccttcttatgtaagggatgtgacttagtggccaaatgcctgtgtaggatcctaagttcaattcccagtattaaaattttcctccacttctaggaaaattctgaacatatcaagtactatgctaagtatttaccgaagtttcaaatagttaatggctgtaagagatacagtgttccatttccttatttcacatttatgttccattacaacaggtttccaatgcacttgccctctagcaccaacctttctgtgccctgtctagaaaataagaatagtaaggtcagtgctgcaaagacagctgcatttcctgatgcacaccttctgtgcgttct

SEQ ID NO: 25033 - DNA, 1335 bp, Mus musculus
tctctttcagaaggccaaaaggtgacgtaccaaactgagcatttctgaagactatgataatcctggcaagaatttcctgttcctccaaatgggcctggaagccattgaagctattcaactttcagaatctcatggggcagcacaaatttcctggggtcattgcagtcgttgggcccgtcggtggctggcttgcaaatgtacacttttacccagtggtggtcatcccagccctgggacgtttcctgccctgaagacaacttcctgctcctcagcataatcatgaacatattagaactgtttcttaaaaacagccttttttattgcctttttctggacttatttaacaaacatgttttgtcttttgtgtaaggaaaattctagaactagatatttaactgtaaatatatgtggaaagttgaattctgcattaaaacagagaaagcacaggtgtctgggaatttaaatgttcagatacacaaaaacattggtgagaataggatagcctaaagattgtgtcctgtatgagttggtgataggacagcctaaagactgtatcctgtatataagtaagatatgcagcagcacttggctttaattctacatttgcattattttctaattttttacaactatttttaagagattaaagaaaacaagaattcaaagagtttgttagggatatgttatataaacatctaagctgtgcatttattcaaactaacatacgccgtgtgtgtctctgtaagtgcaagacttttgctctgtgaatttattttgtaaggaatacttttggtacaattttctgttccaggaaatgtgtgtttttaatccttcctgattatgcagcaaggttaataaacaacaatcatttctcctccccaaaaaaattagtggtttccttgattgaaatttaaagctctgtaaaagctgccttagtacaaagtactgaagtgactcgtcggtgtgggtggagctcagtgtctgcagtgttgaagacacaaattggcaataatagaattagttgcagctgtggaggagcacccctgtaactctaatatccttggatatatagcaagttcaaggccagcctaattatacgagaccctgtcttaaaaaaatctgaaagccgtgttggcaaaatggctcagtgattataagcactggctgctcttccagaggacctagtttcaattcccagcacccacatggcagccacactaactccagttccaggagatctgacatcttcacacaaacatatatgaaggcaaaacaccaatgcacataaaataaaataatctttaaaaagaaagagaaaaatctgaaaacaagttt

SEQ ID NO: 25034 - DNA, 1226 bp, Mus musculus
tggtgtaaaatatcatattattaaagtataatacctttttgtttgtttgatttaaaggcagggtctcttgcatattccaggctgaccttgaacttactgtgtagctgagaatggcttgaactcctgacctcctgcctacctctcgcaagtggtgggcgtacaggtgggtgccaccacatctggcttataatgtctttctaatgataaaacctccaagtgtaactgtggtaagatgatcttccctaatgttggaactaaactgttaaacagtgccatggcgtcagtatatgttctatgttctctcttctagagctgtaaagatgtgtcacctgttgaaaagacgatcaagttacttcccagtagccacgctgcttgcctgcagatctttagtgtagaggagcaaaaggcgatccagatcaaacatcaggatgaggttacttgggtagcaggtgatgtaatacgcaatctaatttttcaaatgtatgacgaaggagaaagagaaatcaatattacaccatccttggcagaaaaaattaaggtaagtattttaggcaaattgtttacttgtaaacaatttacttgtttaacttgtttatgttttgaaaattgaaattttgtagatagcctataaattgtttatcaaagaaaaatactgttattaggttggtgctaaataaattatggttttggattgtaaaaattaaatcctcataactagactcaaaacacatttttattactcaacatcagagccattacaatcaacacatttttgccaatgagaaatgagcttgtgtgttcttataaaatacaaattgaaaatcagtgaactcatagagagcatgcaaggaggcagcgtcagctgggtagtttcttctgaggacgctcactgggctccctttctgagtttcctttccacttgtgcttcacatgctgagtagccattgagaatggagtaacattagagcatccatccgtccatctgtcggcttctacgcttgctctcaagtggtcagtgccaacttttgatggctccattgtgctccatgtcttccagaccgttttcctagcaaaactttttgagccagagctgcacaaatatgttcattagttccctggccagatggactgatagtttttcaagttttctctgctgcttgatgacttattttgatcttgaataagaaaatcactcgggccaggtgtgatggcctttaataccagca

SEQ ID NO: 25035 - DNA, 1214 bp, Mus musculus
acaccagtgatatgagtgagcctattgaatttcacacttttcatgctttaagtattgattggaattttcttatctttttatttcatagctttttgatgaaacacaaggaaaacctgctgtcgcagtggtagataatggaagaggaatgacctctaagcagcttaacaactgggctgtgtataggctgtcaaaatttacaagacaaggtgactttgaaaggttagaaaatctttcttttcctccttaatggtacttgtatattttaataagggtaagaactctagtgtgctctaggatatagatgatttattagagggcttgattttatcagcatgtttgttttattacagggtgttgtaatacatactccaaaatagaacatgtgcttttccactgaacaatatttttgcatttcctgaggtctgtgcgagttatgttaacattgaatattgagttggacagtacaatggtacttaggataatcttcataaaccatctcatattacttgaaaatgcctagaaccgcataagattcattaggattctgtatttctatttccagcctcagttctttagactatcacagctgttagggggtagaatccagctttgtatcagcacacacgccgtggacagggcttacccactgcccaggggagctgggcgtggggactccttcctgtagtccgtgtcagcacgcccagatgagcatcagatgagcaaaggctttccctgattgtccatgtttttgtggtgttggcagtagaactcaggcaagtgatgctgctgagccgcccctcagtccttgtagtgctgtctgacagacagagtagtgaatgaagaacaaggaccccgctaccattcacctggtttggatttcctgactctgttgcttgtgggacacttgtcacacttctgtacttaggaaatggggagatagtctatcaaggttttgtgaaaactgagctaggaaacatgtaacatcttgagctagtgcctgtcatgcagtaatcttagttatttcttacttctgatgcagcacttctccataaccatccttactcctgttttcatgaatgagtgatacttaaaagagtggttaagaatccagcatgaagctcagcatggtggcatacgccgcctttactcccagcactcaatcagaggcagggggttctcttggggcatagcctgatctacgtgcagagcaagtt

SEQ ID NO: 25036 - DNA, 1215 bp, Mus musculus
ccaccactacccagcatattatttctttttaactaaagaaataaacaggagaaatagttgagtggttgctctgtagggtggagagtggggcatgtggccttggcctcagccttagcctctggggccttgtggggactcagccctttgcggtgctgccacaggcgcagcttctacttcgagctgctccctccagggtccatcttgccagagactatgtggcacaggtgtctgcgggccccgaaggcaggcaccgccactggggaattgtggcagtcatcagcgctgtggtggatgtccagtttgatgaaggattaccacccatcgtaaatgccctggaagttcatggcagggacagcagactggttttggaagtggcccagcatttaggggagagcatggacagaattgttgctatggatggcactgaaggcttggttagaggccagaaattactggattcagaggtaccaatcaaaattcctgttgttcctgagaccttgggcagaatcatgaatgccattggagaacttattgatgagagaggtcctatcaaaaccaaacaattcgctcctattcatgctgaggctcctgagatcatagagatgagtgctgaacaggagattctggtgactgggagaaaggttgtggatctgctggccccatatgccaagggtgggaaaatcagactcttcggaggtgctgcggttggaaagacagatcatggagttaatcaataatatcgctaaagcccatggtggttgctctgtatttgctggtgttggcgagaggacctgtgaggacagtgattttttttttgttttgtttgttttttgtttttcgagacaagatttctctgtgcagccctggctgtcctggaactcactctgtagaccaggctggcccggaactcagaaatccacctgcctctgcctcccaagtgctgggattacaggtgtgagccaccactggagggcaatgatttataccatgaaatgattgaatctggtgttatcaacctaaaagataccacttccaaggtagtgttggtatataggcagatgaacgaaccaccgggtgcttgagcctgggtagctctgactggtctgaccgttgctgaatacttcagagaccaagagggccaagatgtcctgctgtttattgacaacatcatccactttacccaggctggcgcagaggtatctgccttattgggta

SEQ ID NO: 25037 - DNA, 1177 bp, Mus musculus
tgcgtaagtaacctgctcccgcacgttttgaaagttgttagtctcctttggtcacatacgccgctgttctttcacattcctttcgttccactttattataaggcatgggaacctgtttccatttattttcttagtttctttgaatgtattcgactgaaattgggacttttctttgtttaaaaatttctttttaatttattcatgtatgtgtgtttgtacttgagtggatggatggaggccaggtgagtggtttcccagggcggccagaagagagtgtcagtccttttggagctggaataggagttgtcatcccgtggtatggatggtgggagggctggaaaccaaactcaggtccttgtcaagagcagcgattgctcttgactgctgagcagtctctccagccccagtctttttatttgaatagagtgtgatgtgtgtgcagacatctccgccccagagtacatatgtaagtcagaagacaacccctgacttctaccaagtttaaatcgggatgtctttctttgttggctgctgggctaacaatgataagtttccacagactctcttgcctgtgcctgtaagagcacagagaccgcaggtgtgtgcagtcctgcacactggacttcagagaccgcaggtgtgtgcggtcctgcacactggacttcatgttgcttctggggacaggtgtgtgcggtcctgctcactggacttcatgttgcttctggggacaggtgtgtgcggtcctgctcactggacttcagtgaccgcaggtgtgtgcggttctgcacactggacttcatgttgcttctggggacccagagttacgaggattgcatagcacatgttttacccattgagcccagaagccaaatagccacccactagtagaattaggtgtgcttagtacaccgagggatcctatagttagatgtctttctatgtcttcaaaacttgtctctcttgttttattcttcctgttggctataaaatgtcttccagttaagaaaatgccttttactttccacttattttttatttgcatattctggactaagcccagaaccttgcacatatagggttagcattctacttcagagtgataaccagtccatactttgtaaatttatttaaagagctaaattgtgagagtaagtttgtgtacctgttgccatgtctt

SEQ ID NO: 25038 - DNA, 1185 bp, Mus musculus
accattcagagtacacttgttacttttttgtagcaagaacacagcatttactcaacatttttcaaatatgcaagccattattattattattatttttaattttttgtatatgagcatactgtacagatggttgtgagccaccatatggttgctgggaattgaactcaggacctctggaaaagcactcagtgctcttaaccgctgagccatctctccagccccttattttttaacctatgggatttattatgattgtatttattatgagtgtatatatacattacacacatacacgtttatgcacatgctgctgctgtgtatggacatagaggacaactttaaggagttggttctcgtcttgccctatgtgggtcctgggttttgttttgtttaaacacatgctgactaactctggcttctctcgcttctcctgaattactctgcttggccttaaacaaactggcaatctgttctaatcttctggcggcttctcattctctggctcattctgtgtctagcttgttctgtcggtgcaacctgtctctctataactctccctattttaaaaaactgcctcctcctttcttaccccccccccccccatgtagcttccctttcctctcttttcttgagagttgggcatctctctgatttattctgtcacatttttctctgattcagcacttttttgctcacttgtctgccactcaattagatgtcactttcaaacatgggtgcttccttctataaactaattttaccttccttgtttgggattaatgttaagggctgagccacatcataactagaagcataatcttgggattcacattgtgatcaaatatcctgcaataataggcccaagctataatatttgggaggtcaggtctatgaaacacatttttaatttgcaattattttattggaatttaatcccttataaaagaatatttgtatagtcttagttgagtaaaaactaatttagataacaaaggtattagcattcctatctatagatatgtgggtaagtatattgacagttgaaaggcagaagccatctatgaagttagtcataaactggactaagtacgctaatccattattctagaaaaatccttaaaagaaaaccttaaaaacaatagttttatgggtgtattgtatgaaataattagatacatctaatat

SEQ ID NO: 25039 - DNA, 1176 bp, Mus musculus
atcatatcaaatttgaaataaacaagtctgatgtcatttccccattagatggatagcggggtcttcaaagtcagtagacgcagtgaccttgcaggaaaataccagattagtcgtcacgcagccactgaccagcttatgctgctactcaaagctcttggttgactcagatgtatgtgaatataaaactgtctgtgttctctagaaagtgaggctagagcttgagaaaaatggaagagttcgttgcttgggcctggatgtgtgggttcatgtgtggtatggatctcttttcttgaagagagattttcctcagacttactaggaagaattgttggtgtttaagaagtagaaggaccgttggggctgttgtaagtgctgagagcatatgaagtgatccagtttgctgccttacctctttagaggggggaacgtgggccaggaaacttaaaaagtgcacaggcactagcgtttatgcattgttaatgtttggtgtatatttgaaatgctaagttaaaatgttatttttactttttcttccaggaaagtcatcaaaggaaaaaaaggaaatcggaagttacaggaacaaaggaccaggctgacctgttggctcttggcacggcagttggtagcattttattgtatagtacagtaagaggagagttgcacagtaaattaacagtaagtatatttatgtatttatgtaaaagatgcgacagaaactaattattagagactattaaaaatgctccaagatattgacgagctctatgtagaaagctttccattccattccatgaaaactgcatgatatttgtaaaagtaggtaattcctacttgtgagttagagtacagagaactttggctgaagtcaaaaggtatcagaaggacttgcaagtcggcacaggtagcagcttcaggaagaccattgagcttcttagagggaacaggggcggcacttggagttgctgctgagactgagaccaaatgagttgactttgctaacactgaggaccagtggctccatgggattgggtgcacatttctggagagtgccactgcttcctgatgtctccgaagggagagaggacacttcaggaagattgcaagttggcttcagtttgtcttatcaccggtgaagaatccaactgttggaatggtgcacacgaggatggaagaaat

SEQ ID NO: 25040 - DNA, 1101 bp, Mus musculus
acaagagatcttttcagaaataatataataaagttatcagctgctgagtcatttgcttaaataataaaattaggactggagagttgactcagagattgagagtgcgtgctgtccttccagaggacttcggttcagtgccgcaccatgttgtggttctaggggatctgatacctttcctggcctctttgtgcgcccagtatacaaccagacatgttggcaaagcccctatacacccaacatgattttaaaaataaatgatagaattcataacattttcaaatctaatttttttttttgcattaactaattcagtcgtttatatacattttcaaatgagaaaaacaagtggaatttgaatttaaaaaccttcattatacagtaattatagttgtgtattttagtgtgtaacctaccttttgtagagatttgctataaggatttttaaataagttgtgctcaggggtgttgaagctgtggtgctgtgatgatgccttaaaattgtggtttcgactcactgagagtaacgtgaggacctacagttccttggctgtgtctgagcaccagagcacccctttagaaatggtaaaatcaggtcatgaggcagaagcaagtggatttctgagttcacggccagcctggtctacagagtgagttccaggacagccaggactacatggagaaaccctctcttgtaaaacaacaaaaaaaaaaaaaaccaaatcaagtctcaaatggtggttcatgcctctaatcccatgcttaagaggctgaggcaaacctgggctgcatagttctaggacagcagagcaacatagcttacccagcaagatcttgtcctgttttatttatttatttatttatttatttatttatttatttatttatttattttaaagacaggggtggggaggagagaagcagaacaaagatgagaggagagaataaaaccaggcaaggctgattgagaaggagagaagctagtggtgggtagggataggagaggcatctaaattgtgttttaatgctcaagtgtctttcttttgagaagggaaaggcatacagtgcaagtagagttttgttagggtgagttttaactgtttc

SEQ ID NO: 25041 - DNA, 1157 bp, Mus musculus
gtgtaaagtgtataagtgtacagattgagcctggggagatagtgtagattataagtgcttgcagtgcaaacaaggcctgagtttggtcttcagctaccactttagagagttgtggtggctgccacacagtagtggtgcaagcctttaatcctagcactttggaggaacagacaggtatgtatggtctacaaagcaggttccaggacagccaaggctcagtagcgaaaccctgtctaaaaacaaaaacaaaaccccataaacaaataaatacatacatataagtgaattcaaacttacaaaaacgttaggcatgacacaattgtgcttgtgtcgatgtgaacgcacacacatttagacacgctaaaaaaatctttgtgtctggaacaatggtggttcagcagttaggaattcctgctgcttttacagagccaccaggttcatagctccaggtgcagggaatctgctccctctcccttctggcttgtgtgctgtgggcagcaggccacgactgcctagtggctcggcaaatctgttctcttacctaatggctgcttctgttatctaggcaggtccggtcagagaacaaggagaagagtgcagtgatgtcttttacagtcacagacgagcctgtctatgttgacttgactttgtcagaaaacaaagaagaggtaagtggtttggtgtgagaattcattttagaagtgcgcaaattgttagctgtgtaggatctccagaacccatgttggagccgtgcaggtgtgcttgctgctagtaagcctagcaattgggaagtaaagattcatcagagatcatgtcctaataaatgaatcggaaagcaattgaggaagctacctaacagctttggcaccacatctgtgcacatgcatgcacaccacacacagtttttctctttagttactgaactttttggtgtgtatgtatgtctgtgtgtctgtgcaggcacacatgcccatgtacacatgggaaccacccgagaacatcgggtatcctgctctgccattcttgcttaatctttagaagtagagtttgttctcactaagctggagctagggtgatggtgagcaatcactggcatcctcctgcctcctcccttccccttcccagtcccggggtcacaggtgtgcatgccatcctgt

SEQ ID NO: 25042 - DNA, 1101 bp, Mus musculus
actaagatttatttaatcaagctttacagtgaggatcagaagtctagcccagccactggtgggtcagcttttattgaccatgggtgggtggggggtcagcatttgaataatataaggataatatctatgtagtgtatagtaacattatgctcacatggaacttttctgggacgtaagtagtttgcatgtggctcctgttccctcctagagcaccagcctggacatgctgattcctctcagagcaggcctgttagtaagcagagctgtcctcaacttgcttgtagaacaaacttgtttagggtaggactcagttgttttatgtgtggatttttatttataagaatgttggaccttgaccctttttctgtaaatgaacgttcaggtggcccataaacaaggaagagcatgctgcaccagggccttcaacctgtgcctgtgctcagctgcatgggtctcagtggtgactggctgactggtgacatactctatgaaaacagcattattgatgtttgctttgtttgacaatctttttttcttccatctccttttgaaaaaccatgtccaggctttgaactccaaagatactcatatatgtttggaaagagatatttcaaattgctgggctccaacagtagaaactgctataaccaaggtgagcacatgataggttttatgtttaaaatgacagatttggttaaattaataaatgtatggtgaattctatgagcgctgccgtgtgagattgagttgatgaatttgtttctctcctgtcctctgagatagcttgtttatttggtctggattaaaactcgtgattcttcagcctcagtggtggggtttcaggtgtgtgcatgaccacaccatacctggctctcgttttattctctgctgttctctcgcttctcacttagaagtgtggactgcgtgtagacacagcactgtaaagctccacgctgtgctgttgatgtggtgcatgatggtctgggcagggaactccaggattgagtgcgaatagcagattccagcattgcttatcccaacttgatagagcacagctttggttagcaaaatgtttacaggaaaaatcaaccacagtggcac

SEQ ID NO: 25043 - DNA, 2009 bp, Mus musculus
attcctttctttgctatttccaccaggataattgggacgaagatgaagacaaagacagtgaaaaagatgagggcgttgatgaagacaatgaggaggaagatgaggacatggaagacaaagaagagaatgaggaggacagagaagtgtcaagtgaaaaagaattaaatggagattcggatttagatcctgaaaacgagagtgaagaagaatgaagacagatgcagccagccagtcacacgagaggcctggcttgccttgcccagtgctgcctatagcatcctcccagggaggcttgccctgtgccagaaaacaagaggccaccatatgcttccaagttgacaggcaattcccacacttccttcctgtcctgagtgccccagactttaactgtgtaaataagagtgtttcattcaaatgttaataaactttacacagtaaatagacacactttctgcaatgtactgacatgagtgtccaatatatggtatatttttctaatataatactctggtatgattggttctgttggaaactgatttaggtgaatacagacataccataggggtaaggaactgaatgctgtaaaggagtcggttctcatctcaggttggtatctttcatccagtccaaaatgcaagcggcactaatgaattgttcttaatccggcacgtctaatttgacacgttttcatgaaggaataactaagttaaagtgaaaatggttgtgatttacagaaataaaatcccagtgtccactcaatgctggtctgactcagatccagttgggtggttggagtgcttccccaaataaccacttattttttaaagcgtcatgtgagatatttttttaaacaaaacaaaataatggtaattaaagaagcaaagcttcagccatactaaggggtttcttgtctgcagagtgtagagactcatcagtgtacagatgagacctgctcatcgtgcgactgtaacccttcagtcctagctgcttttgaagaggtttccatttttatttaaattgctaatggatcagagaacaattgtttattttttctctttggttttagatattaataataacattactggaatttttttccaaagaaactatttttataattcaataatttaacgttttcgttccttttcattgcccactcttggcagggctagggtatctgtttatctttcaaaatgataaatctgactcaagattttttatgtatgtataaataagtattttggtgtgctacacagctttttcaaattaccagtaatttgtcttgtttctaaggagtgggccagtactaacttaacttggtgttcagcaagggatgcagacggagagctcccttctgcaggactaagcagatgcgtgtctttcccacccgtgactgtaagaatgctctctgggaggacttccaccggggcagagcaggctgcccagccgaagcgggaagggcatgttgggcaagctgctggagcgactgatgtacagttgttatttgtctataaatggagctgtttatggcaatttaataccattctctttgtaaagtgaataaatactcatctttacccagcgcgtgtctcgtggtgtatatagagtgcacaggtgtgtgtttgggcttaggcctatggtgtgaagggttttaaggtggtttcacgcctagaattcacagggaaatactttgaaggcttgctgtgttatcaagttcgcaacagtagagcaataggcatcttgttttaaatctcactccagtgacaggtggttattttattttttttttagtctctgctggttgggttgcaactttatatgtcaaggttctaggcaaacaggaagcatttatgtctaattaggtatgaggagacaacaaaggaagtttttggtttagaaatgtctgataagatccacactgtctgtctgtctgtctgtttctatctatctatctatctatctatctatctatctatctatctatctatctatcttatctaatctatctg

SEQ ID NO: 25044 - DNA, 1099 bp, Mus musculus
agtggcgcagtgtgtgtgctgtgcttgcttcccaccgggcgcctgcgctctgctagtgaagacttccggtgggagcagggagcgccgttttgcacaactctttctttgtacaaagtagttctgccaacttccatacatttcacgaaagttgttttttttcagactactttaatttctttttatttttttgtaattaaggcatcactacatcattttcctcttttcctctcctctctctccaacccctcccatgttccctatccccgttccctttcaaatgcatggcctcactttctttgttattacatatttatattactgaatatataaattcaacctgctaagtctgtatgatgtaccttgtatgtatatgatttcagagtggaccacttggtattagataaccagttgtggggctcttctctggggaagacgtatttctcctgatgttagcatttcttagtagcctgttcaggctggggtcccctcttttgtgttagcctgcctattgctgttgtctttattcaggtcttgttcaggcgtcatgttcatgagacttcatgggtgtagtgtcttgatgtttctaggagacaccgctcccagcaaacttgctgttcctctggctcttagtctttctatcccctcttatgctatgatctctcagtgtaggtcaggaagctgagttggagatatatcagctggggctaggcaaccatgcatctttcccccacatttttatcaactgtgggttttttttttttttttttggtgttgttgttttttttaaataatggtctctgttgcaaagagacatttctttgcagagaggagagacctacttacttgtgggtatacagataacaatttagaatgtagctaagaattattctgcttttagttgagtggtgatagtaggttctccaagatccttggattccttgttcctgggtatctggctaggtttccagtaccaggcacggttttcctcttgttgaaccgctggttactactaaggtgtgcttacaacgatagtactcttaggaatatcatatagttcatttgattcataccacagtggtcattgtagttcgtctttatc

SEQ ID NO: 25045 - DNA, 1109 bp, Mus musculus
tagagttcttgagatcttctggatggtagctgttcattcgatactcagtaccaataggacagggcccaggagccagccttctggatttgaacatatcttgagatagtatttcctagaggctagataccagagagtgggcattttaggggtagtcttgaattaagcaagttggggtagtcaggacctgccgtaagttggacattccttacctgacatgactggggtcagaagcgttttgaattaggccagtttgagattttggaatatttgcacaatctactgtttgaccatctctagccagaagctctgaaacctgaaaacctgaaacccgaaaatctgaagcattgagagattgtatctggacggctacaagggatggcatattctaatctgaatgtgaattcgaacatctgtgctaaggttgttcaggcttcagaacgccgtacatctggattgtcctgttcaggctactcagcctatagcggtctcatctggaattacattcctgcgcgtcctgcgcggaatctgggtgaatacagagctctgtgcttcaggtgactagggactggcccactggccacagctgaccaccccttggtctcacatgctcttcccgagttgtctgtatccactctcgtgctgtagcaccaacatgacgtgacaggaggctgagctcgctcggctctggttcttcacggaccactccatgtcggagtggagtgtgtacctggctgtcttagtggaactgattctttcctaggaacaaggtttgtgctgttcccatggcagtgattttcctcagggaaccttcttgtttgctttgaataccttggcctgagtgaggaccacagccgtgacaaatacacaatgagatatccaaccaaccagacaagttagaacacgtgaagtgagttttaaaaactaatgtgcttttttttgagtttctcttccctttgtgttctctcctctttacctccccttcccatacctcccacccaccacttgaacaggtttgaaatcttcagccacatctgcagcaaataacagtcaccatgaaggagcgctccaccttggagaaagggtgctggtcgtaggccagcgagtaggca

SEQ ID NO: 25046 - DNA, 1168 bp, Mus musculus
cctcccttcaaggaacaataaatatcctgcccgttgtttagcaaacagtttaaaagatagggacagatagatgttggttctgtttattgaacttgatgtacatcaaggagacagtacaacacagtggttaataataaaagccttgaagccagacagccctggggctaaacccaagccctgctaactatgctttctcttgagcaaggtttgtggtttgctcagttttctcaaccttggtttcctctatcaagtttgcctaccttgttgggtggctgtaaggatcagaggggctgattgtgcacattgtactctgaggaccatgcaggaaactcatcgctgtctctgcatcttcatggcagagacacagtacccagtcatggtgtgtttcaaaatggaggtggcaggaactagaaggagcatcccggaaaggctttatgggaactggcctttggaccccttaaagggtaagaggatttaccttagacagggaaaatgaaaagggtcattctagaaggggtatggagtgggtgggggagggagcacagcacaagaggggagacggggaaatgtagtgtgtcaggaatggcaagacagccattttgctgtaaacaaaaagcacacgttatgatctgcttaatgtattcatcttgacttggaaatttccataaagatatcttgccatgcctctctgtatatgaaagtgactcaattatcctaatgccttgctggtctgaattggaaggcagttatgtgaaatcttgatggtggtaaaatttgttttctggaattctcagccacttctaactggttttccatttcactgaggtctctcatcctactccagacctcaggcacccaggacctctatatatgcaaaaaggattattcatttttcttacattatagctcatattttgattaaagataaattagggcacatgagaaaatctagctcccatgaactgcctacccccaccatttgatccagcctcccatactctttcaaaaaatatagccttagaaagtgaatttgcactacattggggtagtttttgatatgacttcattttggggcacagaatttcaggataagtaaaaggagagctgttggtagaatttcaggcatccgctggcatagatgggattcttttggctgacaatggtgctg

SEQ ID NO: 25047 - DNA, 1416 bp, Mus musculus
agaggcttcggtccttctaccaaggagagaaaaacttccactttactgggcagagtacagttccaccttgcaagtctgagctcagagtccttgtggtcaagctactgtccatagtgtactgggccttgttctgctctgcaatgtgcctgctcatatatctgtacagccctgttcggtggtattttataatcagcattgtgttcttcgtgctgcaggagagaatatttggtggactggaaatcattgaacttgcatgttaccgttttttacacaagcacccacatttaaattcaaagaaaaatgagtaagatggcggcgttcatgtgaaaacctagggttgtcacgggaatgtcagtctttgtaaactgagacgagttttgcatgactatgtcaaatgtttcttactatcatcattttttgttaaaggtattttgcacttaattttatgggggaaatattgctatggtttctttaaaatctctgaatgtaattccaatgctgagtatgtagcaggggtcaatcgctgtgaattactagggtcagagtattacaaacaatcactaagctgtcaagacaaaatgcaagcttttctgaaaggaccaacctgtttctgacagacttttggctcagaggtagccttggcaccatgaacaccagccccagtgtatctaagcaggtagtagtctgcctcccccgcaggacacagtccattctttaattcttttacaccaatcaaacgcaaaggtggacttgccttgtcctaagctgagccccattggcagggagccctccatcactgatagtctcttgtgctgagtgaggcaggaaaagaccccctttcctcgcctggaaatcacatctgcactcagctcagggagcaccgtcaggctctccatttggcttttaaaagacagaaactggtgcagcttgcttttcactcacactcagtcctgccttcctgatggtcaccagggagcgtcatctgtagcgtggactggttcatgtaaagatgcattagaaaaacatctgtagttcagacagaaactggaaggcaggtgtctgtcctatgcatgcagggtgtctgccttctgccattagagctacaacaaacatgcctgcagacaggatggtgtagctaaagcccccaaaccttgataactttactcttaaaacaaaaactgctaactcagaatgagctctttcagtgatagcaaggacacactctctctttttagtcatctctcaacagtgacatttaaacacacactgacctactgtctgccaaatattcctatcatttggaagcagtgacaacatagcaaaccaatagcgagcacgcagtgtcctgggtaagagaatccttgtggccactgtttccactccactgagctgcatgctcccatctgtgtcatgtga

SEQ ID NO: 25048 - DNA, 1143 bp, Mus musculus
cttggcaggtttatggagtaagtgccaggtttatagtgtatgtgcactgggtcaaatcaaagcagatgagaagactactgctctgcaaatgtcaggactgggtaggaggttatagcctttgtgagtagttggtgttggtctaatggacttacttttgagcatattttatacctggcagtaccaaagctttgcttacttaaagtagtatacatttcggtgacttaagtagatgcttttagtattctgtacttgtttttaaatcggctgctttcaaacttttttgtagattttttttaagaattcaacaataagatatgtctgttatcataatcactgttaataaatgttcatctttttagtgtcaacgtaatttgaaaatattttaaatcttaaacagcttaaatgacttttttattttattttattttttctgttttctttaagccataaagatgagtttaccattattcctgtactggttggagctctgagtgagtcaaaagaacaggaattcggaaaactcttcagtaaatatctagcggatcctagtaatctctttgtggtttcttctgatttctgccactggggtaagttctagttttaatatatgctagatgttatatatttgtggttaaagatttcttttcattccaagctctgattctcaattctttatcactctttggaaagttgtatttgtagtagccctgtttaaaagtgcataaaggagccctttggtcatttaaaaaggatcagcagaggatataggcacatttccaaaggcgactggtacaattggattcacactgtgagggcatccctgcttttgaacacttttgttagtgggagttaaagcctgttaaccccatatttgtgtgcatatgtatggtaggttctttgaggtcaggtttgatagatagaacaaattcttcacaatgtagaagaatagtgtgtgctataccagtccttttctgattttcatttttgtaattagtgtcttttatttcttttggtgagctttttttttttttttcccacaattgcaatcaatttttttagttattctctagtattagaacatataggctaaaagtaaggacttttaagtgggttgtgattattataaactaagaggaaggatat

SEQ ID NO: 25049 - DNA, 1184 bp, Mus musculus
ggtttttttgaagctcctctttttggctgctaggcctcttactgcatgactggtaggcatgtccttggagtcatgtgttgtggttgtctcccatgtgtcttccacccctcccccatttccaggatcttattacgaaatcctggccagctagaactcactatgtaacccaggttggcttcaaatttggagtagtccttgcctcaagggtccaacattctgggataatattggacaccagtcctggctttgaagtctatttatgtcaagttgataagggcctcattttaactccattagctcttgaaaaaagttatctccaaattggcctgcagtcagatgtgggaagctggaactttagtatatggattttgatgagaatatagttaagctcttacgttcacagaatgtagtaaaagtaggccatcagcgtggaaaaacaagtacaatttaaagttacttttcctttttttatttaataagatttgtgtagaagtacatttgttctgtgtttctgttgtgtatctcccagccggagaattttcatccttgggccttcccatcatgtgcccctgtctcgatgtgcactctccagtgtggatatatataggactcctctgtatgatcttcgtattgaccaaaagagtaagtatatagaaatcatagctcttaaatagctaaagctcacttaataaagattgcaatttaatttaagatattttaaaagatacaaatataataatatctaaactaaaagttttggtaactaatctgtatacgccagacacaaaagtggtattttcctcataattacaaaaaatatgttaaaggcacttagctccataccatagtggttacatttatatttagagaaatactttgcttgtgctataccatgaagcaagaaattagtatacatgccaacctgatgaaagacttggcaagttaactctatttttatgtgtatcacttttttcactttaaatgatggcaataatactttcatttcctctcattgtttttttatggggaagttattctatattttctgaagctctgaaaagtaatatagaagttttaaatacattttgtttttaacacgtgttattttttgtgtatatgtatgtatgtatgcatgtgtgtgggcttacaggtctgtagtcatatacgtgtgtgtaaaggtgcat

SEQ ID NO: 25050 - DNA, 1168 bp, Mus musculus
gttttgttcatttaataatacatgaatttgaccctccctctttatggtactgatgatacatgtgatacaaatgtgggttgcagtgctaacaagatagagaaagaggggctggaaagatgactcagtggttaagagcactggctgttaaccttaagtggtcctgagttcaattcccagcacccacttggtgtctcacaacataacggaatcctgtaccctcttgtggtgtgccagcatacatgtgggcacaacactcaaatacataaagtatgtaggtaaatctttcttaaaaaggtggagaagacagaggacagaagaagagcttatgtctgactcacactggcccaaggataaaatagcttcctgtgtgatttcttccaatttgaggactctgagaataatttaatcaaaaacttccttttatcctgaatcctttctcaactttgaagtgaaactgacatgtctttcaaaaaaaaagattaattttcttagcttagtaatagattttggttgtttgtttcattcattcattcattcattcattcattcattcattcattcattcctgcctgcctgcctgcctgcctgcctgcctgcactatgcagaccagggctgcctttgctttgtctcctgtgagctacaattaaagatgtgtttcattacatctgactttttttttttttttgctttgttttttgttttttgtttttttgtttttgttttttaataaagagatagtgtctgagctttgtagaacaagttggctttgaaatctcaatcatcatagatccttctgggtcaccctgagtgttaggatataggtgaatgctgtcatacttggtatagtaatagaattctgtcagagtatattgccacagcacacactccttgccctgcaagtctccgacagtgaaagaaccaggtcccttttcttggtacacaagcccactgccaattttcttctttctcacagttacccccttggaacatttaacttatttatgtttgtatgtggtatggtaagattattttatttgaattttagaaaacaaaaaaaatgcatggtttcataatttaggttgtagagcaagtttggacgtttgctatgaaataataggaagctaattttgctttggtgttgaaacaaagggattatggaagttgtaa

SEQ ID NO: 25051 - DNA, 1219 bp, Mus musculus
cgtgcacgctgagcctcctcggcgggcccggccgcggcgctgggcatgctcagtgggccggccccggtagagcggcgagtaaggacgcgtgggctccccaggctctgcctttcccgggttcaggccccggccccgggctgtgtgtgtgtgtgttgggggggaggtggcaccgatcgccgccgccctccggctcgcggcctcccgacccgggatggcgcggggccggtcccgcttccgccgttgagcgcgcggcacggcgggcggaggcgcggggcggggcggggccggcgggcgcgcggcgggagggaggcctcggtggtgggggcggggcggggcggggcggtggggaagggcgcggagtcacgggggtggggtcagcgggaggctcggcaggccgcgcgcggcgtggccggggggcggctcgcggaagcagctcgggcaggggtaggggcggcggcggcggcggcgactccgcggccgcgcggctagggtaaagccgccgtgggccccatcttccggcggccggcggagtttgtggtgattgttgccgccctccgccctggctgccatctcctcctcttcctcctcctcctcctcctcctcctgggccgggctggtcccctccccgcggccgcctcctcctgggctgggcccgcggcgtctcgtcccctcgcggagccgccgccgccgccgcctcctcattcatcctcgtgcaccataggcggcacaggcaccaagatgtccaaccgagtggtctgccgggaagccagccacgccgggagctggtacaccgcctcaggtaagggcgccaggccgccggggtggtcgagctgggcagccggggcccggcgggcggggactcgggcggcgggcggagggcgctgaccgcgtgccgagggatcggggccgggccgcgccgcctcccccacccggcgctcgggcaggcggcctggcgcccgcggagttgggcgaggagttgccggccggccccggccagggcgagcgcgggctccgcggctccgcggacggcctctgcggtggggaaggacgagttggcgcggtcctcgttgccagaggctggccgaggggaccgcagtttttgctcccacccttggggcacccagcgcccctggaaggagtgacaggcagtactttttctaccctatctctcgtgttgctactcttggtctctctcgcttggaagatctgtcagacctgg

SEQ ID NO: 25052 - DNA, 1706 bp, Mus musculus
atcctcaattttacccttgctcttgttaaagatttattacttaaatatagaagatggattatttcttttcctaggatcatatgctgtttatagctgtaatttaaatcatatctcttaattatgattttagacatccctggatcataaaaatgaagttttgatcaataggaaaacaaatttaaccaaagctgtgcatagtttttgttgtgggcagtgtctttttaaggtctcaaatgttaatgcatcagttataaaatactgatagtcccacccggtgatggtgcgaggaactgcagcagtcctaagcagacatctacaatcaggctctaaagctgcaccgctttcacttaggaggggcagtaacattccccctgtttatgtattaagacaggcatcagctcaatggttaaacagaagagcctttaagatcagggttcattcttgattctttaaggacaaattttaggtggtaaaaattttaaatgtctaaaagatacaaaatgaagttaacccaaaactcaaagttattgctgtgtgactgtccatcactcactgtagagaagcacctctgttcatcaggtcgtaggttcagctcctgttaatgttttctgtgatgctgtatgacccaggtagattgtaggccattttgttactgtcttttaagatagggtttcatggagcctaagctggcctagaactcaatgggtagcctataaataaataccttaaactgatcttcatgcctgcatctcccaagtgctgggggtgctgctggtgtgcatcccacatcaggatgtttgctctttttcagatagaagttgctgggatttccaaattaacattagatttttgtgttgagctctgtttactgttgaagataatgtttaaataataaggattggtagctcatgttaacatgacagagtccttgtaagctcggtgaacttactgatcacctaactgagccaaaggaaagactcaatacaatctttccaaatctgctagggctacaaaacttttctgagactagatgcccattggatttatttttgtctctttgcgtttaacaggacaaacagaatttgaaattacatgtatgtggcattctttgtttatactgtaaaattgtttatatatcatacaaaagctaattctttgatagactgaactgcttaatggtttgctttttgttttcttaagtcaggttttcctttaaatgtctgtctcagttttagtcttacttttacttctgcgaagcaaatgacttaaagggtgcatacagctacataacgtggggttttgttgtaaataaatgacaaactttgttttgccttaatttttatagtcttcgatatttcaggggtggtaatttcatggagtattttctaactcttgtgtcaataaactttgagcagaatatgcaaagcagtgaatagaaggttctggatagcaatccagaccagtttaaaaggacataaattcccattggtagagctcttgtatagtcccgcttgtgcagttcatcccagcttatgcagttcatttgaaaatgaaattcaagcagaacacaacaggcaattcagatgaagaggttatcaggctgctgaagccgctggaaatgagaaaggaaatcttggagaggtaattgataagttgacctctgtcatctgcagattcctttcaaatccttgcactttccaaaattt

SEQ ID NO: 25053 - DNA, 1378 bp, Mus musculus
agcagtcttttgtggttttcctgttgtaggctgggtcagtgcatgtacggatccgacgagatgcgaacgaacaaatggtccttgctcatgtgagcaacaggctgtgcacgctggtgtccacgctgactgttcagatcttcaaggacgactggattcggcctgccttatcctctgggcctgttgcgcccaacgtcctaaacttctcagaccatcacgtaatcccaatgcctttattaaagaacgtggatgagaggacccccgtcacgtcaaccccagccaagcccagcagcccacctccggagttttcatttaatacgcctgggaaaaacgtgagcccggttattcttctgaacacacagacaaggccatatagtttgggtcttaatcgcggacacacaccatacagcagcgtgttcagccaaggactcgcatttccaggagttggagcaggccagggattgaggcccaccttcccacatataccaagtagatatggaatcaacaggatggggcagccaagaccctgacagactctaacttattgtgatggggaatagcgacttcttgccttccaatgtatttagtaatccaacttgcattgactgttcaaccacttacatgtcagattattccaggcttgttcatatttcataaaacctataaactatatttttgtaaaatgttcttgtggcagtgaggtctttggaaatgtcatgggcattaggtaggcctccttcaaaaagtttggatatgagctgctttgtagcagcctatgatgtgatagtctggcctccagcagtaaagccatgtgctgagtggatctgcatcttaccaaaaattcataattccttcagtagaatttataaacatacttcatgtatggtgcccaactaagtaaatgaaacttaggtgtccatttgaaaagtaaattctcttttatagctttttaaagcttaattgctacattttttgaggccctcccaaatcatttgttaaataaaaagtaacagtttctattggaagttgtgaggtatattctactatgtagcacaatttaattattactgatcttttgaaacaggttttgctgcatagatcaggctggcttcaaacccataatccttctgcctcagtctcccacatgccaggatttaggttttgagccaccatagaagtatgtcctaaaattttaagtaacaggttttgaataaagagtgtttggcttttttttttttcccatttacaatcgtagtatatttgtatactgcagtcaaacactgagaatagaggacgactgtttatgaatgtggtccatggttcccagtgttttattttgattataaatatgagacctttggtgaatggaatgaggtttaaa

SEQ ID NO: 25054 - DNA, 1152 bp, Mus musculus
tgggaattcttgctggagggattggagaaaatattactagtaaaattttatacattccagatagagaggcaggcttaaagtctttttaaaacaatattttttgtatttaagtaattgcagttatctgggatttttttttcttttttttggtcagaattctgaattctgtttggttcttcatattccgcgaataaataaaaagcgttgtgtttttcagattgtgtcaatattcacctgaacacttgtgccaaaagcacctggatggggagttgtgtttcacatgaagtataaatttgacaacatcctgaaaaatctaaaagtgcaatttttttctttaaagaattttctctggcaccacagatcctgtagatacctatttatatttatacatatatatttatgaaataattcttattcacaaaatatatttctgaatagcctaaaaattaagatactaaatctgatgcttaaattttctttaatttggctattactgttttttgtttaaaacttaaaacttgctttttaaattgtgtatagattttaatctaatagttgctggtatagatttggactgtgtgtgtgtgctcttaagaaaacagttttgaatgtctaaacatttgatttaaagttccctgtttatctttttgaccaaaggagcaagagatataatggatatggcattcattaaaatcattaatatataggaaaaataatatttatagcatcagcaaatatttttaagtggtatatgatcttggacaatgttatatgaagtagaaaataaaatgttttccagctgtgtgttttgttttacaataccttgtcctatattacttgagacttttaacaagtattgtttttttctaacatatttacagtttttgctaggggaaatattaagaaaattttatcacagtttttttgtaaatcatggattctgtatatatctctaatattactttgtaaattagacaaactattttatctgtgtctacaaaatagcaaatccctgttagcaaattattgtattattctttctgacattgcccccaaaaggttaacttctgttcctgatatggtatgacatcgtctctgtgttccttaggcaagacagatctacaaaaaaaccaaacaggtaaaagccctaga

SEQ ID NO: 25055 - DNA, 1061 bp, Mus musculus
aaaaacatttttttgttctttttgtttttgaagacagggtttctcagtgtatccctggctgtcctggaactcactctgtagaccaggctggccttgaactccctgcctctgctgagccccgggatttaaagctggcaccaccgcctcccagcttttaaaatcccccttacccagctgctcccacgtgttccccacctcctttcccacccaaattaaaatttctcgatctaaaataatgacagaaaataacaaagcaaaagtacagaaaaaaaaaaaaaaaacccatacaacccattttgtgttggagctattcatgggcatgaaacctgtcctggagtatggttgatagagccagtgacacgtcattgatttttctcttgctcatcacattccaattacaaataacttggcaaagggtaggagtttgtgtctactaccccttaactgtggattttttcttagtgctaaataaagtatattcaggtagtgttgtaagtctagtgaaaccctagatttagactgtgggacacgtaggaagctttaggtttgatcccattactgagaaaaagcaaagcaaaagaaaacatgtacacttagattttatagtttccctccctccctccctcccttcttcctttccttcctctttctctgtttgggttttagagacagagtttctctgtgtggccctggctgtcctagaactttctttattgaccaggctggcctcgaactcagagactcacttggctctgcttcctgagaactgggattaagggtgttcacccctatctggcaagtattttaagaaaaatactttaaaatactgtcctctcctcttaccacgtaggtcacagggctagagctcaggtcaggtttggtggcacctaccttaatctgctgagccatctccttgggctgcagatattttttaggtaatatcattgtaaacatttcttctctctagatggcatttactctgtcatattagttttggaagttaagaatgggattctagatttggtttgatgacttgtgaatgcatggtgtttttttttttt

SEQ ID NO: 25056 - DNA, 1150 bp, Mus musculus
ttgtggctaatgtgcttgaagatactgttaaggatcttgaagaacttggggcaaacccctccctaacgaactctaagagtgaaaagacaaaggaaaagcaccaggaacaacacaacattcccttcccctgtttattggctggaggtttattaacatataagtctcctgctacctcacccattagtagtaattctcacaggtcactggatggtttaagcagaactcagggcgaaagtatatcagaacaagggtcaactgacaatgaatcctgcacaaattcagagctgaattctcctctggtcaggaggactttacctgtgttacttctttatagtatcaaagaatctgatgagaaagcaggaaaaatcttttcacagatgaacaatatcatgagtaaaagtttgcacgatgacggttttacagttcctcagattattgaaatggagctggacaaccaggagcagctgttgttacaggatccgcctgtgacttacatccagcagtttgcagatgcagccgccagcctcacttctccagattccgagaagtggaactctgtgttccccaagcctggggctttggtgcagtgcttgaggctaccaaagtttgcagaggaggagactctttgtatagactctataactccttgtgctgatggaattcatttgttggtaggactgcggacatgctctgtggaatcattgagtgcaataaatcaagtcgaggccttgaataatttaaataaattaaactctgcactatgtaatagacgtaaaggtgatctggaatccaatcttgctgtagtgaatggtgcaaatatcagtgtgatccaacatgagtcaccagcagatgtgccggagcatctgctcatccggccggagcagaggaatgtcgtcagtggtggatatttagttctttacaagatgaactataccactcgaatagtgactttagaagaggagcccgtgaaaatccaacatatcaaagatccccaggacacaattacctcgctcattttgcttccaccagatatactggataatcgagaggatgactgtgaggaacctgctgaggaaatgcagttagcctcaaagaatgggattgaaagagaaaaaaagtctgacatttctacgcttggacacctggtagt

SEQ ID NO: 25057 - DNA, 1233 bp, Mus musculus
catacttcttattctaatgtttcttaaatgaatcttgatttcttaggtttgttgaattactactatgcatctgcatttgagtgagaaaatattaaacattgcataaaagtagaagagttattctgacctaatacagtagtagtgttttgtagtcatgcactactttggattgctcatttatgtttatagtccccctaagatatctgataatttttttccatttatacttattcccttatttacttgtaattgaatttgatacacctgaccacagaaacaagaaacacaatgtatgtgctatctcttattactgctaaatattttacaactaatttctatataaaagcagtaaataagtcacaaaatacatagattataattgtttactgattgctggggggaaatgtgtatgtgggtgtactggtgttgctcttaacaccatacagacacttagataagtcatttgtttctttttctaacagggcattctgttcctgcagttttacagagtacctttcacgctcaggcctgtgaagaactgtttaaacacttgtgcatcagtgggaccccaaagatacggttgcatactggcctgctccttgttcagctatgtggtggtgagagatggtggggccagtttctttctaacgttcttcaggaactgtataattcagagcagcttctcatcttcccacaagataggtaggttggagaggttaatggttttgttgtaaattaccttcacttgtagaatcattgtcagagtgtgaagttttgtttacatggatagtaagtttggagatgatgtaaaataaaataggtctcatggttgacaagtactaaatgaaggacatgagctctaatatgtttaccctcggatattttctgaatcaatctatggaacttaataggccttggtatgtattttctataagatctactaaatgcgattctttaggctcttggggagtttgttctctgcctgatttctaaggggttgcataagaaaaaataaccgggctggtgagatggctcagcaggtaagagcacccgactattcttccgaagttcaaatcccagcaaccacatggtggctcacaaccatccgtagtgagatctgactccctcttctggagtatctgaagacagctacagtgtacttacatataataaataataaaaaaaaaaaaaacttaaaaaaaaaaagaaaaaaataaccaacaactagagtag

SEQ ID NO: 25058 - DNA, 1197 bp, Mus musculus
cgttacccaggtgtgaagacttatgcctataaggtcagcatctgcaagataagacaggaggatcagaggttcaggctggtcaaaagaaacagttggggtttttgtggtttggtttggtttggtttttccagacaggatttctctgtatagccctggctgtcctggaactcactctgtagaccaaactggtctcaaactcagaaatccacctgcctctgtctcccaggggctgggattaaaggcatgcgccaccactgcccatcgagacagttgtgttttaaagaaaacacactcccctatttttttcttggacactttcggtacatatgaaaattttgtccattagaagttgaatgttgaatattttcatcttacaaacgtgtatactgaaaagtttccattaaataaacatttctctaaatcttgtatgtttctgtatgcagcattttaaggatttgattcgcttgcgccggacagcagaatggtctcgttctaatttagacactgaagttacaacaacaaaagagagccctgagattgagcctcttccatttactctggcccatgaccgttgtatctcagtagtgcaaaagctcgtcctgtttcttctttccatggatttcacctgccatgcagacctcttactgtttgtctgcaaggtaagtaggctgcagtacagcgttggactgatatgactaatgaaaggaatcaatttttctcttttgtgttcaattccctggtcttactctgtgccttggaaggttttaaaaagatagttttcccttagttcctggtgaatcagatgcagtttgtttgtttggtaaaacttgagggttgggaatgtagataatgtgagtgtgcctaccttcattcttctctcagctcacacaggaagtgtttcaacatggatgaggttactgaatgactttgaatgccatgattgttttcctgcagcacagtcattgcttatgtgtaaatattcacccaaatttaaaatcagtcacaaaatctggacctggtgtctcacttctttaatctcaacagtcaacatggcaggcagaggcaggctaccttgtctacacagagaattccgggacagctagagttacacagagaaagtcagtcttgaaaataaataaatttaaatacaatatttaaagtgcaagtttgcaatgtttctattttgtttaaagtaat

SEQ ID NO: 25059 - DNA, 1248 bp, Mus musculus
ggattcctaaatgcataaacattgcaataggagccgtctaactttatcttcttcaacacttggaagaatggttttagaaagttgttacgtggtgctggcaaggtggatcagcaggtaagagcactgactgctctttctgagttcaaatcccagcaaccccatggtggctcacaaccacttgtaatgagatctgatgccctcttctggtgaataagaagtcagctaaactgtacttatatataataataaatgagtctttgggcctgagagagcagggttgactttagcgagcagaggtcctaaaaaattcagttcccaacaacaacataaaggctcacaaccatctgtacagctatagtgtactcatatacataaaataaataaatatttaaataaaaagaaagttgctaggtgactcaagtacacggtgcaggtagggaagacttgtttgattagtgagaagcattctgctcactagttcttctgtgacgttagaaaaccactctgttagcctcttcatctgttacatatgggtaataaaaacatataaattattaaaatggttaggaccatctcctccaacacaggagaattgttggctccggtggctgcagaagcgatggaagaatgcactgtgagtgaggatgttggtgcaacagctggcgactctgatgactccctgcagcagtcccccgctcagctgctggaaaccatagatgaaccattgacacatgagatagcaggtgacttagatcagattcaagacagccctcacttctgtcttttgcatgaatgttaatgacatataaattgagttttgtgtttttctgtttggtcttttaaatcaggacctttttccttttatatcttttgctatcatttcctagtatattaagcattttattttagtgtaacttatatattgctttcattttatagcactgtaagtattttcacatattatcttaatttcttatctgttgttgcagaagaaacaatacccagagcttagcaccttaggaagcattaggaacagaagagtcagctcatgtagtggcttccaaccatgagctgcagggatttgcactctcttctcatttatgtaggcaccacacacacacacacacacacacaacatcctacaatcactttcagttgtttgttttagtcataggttcccccataatcccgttctttcaactgattgcttcttcatttgggaagcctttgtttgcagacagcttccaa

SEQ ID NO: 25060 - DNA, 1143 bp, Mus musculus
gtcttaaatacgatcagattcttgcagtcatcatttctgtttctcttcatccattttttaatggagatgcatttgtaatgcttatataattattgctctttggcatatcaatttatttataattctagttacctttcaggttgtaatctttttttgtttgtttttttttttggtttttcgagacaaggtttctctgtatagccctggctgtcctggaaatcacttggtagaccaggctggccttgaactcagaaatctgcctgcctctgcctcccaagtgctgggattaaaggggtgctctcagtttcagattgtaatcttacaagttattctgtgtcaccaaataaacagaatactactgtaacattttataaattaataacattccaacaactttggggaatttagaaggaggaaatgtttattttgtaggcttacttgtcataatattgtaagtttttataactcagtaaagacattaactcctttctttttgtttttaaagcctataagcagtacatggtatgactactggggtgctgattatggtacctataattataatccttacattggaggcctggggatgcctgtagcaaaaccaccatcaaacacagagaagaatggatcccagactgtcagtgtttcggtgtctcagggtaagtgcatcagaacagtttcaggaatatactaataaagttatgtaagctgaattttgtgttcaccatttctgaattgtgctgtctttgccattcatatctgttactgtcagcaggttgaatgttggtccatgttttctctctaagtcactctaagctatttgatgaatgtttgacgtttgaagtgacaatacattactttattgtaatttcttttttctatgagattacactctagttagattatttctctcctctctttcctctctcaaaccttcccccataccactccttgctctttcaaattgatggcctctatttttattccttgtattaattttgagcatagtataactatgttctcttcctgaactcataaatcacacaccccgtctgttgcttgtcacttggatgcgtgcttcaggcagtttgggcagtcacttgctgacactgtatgatcctatgatcctattatttgacacta

SEQ ID NO: 25061 - DNA, 1107 bp, Mus musculus
caccaactcacccactctcgctttctggccctgatatcccagattttttcaggtgcctttttataagatttttgttctgaagaatgttgacaaatcacattggataaaaagtccatcagatttgtaatgataacatttcattgtgtgtcacatgctgagctttaaacttgtcttgttactgagttcctacactatgtctgtgctcctgagtgtctgcgtgtgagtgcattgggacccacagaggtcagaagagccatcagctttcctggagctacagttaatgcactggtgatcttgtgggaatcccactgagcctctctccagtccccttgttgtcagccctttgagttttattttaggtagtgggaatatttgaagatatgagttaattgtgaagaaataatttatattttgtttttagtctttaataagtattcatttatcccaactaaatatatttttcctttctttttctatgtagcatcaatagctagctttctcacagtgctagcttggtatccaaatactttgctccggacgtggtgccttgtgcttcatagcttaacactcatgacgaatatgcagcttaattgtaagttcaaaatgtgtttatatggatctctgtcatatactttaagtcatttcagaaaatgaaatattcacctaaggatttattgcttttttttttatctcattcttttttagtctctattttatcaatatttggatgattttatatttatttaaacataagtttatttaatagaataccttacactaatatttaaagaattgttctactctctgacttgtattgtatttcccatctgactctgtgctgctgaagattaagttagtgggtttcagaggatgcgttacttaccacagttgacagaatggaacctgtgcatgacaaccgcataggtcttgcctcaatttatcttagagagctgagttaaaaagtgagtgtatctttttctgtttctggaaatggatcgttgtgactctgccagaggccatttgagatttaggtccttcccactggtctgtgtaccaaataaagatgtactggtatgctttcacaatctgaagggaggtgagaggagg

SEQ ID NO: 25062 - DNA, 1206 bp, Mus musculus
gttcagtccagcagctgctgcagtaatttaacagtttgatggtaatgcaagcagagaattacatcagacagatgaacagtatccatgttcatgggcaaagtaactcttagattttacttttaatagaaattgaagaataaaatttcatgatatggtcttttgaaaaatgactacagagataaagtcaatatttatattctggaaaggctcactactcctttccctgagatagcatctttaactagcaggttgtttcctgagatatgacacagaactactaaacatggacaacaaaattctaaagggtgtgagggtaaattttcattctaatacaatgttttcattaattccttggtcattcctatagtgtcatttcgatcatattaagaaatcgagttgtccagattcacagggacttagaaaatcatgttgtgtgtttactttttagggctctcttgctacttgccagttatctgagccattgttgtggtttatcttgagagtgttggatactagtgatgcattgaaagctttccatgatatgggtaagaaaaaaaatctcctatgctgtcattctagcatggtcctttcagctaacattgtggcatggtcatttttgtactctgaatcttcacttgtttctaggattcttttcatttagtattctttgtgaatttaggtggagttcagctcatatgcaataatatggttaccagtacaagggctattgtgaacactgcaagaagtatggtatcaactattatgaaatttcttgattctggaccaaataaagctgttgacagcactttgaaaacaaggatcctggcctctgagcctgacaatgcagaaggaatccataactttgcaccacttggtaagatagtggttatgcctcttactatgactcagctctgtgttctgatgaggtgaagcaaaattagttgtggacacaagttgaaactagattagtacaattttaaataaaaaaattccttttataggctgttgggtccaaaacattctactaagtacaacatttttaggtcagttctctcttcaaatgttaatcaccttaaaaggacttaaacattgatatgttttacatttttaatttaggtgtttattccttcatactgcatttctttcatgcttttcttattgttgtttcatgaacatctgagaaataaagaccattattttcatggt

SEQ ID NO: 25063 - DNA, 1191 bp, Mus musculus
gacaaactcaggcggcatcacgttccacagcactgtaataagatgcccatcacagcagacctagtggctcccatccttaggtttttgacagaagttggcaatagtcatatcatgaaagattggcttggtggttctgaagtcaacccactgtggacagcacttctgtttttgttgtgtcactctgggtctaccgctggaggacataatttaggggcacagcagagcagcacaaggtcagcttctcattcttcagctactacaacagtcctgaccacccagcaacggacagccattgagaacgcaactgttgccttctttctgcagtgtatttcatgtcaccccaataaccaaaagctgatggcacaggtaagacagcaaggcccttcttagactttatacaggagaaagtgctgcaattttggattagctaagcaagcgccatgtgacaacaaagcttggggttaggtctggatgagcatcagaatctaggccacaattgaagtattttctctctccttgcaatacatgctgtcaaaatacattattttttaggattcgactaaattcatactaacattcatgactggaaatccatgaacattctagcttcaatctgacacgattccaaactcccctcgctaaagagcaaggctaagagaatgtgtctctgctgctgggcctggactggctgtcacgtgccaccagaacgctgggactgttgctgtgcctgtcacatagacatgaagagtcggcttcaggagagaggctctgaacactataggctgtttattatagtatgtctgcatggccaaaattttgccagctaggattgtttagaggatatttgcaagtgctttattttgttttgttgctaagttttgcagctttgtggcccttgtgagttttgggttacttttttttactatatacatcagggctagtaacacagaacaccttaggatacaggaaaaaaggttctttttctccctgtcaatggggagtgcttattcctgtcattctattaatacaggtgaacaattttaatttttataaatatagtttgttgactggaaaaacaaggtacattagtgctcatagtagtagttattagacaaatgtctctctgcttaatataactagttaaaagcaagtgcttgagttataagcttgaaccagaagcataattacaat

SEQ ID NO: 25064 - DNA, 1148 bp, Mus musculus
gctgagattaaggcatgggccaacacacctggcaaagtgcttttcaaaaagtaaattttattataactggattgatatttactgacgacagttctggctagtccttctctttatgtgaaagatcaatagtaggcattcctttcctctattgaaatgttagtttgttttttttgtgagttagggtcttactctgtaggctccttgaacttgctgtgtagactgggctggccttgagtttaagagacctaccttccttctcctgagtgccgagattaaagttgtgtgacatcacacctggctgtttcttacacttttaattgtttatctgcttctgtattcccatattttgagatttgagttcttatttgcagactggatgcaataaaacacatttattcgttaatccatattcttaatttcttgttttgttttttttttttaaaacctgaatatctccacttaacttttgaaatttcttcccttcccaaggttctctgtgaactgtttcagacagcccctcaaaggggtagccttccaacatctgggaatatttccgggtttgtgcgaagactgtttctacagttgatgctggaggatgagaaggtgacaatgtttcttcagtcaccttgcccagtgagtaatcttggtgatcactttgttgtccttataactcttagaccttacagacaccttgtgtgtgtgtgtgtcttgctcaaatgtctgtctgtgtgcctgacccaaagagatgagaggagggctttgaactctggaactggagttacatgtattgtgagctgccatgttggttctagaaacaaacccaggtcctctgtaagaacaagtgctcttcactgcagagccgtgtctccagccccattttctctttagtaatgtagcagtttatattgacaataagtgtcatttaggataacttgccacagcccctttattagaacaacaactactatattgtgaatagtaggttttgttttgcggacacacagaatatttgataccattggtacttccaatctaaaaagctgatcaacaattcctaggtaaagaaagcatgccagaaatatgtaaaacatacaaattatgctttattgagctttttattcgtctttatctttgaaattgattcctga

SEQ ID NO: 25065 - DNA, 1124 bp, Mus musculus
aagggaaactaccttaggaaagaatggttactgaatgtttatcttttttttttttttttttttttttttactgtagagtgagaggttgttaacaaagaatatatattggtcattcttacaactactatttaaagtcagcaacttttcactgaatttgatagattttgtttggccatatcttcatgctcatatttgatttctgaagacttcctacatacactttaataaaagttaaacagacatagcccctcttttttgatttactggtacatttttaagtaataaatctgccataaaatgcactatagctggagacttgcacttgtatggatgaatttattacattcaacatatttaattttatgccttctaagatgcagaaaaaaataaatgaacatgattttattctatgccaaacatttgggcctctgaatgtatccattatttgaatttactatatgaaaaggtatggtcaattggaaaagtcgctttaaactgttttcctcaagggctcctcttattcctggactgtgtgggtttgttcctgaagtcacatgtatgtatcaacatggaggctctgtagaggagagaggctgggcctctctggtgctgttacagtacgttctgtacctgccatacaggctcgttttcatgcaaattcttcctagagccaataaataaaaatgtaggtaaattagtatgtcttgtttctaaaatagttgccatggtgtgcaatggtatttctacaggaaaactttttgaaacttgagcgtgggggaaaagaggatgtttttgtaagaccagttattgtaaagaaagctgaaagctgcacgcagtggcactcagttataatcccatatgggacagtcttttcttcacatttcacgttccagcacgaccagggctatttagaaagaccctgtctgaagaaagtagaaaaaggaagagctgacgtgactattaatatttatatagaggtggcagcctggcatcgttccttatacatccctgcctgggaagattgaggtatagagtttgctcagaaaatacagtctgagaccctgcctcaaaaattggggtaaggagaaagaatcacaattctaagaattgaggatgtaaagaaa

SEQ ID NO: 25066 - DNA, 1163 bp, Mus musculus
tgttaagcccagtatggtgacacatgcctttagtcctgttactcagaggcagagtcaggtggcaggtagatctatatgacttcaaggccagtctggtctatagagcaagctctagaaaagccagggctacacagagaaaccctgtctccccccccccccccgaaaaaaaaaaagaaagaaagaaagaaaaaaagacattactaataacttgatcgttgtgggaaaaaaagtcacagtaattcacatttgaaagtctgataccaagagtggaggagctgttcatgcctttaatcccagcactcaggaagtagagacagaaggatgtctgaggtccaggacagtcagtgctatacagagaaaccccatcttgaggtcttcctccaacccccaaaagaaagcctgatactagaaaaagcatgtggagtacaaacttaatgaagactgtggtcacggagctgctgtccatgtgtgtctaggatccaaactatgtgtgtattcaaggtgacattttgtgtgtgagctttagatggccaggcacttgattacttactgtatggcgccagcttttgactctgcactcggcctgggttcctgctttcaaagagccatcgtggtcatctcatctgctgcttgatgcagtctgtgggagctgcttttcattaccaggttgggaatttcaggacatctaggaattcctcagttacacagcttgcagctgcccattgcaccgcacagatggtcttgcctgagtggatgcccactcttacatctcttgctgaagaatgagaaaatacttgtttgtaattagacagacctgcctttcctcattacttaattcccgagggggaaaaaaaccccagattgttcatatagtcactctgtcattgatcaggagagtgcattgtcaaaatgtcattatgttggagataaatacagtagaggacagttttcttagagaaaatgaaaattttttagtaataatgctagttctttgaaagagttattataagaaattttagttaaaaattttcctggtactatttaaatgtgcatatttataggtgtattgattaaatttcaagtttttaaaatacttaaaagaaacttcatacatttctaaccttaacaaaatgacttaaattctttgttatttatatgtgcat

SEQ ID NO: 25067 - DNA, 1144 bp, Mus musculus
tcatgatgtttgtgcaagaatagaaaccctgactaagacaccctcttacaaagacaccttccaaaaagcatgtgacacaacagagtacacaacagagttgttaaagaaaccggaaattttcacttcatatcccccattctgtttttttttaataagagttgtctttttctctgtcattaacaacctacatgcaatagaaataattatgagaaccataaaactagaactttataccatattttagataaggtgcttgtatacaacatatcaaacagaagtcaagcaaaacaaccttaaaattttatcattaaatattcagagcaaccttaaatttccatcgaaatacaataatgaaacaaaacgaccttaaatttctattattagacaatagtcgaacaaaacaatcttaaatttctatcattatacacctatgccaaagtaaaatatttaagactagtaggctaattggttatttatttatttatttattgttagtccccatttcccctccttttctccatttttagatagaagagaaagatctctgatttaaacattgttttgtttcctcccggaccataaccagtatcagccaaccactctagatgataaacaaccattacatgtcaaacaaccaaaaacatccatcctatcttttggtaataggggagtcatgttcttaaaattacttgtctggaagtaaggatatctttttggtaccctgtgaaattttggatattggccaaatcctgggaaagctagctgtatttttttattttgtccagtctctgtgttgtctctccagtctctttataagttttgttggtattcatattttttcagtccttgtagatacataaacataactatatcctcaacttaaaactattgcaggcttccattttaatgtcaacttatagtatattgggttggcttacttcctcagttatattgataacccagtgtctctcagctgttccttttccaccaacattaagaaaatttagggttaacaaagcattatctagtctgtccctgcgggtttttactcttcctttttgtttaataagcatctcttttaaattacgattgactctttctacaactgcttttcctataggattgattgtgtagtatacatacc

SEQ ID NO: 25068 - DNA, 1101 bp, Mus musculus
tcagccttgcctgggaaggctctgacagacagctggccagccccacaccggtcaaatgcctgttttccagttcactgtacccagaaggtggggctatccatatggtatttttctacctacatgcattctgtctaactgcaaccagattgtgtccctgactgagacaggcaactgatctgtctaaattgttcccaacagtctttcttctgtcgtacaggcatggtgatctaaggagacacagaaagagacagagacacagagagacaaagacagacagaggcagaggcagagagacacacagagagaacagattccaaggtggtccaggttccaggaaggaggaagggaacatgtgaggtctcttcaagccatcagtcagagccgcgcccacctcactgcccaagcccaaatgaaggagagatgtgcaggaataaataaagcggttgcaagagaggagaggaaagaaagaattatacataactaatgtcatccctcattagtcatgccggggtagataaaatgcagggatgggagtaaaatagatcagagaatcatttttcacagaatatgttccccgcctttcctccctatcaaaacaaagcaaagcccacctcaacagtcctttctcattacaaacctagtgaattaagggggcggaaatcaacatttagaacagtctttttttctctctctctctctctatctgaaccacaaggaatattatttttaattgatgaataaagggaaaaaatgaaaatattttgtttgggaggagggctattctctaaagtaaagcaggcttcgtgtgcaggctgctccttggaatgaaaccttgaagtgtgggagggagcgctctggtttctgctggactcccatcgagctgctgcagtccttggatgcacctgtaacctttagcttagtcattaaagagcatcccagctgttgggttggtgtgtttctagactcattaggggcgtgcactcaatcccacacaagatgcctggaggctagtgcgccacccagcaagactctctcacctgctccatagatcctgctttcgacttaacggagctttccaaatccgttcataggctccgaaaa

SEQ ID NO: 25069 - DNA, 1196 bp, Mus musculus
tctggagacttttaaaaaaacaagttgtctgtcctgtggagcaggcagtaattgttaaacttttggaggggatggagaaacatctttatttcaatgtattaccagattgcctgtcaattggatcccttacctggatggaagtggaagagcttcatagagtttattaatattgtgatgtgtaaagtcaaccgagaaaaaattaaaaacctgaacatccccccccaaacatttaccattgtatgttataagaaaataaactcaccatttttgtagaaaaaaaaaatttgagtgtggaagaagaagttgtccccttcctcataacagctcccccatctctgatcttttaaccactagtcctccatcacgctaggcttctgtaagttaggactggttagctactgttacaggttgctaatttccatcttagttccaggctgaagtgctgcatccccgtgctttagaatgcgtggattctctttggagacaagatctctaaggaggaaatgaaagttacaggagaccagtggagtaaactgtaacccaagactatgggtgtccttagatgacagggaagtaaggacttgtgcagagaaaaggtcatttgaagagggctggaaggcgaccatcttgcaaaagagtgaggcctcagagggaagccaactctgccacagagtttgacagagtccagaattatgagaaaataaacttctgttgtcaaacaacctgtctatgatactttcttatggcctttccagacaaccaatacagacttgtataacaggaataatgggcaaacaaggcctttcaaagtcccggtctctgatctcatatggacgacccctagcaatgatagctgcttcactcactgtgaaacttactgtgcctcagcaaacccccatgggaaatcccccagtgaacacttccttgaggggcctttgccttctaatgcctgtagcaggcaaagtgataacaacttaaagatatagatcttctaacctatggactctgtcataatgaagggaagtactgtctcagagaagtctgccaagtcacttggccccaaagaggacgatgatcttggattgcctggctattattactatgtaatcaccaggggtgtccttggaacattaaaagtggcaagacagaaagaaagaagttctgaaaatgtgacatgcaagaggtcaagtacagca

SEQ ID NO: 25070 - DNA, 1724 bp, Mus musculus
accaagatggtgggcaccatggtgaacgaggcagtggtcgtgggggaagaggtggtcgagggggtcggggaggacgtggaagccagggaggaggctggggaggaagagggagccagacttatcatcaagggggccagtttgaacagcacttccaacatggaggctatcagtatagtcattctggatttggacaaggaagacattatactagttgaggctacagaaactcacattttgctagagctcaagtaatagaaacttagtttcagaatcctgaatccaacatctatttggaatgaatgtaagaccacaggtagcaggcatactcctgcttaggataaccatttgctggtcttcattcaattctttctctctttttattactaaacagttttacataacactgtttatttaagaaacatatctcttctttctatgaaaaacaaattttaaaggcaatttaagttgcctttagttgaccggtaaactaatccagttggaacatacatgcttttttgaagaaattacttgaataaaatagttttcacattttcaatatgcaagttttgaaaatgaggatttgcctggacttttttatatttaatgctgggaaaccttcctcatattaacaacccatgtatgtttttcgtaagctaccttctgatgtctattctccgagcatagctctgccctgattggcattttattcagagagatgtttgtcacctttctttttggtagacctgttgggttggttcctattacatgagctcttttgcagatagcacattcagtagccttatcctgttggtggaatactgtaccatatgctcctccaaaacccatgaacacggccaaaacccataaaaacaacaaaagcaaactaagtcaagaaccgtagtatctgtaggcacttagttaagtatagcaactcaaaccagacctgcatccatccgagacaaacgttcctccttcacccttgtttttacttgaaattcgctagaagaaatggcgagcagacatctgttccatgcactagttaatgctactggctcagcatatacaagttagcttgctttaggcaagggacctttcttgtgatggacgtgcactacgaagtgagatggagtcctgctccgtgcaggaggcccttcattattgctgcagaagacagaagcctggctgagtcactctccacgtctatcctgaaatcactcaatgcttctgccgggtttttgtacatgtaaacactgtcaagctgtgaaagaaagtggctggaggtgtgtttggtgtgagaggtgagcaataaagtacctgcacattctctccttgctctgggagttttcttttagctattttcataccagattgtgcgtttgtgtcaggtttatggagtaaggcttttgttcctgaatggtatttccttaagtagaaggtagccctttttctggaaactgaaacaaactgggagggggaaaagctatttccacatttaccttatttataacagtacggctagaaagccttcctctgactctgtccactgggtgtagctgttgctacacatgttaggcaagatgcagtaatgcccctccctaacctcagagggtttgtttcccgttctccctaaaagcagacgtggttttcttagaagaaagtgacctggaaactacaaagtacttattagagaaatggtatcttctgctaagtggaccatctttaag

SEQ ID NO: 25071 - DNA, 1165 bp, Mus musculus
caggaggaggatggaaaaatgacatcattagatgtgaagagaccttgtttcaatagtatgggttaaccaaagttcattaagaaaaagaagagggagctgtaggccatcgtggagacgcttgatctcgtcttccctgaagtctggttccttggcaggaattatgatgggaacccttgtgacccgtaaagacatctcccccgtaggtgaaagttcctgaagacctgaaagatccagaagtagtccaggtccagtcgctggtgctaaaatctctgtttggtccactgggatctcgaatgtctcgcatcgagcaggtgagccaggccatgtttgagctgaagaacctggaatctcccaaagaacttatcgaggtcttcatttatggctctcaaaacaacaaggttcgggataaatggatgcttcagtccatggctgagaggtaccgcctgcgccagcaaagtggagtgctgaagctggaggaatccatgaagaccctggagctaggccagtatatcgagtgaagccagtttccagtccttgtgtctcccacctggacccaggttaagctgtggccagtgtttggttctggtggaatttttaactttgttacttacatcctagcaagatattcctggatccctgctgtgcattctgatgtgaataccaaggtcactattctaaataaaaaaataaaattgaaatgaaaaaaaaaagaaagaaaaagaaagaaaggaagagagagagagagagagagagagagagagagagagagagagagagagagagagagagagagagagaaagaaagaaagaaagaaagaaagaaagaaagaaagaaagaaagaaagaaagaaagaaagaaagaaagaaacatatgcagctagagacaagagctccggggtactggttagttcatattgttgttccacctatagggttgcacttccctttagctccttgggtactttctctagctcctccattgggggccgtgtgacccattcaatagctgactgtgagcatccacttctgtgtttgctaggccccggcatagtctcagaagagacatctatatctgggtcctttcagcaaaatcttgctagtgtatgcagtggtgtcagcgtttggaagctgattataggatggatccctggatatggcaatcact

SEQ ID NO: 25072 - DNA, 1117 bp, Mus musculus
ctttctttctttctttctttctttctttgtcctagtttgagttgattattcacacgctagccaaattgcaatttttctctttatatctgtaagacgcctgctcacatgttaagaagatttcactcttgcatatctgagaggttgccttgattcaccaggttggtttgaaacagagtccacaggaggtatccaaacccattgaggccacagaatttatgctaactgcccatcagaaataagattgatcaagagggttcctgatcttgttttgtaccaatatcaaacacattgaagaaaacccttagtctttgcaggctcttggtagccttgtacgtgttgaggggctgcttttcacatcacctgccagatcatttgataagccacctcctcgcccagcaccagacctcaaaaagtaccttctggagcctggtctcctctctgtgctcattatgcgtattgatgttttgcctgcatgaatgcgtgtgcaccccgcgcgtgcctgttgggtcccctagaactggggctgtggaaggcggtgagcccaaaaatgggtgctgggagttgaacactgatcttctacaagagcaacacatgttcttagctgctgagccatctctccggccccccagtacctggacccgtaagaaaccatgcccacccctgatgcaactggaatctgtgttgactcgttggttgtatcatccgagcatttgtgtttcagccctctgtgtgcctgaccgtgtgccttgcagcacgacagtagtgggaaggctggagctctttcatcctttttggggacctgttggtttgcataacagctcacatcttaaaaggtttcgagagactctatttgttagtgaagctaaaatatgttcagagataataagctatcagtttgaaatggccctgggctttgattgttcagcgggatcagcaagctcaaatcccctcaaacccgcgaagtcgtcatcatttctgagaaccaggttttaaaaagattccacagagctttatgccagatgactttagtcggggtgggggctccacagccattgaactgggagcaaaagcattattctttgagtgaaatgtcccgatacctagtcaaaaagatagc

SEQ ID NO: 25073 - DNA, 1120 bp, Mus musculus
gttctcggactcagatgaggagggagaaggtggtcgcaagaactcttctaacttcaaaaaagccaaaagagttaaaacagaggatgagaaagagaaagatcctgaagagaaaaaagaagtcacagaagaagagaaaaccaaggaggagaagccagaagccaaaggggtcaaagaagaggtcaagttggcctgagcaaggtctgcagccccatcttctccccaagttcctcactttccctcaacttctcagattttatattttctattcctctgtgtatttatataaaatatattaactataacgtccccagggaccagagcacagggcagtggtgctaggagggctcttcccagagcgaccttgtccatcctgccgcccccctcaccccatttgcgtggaaagaaaacaaccagaagagaaaaatcctgaactgccaagtgcctgcttaggagctctgctaagatgcccctgttaaacatttaggaggggtctgggtctcctaggaccccttttcaggcttgggtaatagcagccatttttagattggttctgtttataccttcccacccatcttgggcaaacaaaaaaacttatattgccctgtcttcccccaattctgtaggtggaggttgatagcctagcttcctttttgagatattttcattttgtgaaactctttgtaataaaacagctcatttctataaaaaaaaaaaagaaaagaaaatatctaataagaataaaaataaataaaataaaactctttttgttgttgtttttaagaacaatgcatgaaatgccacctcagttagaactttcctaagcattaaatctgctggagacacattttctccgttgctcgttggtgtttattttttactttgccttaattttccatgacagtcccattggatttaaactccgggtagcctgtatttttctcattacttgcactgtgtgtcatcctactggctacttgtgtccagtattgctggtgacaagaggaggttaatttttatcttagttttcttgcccacagtgtgccccttttctcctcagaacgaactttcaacagtttggccttcagttcctaaatgtattttttctttatatctcgtctac

SEQ ID NO: 25074 - DNA, 1460 bp, Mus musculus
tattacagtacttaggatgtttgacactgggattctggtggcagaaaagtagtatctgatgaagtgtgtgtgtgtgtgtgagagagagagagagagagagtgacagagagtgagagagagagagagtgtgtgtgtgtgtgtgtgtgagtgaaatgtattatttcttaaatgtattatttcagtggaagctcagaaaatgagtatctctgtttagcaggtaaacaatttgaatcagttttgcatttgcctctgaaagctttgtaattgaccgtatcaggcatgcagttaggtctccatgtccatggaagggactccacattgaccaagtatttaacagaaccttgacatcagttttattgttatgtgtttaattttgaaaaggttatgttagaccaaacgagatctttagatcccattcttcattctaacaatgtttctgaagtggtgctgaggatttttctggatttttctggctcttggctagtcaagctttaggtttcgtttacctgggaccacgtgttcatcatcgctctggtgcaaattagggagttcatgttcacttagagtaacttcagtgtctgcctgggctcttaccaggctgggaaccagtgagtgccttgttagtgtagagtgatctttcccgttgtccgttaggtctttctgagagggtctcagagactgagctttgagttggctgggcgagctgctgagattggtgatacagcattgggaagtctttggtctgccatgtccactctccctgctttctcttcatcctttggctggtgttggccccttgtgagaaaacaaatagagcccccttcacgctatttttatttccgcttaaggcgtgtcccccattcccgccccagctatatgatccaatgcctgttttaggaagaaccacttctttgtaatatgaaaatctaccacttattttatgtcttctcaatatcagtttactggagcggatctcagggtatcatcagttcagattcctaaataacactttctcttcaacccaaaccccaactggtgagccctgggccagattgtttgatatcaggtatcttaaacttcagttataatatcaattaatgtaaatccaaatgcaaatttgtgtggtgcaagaagtttcttttgtaaattcagggtatggataagctaataatgatatccagttctggtggctctaagtgtattatttgtttttaaataaagtgtacaaatatagttcatgtgctcctaggtgtgtcgtgacttggactgtgtgaactttggaatctagccgtaactttgcagtgaatcagttaaaatgtgttaatacccaaggcgtttgttagagggcttatagaaggatgcagagaaactgaagagaatgagacaaagtggattcatgtgcaaagtaacaaaacgttctccgggacacactgtgagaagagtgggaaacctcaccgtta

SEQ ID NO: 25075 - DNA, 2026 bp, Mus musculus
cggtcatgttgtctgatgcttaccatgaacagtttataactggtctgtcatgtagtccaaagcatgtggtcactgcaggcagctgcttttgcagccacgcctagtagagtagtgcaccccagaaagtcctctactagtgtctcgggaaagaactctgtagagatctagatggagatgttagtgcctgtgatgtctacaaagttctttcttctccccactccccattgtttaattggaatgcatgttttaatgaacagttgatcaatactctatctagagaaaaccatgtcttaaaatgccagctctcgcatttatctgtgagccgaatgtggtcagcttttgggagtctcagaatcctactgacacacctagggcagtcttcacaccctctctgcttttgtcctaaatgacagagaccactataaatactaaattcaaattaatctccacctttttaccaaaatgtgttcatcataggctctctgtcttaaaaatattatacccatagatattatgacccattaaactaattccattgccatagccgtggcttttctggtgatctgttctttgaagtagtattcttacggtgatgtggctaataattgacttcttaaaaatttctgctcatctatctttagaattctccagtgcaggcaaacttttcttacattataagattcgtgttgaacgtccctgattactctatagacatgctgtagcacaactacagtttatctttgtgctttggttaacaagcaggctttagagattcactggtatatgcaagtgaattgagttacacataactaccaaggaaagctcacattttcatgtatagagttttatgctgtgacaggtaaactcttccatactttgtaaagtgaacaaaaggatttattaacatttgtagaatattagaagattccagtcgtaagtggcatatttatgatggctgagcacagttactgcttcagtgtacgtcttactcttgtcatcaacactccagatcccaggagagtctgccctgttcattctgtgcctcgtaattgaagttttcttgttaatgggtgggacacaatcctaagataggcaaagtgtagtacaaatgacagaactgttgaaagttgtttaggaagtatgttttgtgccattgaagactgcacggagaaagagagccttctaaactagccctgtttgctgtcaacctagaaatgagccaactgtcttccaactggatggtagcatgtacgtgtgtttgactttccccatcctattgaaaaatcacaagatgaacagtttcaagattcaaaacccttgaaatactttcatggttatttaccagattgtaaatgttttgagtgagctgttttggaataatatgaaaatcagcaggtaggttaggtccctgccttattttcagtgctgtggatgtgtctccgggagcttacagtacttctcaaaatgcagctgtcacttggagctcatttgctactcaaaccatagacaaataggtgatgggatgaccttcagtatttttctattgaacaaagttaccaatttttgccattaaacagataattagttatgcaaagtatttagcttttgtaatcatttagttgtaactaaaagggggaaattgagctgtatcactgataatgaactttgtgagaaattatttgtttatctgacttccattccttcagtattcttgctataaatttcttttggagataatgattctttatttgaaagatgtctaaaatgtatgtatattttataaatatatattatatatattatagggatatatataatatatagacgatatatatctatctaaaccatgggtgcattttactgtttgtgtcttcactttgggaggtagtatactcataagttgatgagtctgacgagtgttgtgctgtttgcttttacagtataatatatagttccaagtgtttaaatactgtatatactatattcattataggctagcatgcttgttttaaagactgtcattcta

SEQ ID NO: 25076 - DNA, 1174 bp, Mus musculus
cggcccccgcgcccgggcggctgctccctgctgactggggtgtgggcggggagcggcggagggaggaggcagagctggccgccgcagtttgccgccgctgctgggcgcctaggcagagagctccccggggttcgtgcggccgccatggacgagcaggcggggcccggcgtcttcttcagcaacaaccacccgggagctggcggtgctaaggggctcgggcctctggcggaggctgcagcggccggagacggagcggctgcggcgggggcggcccgagctcagtacagcctcccggggatcttgcacttcctgcagcacgaatgggcccgcttcgaggtggagagagcccagtgggaggtggagcgggcggagctgcaggtaaagaccctcccggcctggcggtcctcatcccgcctcttctctctcttcagccccgccccagacccttcgccccctcccccagcccgctcgcgccccctcccccttgccttgcgcccatcacttccagaatctcatcccccttcctccagtcacctttgacttttttttgctgatcccacttccttgagcctgttttcccactccttctgatccatttaccctcccggcggctgttttccccactctcaactccggtgcttattcctactggtttgccatgccacattttggggttgtctgtccctttcggtttactgattgggttgacagtagttttgagagactccgagcagatcatcctggctcaacctgacgcaccctaggtctagagacgttcctcgcagaagggtttggcagttgtctatcgctcactctgcaaggaaggtgaccagagaaagcaacacaagttgtatcagtgaggccttggctttcctcgagaaactgatgttactagcagtgtcagctccagttttatgtctgaaaatgtttccctgtctgccctttgaccccatcccgcattcgcgtttgggttagactcataggtttcagtgaaggatttgattgatgggagtcagaaaatgggcagaggtgggacatcttttcacagaatctcaaacttcccaagagttgatttgtatgtccagagcttaaaaggaactaaaggggcttcagggctacgttgcccccttgcataacctgccagataaagcatgcttatctgagaggagctctt

SEQ ID NO: 25077 - DNA, 1308 bp, Mus musculus
tatatttactaattatgtgcttattctgtctcttaaaagtcttgctgtagtgtaaaacatttataatccaagtaaaaccgtgtttattattggcacatcttactaatactgcaaattggtctgatttgaagatggaaattataatgctttagttactgatgtcttaaaccttttttctttgagactcatttagttcagagacatggctgcagccttgtttgctattaaactgtagttgcacaagtaacatacataatagtgtcatgtattatataatatattgttattattacaaatgacaagctgcgggtctgagtgatagctcagcagttaagagcactggatgctcttctagacgacccgggtttaattcccaacacccacatgacagctcacagctgcagtctcaggggatccgacgtcctcacccaggcacacacgcaggcaaaacatcagtgcacgtaaaattaaaataaaaaagccaggcaatctgcattgtctccagtcaggccagtgatttctgtcctctgttacaggagtccagttactcgctcttctagtgcccactttgatctcttacctgctggatgaaaattcttttgcctcagcaagttcgatctccaaagatcttcatgagtttgcactgcagaacttaatgcatattggacctctgtacccacatgctttcaagacggtaatgggggctgctcctgaactgaaagcacgactagaaactgctgtccgagcaagccaggcgagcaaagctaaagccgctgccaggcagcccgcccccaccacacattccacaccgacaattaagctgaaaacaagctttttttagtgtgcttttccgctcatctgtatttatttattttctcaaacatttaccactttttagaataataccaacattcacatactgtattacaatggtaccacaatataaaataaaatatgtataaactgacacacagagcattcatacagtacattcttttttttcaacatgtatttatttaatatacattgttaaaattaaatcaagcagatttaatttcaaaacaaaaataacaacacagcttagaaatcaaggagaaaggacagatcgtctcagaaaaaagacgacacaaaagaggggtggacagcttgcatgagtgatcttggctggagacctgctttgaataggtttcttgcaggtacttaaacgctgtggggtttttccagcgctccacagcgtgtgtgttcaaagggctatcaatgttgggtttctcctagcaggctctggatagagagcaagatggtcctgac

SEQ ID NO: 25078 - DNA, 1100 bp, Mus musculus
tgatctttgtacctagcttatcctaatgtcacccagcatctttcttgtcatatggtgtgccttatggcctcacactctctccagctccatcacagtcacgctcccctttactgtgtggcattgcacagtgcctgtaacttcttgcctgccaattctgttctctctttctttcatatttgaaccagtttctggtcgttgatccttcctttctgctgggagcctgggagctgggttctctacatctttatgaccttggcactttgtcatcagatgctgggcattatacctgctgtgctagcactggattttgctcttccattaaattgtggtgaactctgtcctgagatgcagtaaaattagtgcaaattgcgccatttgaattcttttgagatttgcttttaagcaaagtccagggttacccttgacctggtgctaaaagtacaagactccctccccattctgttctcataaaaagtcttttaaaaaataattttgtaactacatttcctgactacacactgtttttctacaatagggactgtcagacctgtgatcgtaatgcaacccacaagcgtgttttgtaaatagtttactgggattcatcacactcatttctatagcattgtctgttgtgttctctaagtcctttctgcctgcttccatagtgtagcagcagagctgaataactgcctgagagagaatgtggcctgcaaagccaaaaatagtatctgaccctttacaggaaagttctgctagggcctgttctgagagaactacaagcccatttgggaaagccatggtaatcatgtattttgctgtagctgtcagtgtctatcctgtagttgtctgtgtttgagtggtctactgctgcactgagacacttgagttttattttttagatattgtggatcataagtgctttatcgaattgtttcctatttttatgcattgtcctagtctgggtgaactttcccttgtacagtctgttttcctttgcagatgacctcctagtattgcatctctctgacctgattcgaatggcattcatggctgcaactgatcatagcaaccaactgcgaatggctgggctccaggcactt

SEQ ID NO: 25079 - DNA, 2257 bp, Mus musculus
ctcttaagttgcatctgttgggcttttagtgacaagaaaagtagctaacatactgtttacagaagtcatgtcaacaagaagcacccataatgccttcaaagggagaatgaatttgaaatgctatttacttattggagaatgaactgaagctagatgtagtaacagtatattaacagcatgttaagagaaaaatattttttaaatgtttatggaaggaaaccattcacaagttgatagaacattccagagcatacaaaacaaaatcatttttaaagatcccctccccgatttttggaatctcagtaagtaggacaagcttttacgcaaggggtttgccatcagaacgcaggtgttgggaaagccaccgctaatttaaagcaaaaatggggaaggaaaagactcacatcaacatcgtctccggcaagtccaccacaaccggccacctgatctacaaatgtgatggaatcgacaagcgaacaatcgaaaagtttgagaaggaggctgctgagatgggaaagggctccttcaagtacgcctgggtcttagacaaactgaaagctgagcgtgagtgtggtatcactattgacatctatctccctgtggaaattcgagaccagcgaatactacgtgaccatcattgatgccccaggacacagagacttcatcaaaaacatgactacaggcacatcccaggctgactgtgctgtcccgattgttgctgctggtgttggtgaatttgaagctggtatctccaagaatgggcagacccacgagcatgctcttctggcttacaccctgggtgtgaaacagctgattgttggtgtcaacaaaatggattctaccgagccaccatacagtcagaagagatgtgaggagatcgttaaggaagtcagcacctgcattaagaaaattggctacaaccctgacccagtagcatttgtgccaatttctggtttggaatggtgacaacatgctggagccaagtgctaatatgccttggttcaagggatggaaagtcacctgcaaagatggcagtgccagtggcaccactctgctggaagctttggattgtatcctaccaccaacttgtccaactgacaagcctctgcgactgcccctccaggatgtctataaaattggaggcattggcactgtccctgtgggccgagtggagactggtgttctcaaacctggcatggtggttacctttgctccagtcaatgtaacaactgaaatcaagtctgttgaaatgcaccatgaagcattgagtgaagctcttcctggggacaatgtgggcttcaatgtaaagaacgtgtcggtcaaagatgttagagaggcattgttgctggtgacagcaaaaacgacccaccaatggaagcagctggcttcactgctcaggtgattatcctgaaccatccaggccaaatcagtactggctatgctcctgttctggattgtcacacagcccacaaagcatgcaagtttttctgagcttaaagaaaagatcgatcgtcgttctggtaagaagctggaagatggccccaaattcctgaagtccggtgacgctgccattgttgatttggtccctggcaagcccatgtgtgttgagagcttctctgactatcctctacttggttgttttgctgttcgtgacatgaggcaggcagttgctgtgggagtcatcaaagctgtggacaagaaggctgctggagctggcaaagtcaccgagtctgcccagaaagctcagaaggctaaatgaatattacccctaacacctgccaccccagtcttaatcagtggtggaagaacggcctcagaactgtttgtctcaattggccatttaagtttaatagcagaagactggttaatgataacagtgcatcgtaaaaccttcagaaggaaagaatgttttgtgaaccattttgtgtgtgtgtgtggcagttttaagttattggttttcaaaatcagtactttttaatggaaacaacttgaccaaaaatctgtcacagaattttgagaccattaaaacaagtttaatgagaaatctgtgttggtcaatgctgaaagttaactgagtgtatacaacaaaggtactggggtccccatggtatgttcttagggattgagttctggtcgtctgggtctacccagaactgagctatttcaaaggccattttacaaactaaacagggctgatttgagttaacttcaaaatcttactggttaggacaaagtaatttagatgtatcaacccaag

SEQ ID NO: 25080 - DNA, 1197 bp, Mus musculus
cgagagacagagacagagagacagacagagagagagacagagaagttaaagaggaattaaatagaaatgaaagggctttacctgttctggactcatgtattgaagagttcctgttctccttgttcgggattttccatcattttccagggctgttgcaaggccaaagtctccgatcttaatgtgtctttcatctactaaaaatatattacctggctatagaaaaaaattaattaccatatgccagttggaccaactattaccacaggtcccaactacatttggggatgagacagggtttctttgtgtagcctcggctgtcccggaactcactttgtagaccacactggcctagaactcagagacctgcctgcctctgcctccagagtgcagggattaacgttgtgcgcaaccaccaccacccagccccaactatttgttgtgttggtttgtatggattgcatttatccttccacaggctttccaaaccagggaatttaaaaccttgagtctttaaaactaccaagtgaagaatgaaaacgcgcctgatcttgtctgatcttggaagctaagcagggtcaggcctggttagtagttggatgggagaccacctgggaataccaggtgctgtaggctttgaaagaaagacagaaagacagacagacagacagaaagagaaagacagacagacagacagacagacagaaggaaagaaaagacttttaaatgacagcaaaggtggtttgggttatacctgcttccaaacatcagatcagctatcaagagaaagtttcagtttgcagggtcccaggagagggttccagactggagggtgggtgtgagtatggctccttgctctcacacaccctagcccagtaagaggtacaggaaaaggggttagagctccccatcccaaaacagggctgggcctccaccttagggacatctgcagatgtggctcaggatccgatgggaactaaaaccaaaacatcagtttttttctttccacctatatgtgggctccagaagttgaacttaaatcactagtcttgtataacaaacatctttacccactgagcccaaacatggacacacacacacacacataacaaataagggtggctatatgtgctaaataactacacagcactgactgaaaacaggaagattgttggtgacaaaattaatattttgccattc

SEQ ID NO: 25081 - DNA, 1172 bp, Mus musculus
tgacctttgaacatctcactgcagatggctcactatcagagaggcatgagggccagagggaggggggacccaggagacctttgtcctaaggatgttctgagtctgaagaaaaaggaggtgatagcatgccagtggcacgcatgttcaggtaaaagtgagatgcaggagtgagatgcaggaaagaatggaagagaatcaaaaggaagtgtttattctgaagaaggtgaacagtctcttcctatccctctgatgactgatgcaaaatagaaattggccggtgcgtggggcggagcctgctctaaagttctataggttgttgttttgtcttagttttctatttttttttgtctcaattttagaaaagtatcccctgatgatgtgcaaagaaataaatataccttggacgccaggtaagcggagtttgtctaatggtaagctcactctcgaaaccgttgcttagggtcaggttatgagttgtatttccacccaagtaattaatgtgggctgtggcataggcaggcccatggagggttatggtctctcagagaagtgaggtttagggatccaagtggaacgtgtcggatgcagacctcggtgatgttatcaggctttctgatatccatggatgccgttgaaactgaaaagcaagtaggactttcagcgatttggaagaaaaataaatagagaagagaaaggatagggaggaagataggtgtggagggaagagaggaatgcctgtggggatggacacaagtcagcgtgggcctgttctctagcttgttcacacaagacttcactaggaaaaaaaaggaaagggggctcaccttctgtagatgatggttcagttaaaaatgaaacacctaagatgcaagaagccggtgtgcggcagcggaacattgtgaacaaattctgaatgcttattaagcacctagcccttacctgtaactgttgtgggctggtggcttagggtaggaacaaataaaatagaactctttctctgaaaaaatttggaggtggccactggcattaaggaaatacttataattaaacacgtgtatattcagaggctggggagatggctcagctgtgcaaacatgaggggcctacgtttgaattccaagtgcccctataaatagacaggtgcagtagcgcacacacctagaactctcaat

SEQ ID NO: 25082 - DNA, 1144 bp, Mus musculus
ggagctataactcagtagtagtgcaggggcttagaatacacaggtcctgagttcagttccaggtccttaaaacaaacagacaacaaacagtccgtccctgcaagtgtaaagtagaagacacagctcttactatcctagccggcctaggatagtaagacattgtatctaaataagcaaagaaataataaataacaagacgggtaaagaaaaggaaaaaggaaggaaaaaaagtacatactaatcccagctctaagaagatattgttactgagggtaggtgcttaaagtaggtgcaattcagacattggtacttcagctccatagtgaagctgtcagaggcctgtgacagagtccttgagacagaccctggtcaccccagaagcctggagacaaaagatggaggccggagtaatgacttaatgagtaaacacattggaagccaagcctgatgacctgaggttttttcctggaccccacatggtagaaggagaggctagatttccaaaagctgtcctctgacttccaacaaacatgtcctttcatgagtatgcaagcagcccatgcaacatatactctaacccacccccacatcaaataaatgtatacacatacatatgtatatacatacacccatacatacatacacatacataatacatacacatacatacgtatatacatacacacacatacatgtacacacataatacacatacatacacatgcatacatatacatacatatatacatacacccatacatacatatacacacaatacatacacatacatacatacacatacataatacatacacatacatacgtatatacatacacacacatacatatacacacataatacacatacatacacatgcatacatatacatacatatatatatacatacacccatacatacatatacacacacaatacatacacatgcatacatacacatacataatacatatacatacatatacatacatatatatacacacacccatacatacatacacatacataatacatacacatacatacacatacatacatatacatacatacatacatacatacatacatacatacatacatagaaaaagctaagcacggcagttcatacttataatcctagcactg

SEQ ID NO: 25083 - DNA, 1133 bp, Mus musculus
caggcggatttctgagatcagcctggtctagtgagctccaggacagctagggctacacagagaaactgtgaaatggaaaccaaccaaaccaaaatggaattcttacctgggagactgttctctagcctttcctctaggataatggtagtgcagctctggatggagcacataccgtattctcaggctttgtaaactgaactacctaggctttgataaccagaacttgcccacagcattaatgggaacactaactagctctatgttaaaggcaacatcgttaggcaccccaacttcatatattctactgggtttgccatgtgttactttgtttgaagaaagaatgctacggagtagagtttaaaccacagacttaggatataatttttcttaacactgacaatgtaaaaaatggattagtaggctatcctttctttactctcaatactgttaactaaaacagaatttaaaaactgttctttatcctcaaggggttttatggacaccagcttcacgatgtcttaatcgctcctggaacagcagacctgacagctgatgtggacttcagttacctgcgcagaatggcacaaggaaaagtagcctctctgggtccagtggaacagcgaacatttttaaaaaacatgggcattgatgtccggctgaaggtagtggtttatctcagtaacactaaacctcttaatttcggaaattatttaaattgagctacactggcgttaatgctcttatagcgagcaggcttcaggtgtaattttgcacaagtaaggactggggtgtgcacagcttgccaagtttctatgtgaggctgatacgcccaagaaaaccacgttcatgggtatgaaatcatgactcctctgttgttacggagcagatcgcctgggatatctgctaacgatgcagatgtatacatttggatcacagcatcctacagttagaggacactgtgatcccatctggggaattgctgtactgcatcatttacatcattagtcctgtgctggggaatgcttttcttctggtgatgttccttaaaggcctttctttccgctcaggttctcttggataaagcaggtgagccatctgcgaagcagcagctacttggagggtatgatatgtta

SEQ ID NO: 25084 - DNA, 2395 bp, Mus musculus
aggttgattactcaacaggtttgcagttaagcagtaaccatgaggctaacagcatacagcttgctgtaaggacctttagtgtttgtccactgtcggaggcattgcttcctccttcctggacccgataagcagaccattgtactgctggccttccggtggatgcgtctttccatatggcctgtatgacagaagagttgtcacattttccatgttataacagtcactaggataatcgaacaattggtgttacaaatgaatagaaatagctggtcatcactcagctctgcctctgaacacgtatgttctcaattggcaccatcatgttacagtatgccacagtcggtgggcacaacgctgcatttaactaatttatcctcacctggagttgaataatgtatagacaaaatcacatactagagagggaagctaacacaggtcagtagatgtcactgttatctgtttcctcttcccttggcctttggatggggtttccaatacctagtgtttttaaattagcattgtcgtttgagcagtttggaggagtgactgaagtcaaacatgaaaacttagtttattgaggtgggacctaattaccagtagagcggatggagaaggagtaagaacgtcttacacttcagctccaacagccagctgttttgtagtagttattaatacaaggtcagtatccctatctgagctgctctacaccaggaaggtttcactgccagatactgaaatgtttgcacactctactagttgagcatccctgacctacaaatccgaaatcctccaaattcaagaaactttggagtccttcagatttccacattagtgatattcccacctgtgctttacccaaagagaaaaagatccaggaccatcctctcacaagaaatatagtagctgtttgtttcttcattcctcactagtcacaaaaaaaaaaaaacaaaacaaaaacaaaacaggtttttcttgttgtttttccttttctgtgctgagagcaagaatttggaatgagaaagcctgggtttaagcctaagtgtctttactctgtggatctgtggggctgagcagataacattgtctgagcatttgtttgacttagtttctcagtctgtagagtagacaccataaattcttccttctgccttcctccatgtggctgtgaagattgggctatgtgaccacttgtgacaatctggaatgccagggttgtcgcttaccacgggctctgagatagcaaaggaaaaactgtgtgtgtgagcagaccaaaactaagtgccatcccagatgagaatgcagctgcagtgatctgtctaaaattaaaaatgttcttgaggtgacagaaacagcaggggtgcccggttgtaaatgtttatgctttgaactgtcctcacaatagtcacatgactaagcacacttaaagttgaggcacagggttagttgtcaaagtgcattgagtttaaatatggatttaaacccaggcctatatccccaatccctttacccgtcccagccattgacaatgtactgtacatctgtaagaatttccagaagactttccaaactgtctctgtaattgttttcatacagtagttgtgaagagtaattttaagaaacttctaagaatggatttttccatttctgctaagtctgcttgaccagtatgtacaaggtggaactcgtgtgtgtcactaggcagcccacggtggttttaccatgggaggtgagaactaactgaaatgactgctggtttgctgtacttctgtaatcagactttacaagccatgacattaattgcactctgtttttgtcaaagccctgtgctgtttaaagagagactgtaaaggcgctgtcacggtgcggagttgagtaaccactccactgtttaacctgcataactttttgtcattgtcttaaagccaagctgtgtttgcatatatgaaagtaattgtttcttagaaacatgtgacaattttcaaagtagtgtataatgacactgtttagtacattttatattttttgttacatcccactttttgtaaatattctcaaaacttgataataaaatgtatttctctatcaccatactttcctatgtgaaaaccttagaccatctctagtataaggatctcaagagagttgtatttggttataatattttccccgggcctgagtaacaggagtttttttgtaaatatagccaatgctacatgagcacatatatatttatatatcctctgtgaaagacaaccctttaaagtcatttcaggtgtatactgcatttgagataattatctagagggttcatttattggaatacaatacaaagaataatgataattaaatatttgagcgactatcctaggtattactaaaagacttagaaaaatca

SEQ ID NO: 25085 - DNA, 1874 bp, Mus musculus
gattgcacatccgtctcataggatttgtaaatggtttgagtaagaggaaagtaactttcgttgcattataaaatgtcttaactgcattgtttgtagcatcataactttttctttctttttcttttttctttgttcttttgggagaagcatctttttatttctcacattcctgattatttttgtcattaatttaaattgaattttttatatctgtttttatatgtactctttttttacctcatgcttttgtttgttttgcacatttctcataccacaggtattgaagcccctgggtgataatttgatggaggaaaacataaggcagtctgtaacaaactctatcaaagcaggcctgactgaccaggtgtctcatcatgcccgattaaagacagactgacagttcatctgctcatggactccactctcccttgttcatgcttgctgtacaatgagaactcagataaaataaaccaaagtttacaatcaactgtagaagtagtttagtgtaactggcttcacagatggccgccacagagtgtgaacgttgtttgttggtttgcagccttctttgctgtctccttagactcggtgactgcctgaggagcatcaggttatcatgcacacttgtgccatggttaattcttttctttctttttaccgaattcaatgttagtgaaatttgtcttatgtaaaaggatatttcagggaaatattttaagaaatctatttagagtctctttaatatagtgtcccattgaaattttaatttttagagaatttatgaatcactgtatcaagaatcagatgggaatgacaatgaagcctttaccgagccactacattaaaagtgtatattgctttactgccttcaattgccagtattacataaatgcatgtttcagaaacttcacacaaatcacatgagaactcttgtagctgagaaggtaattctgaggtgtacatttgtcttgcctttttaaatttgtaaacctgccctgaaaggagatgcattatctgggaaactgaactgtctttttgcagtttagccttcatgtacataaaatatgccattaattttattgggggaaaaattccatccaaaaatgttgcctacagctatgagttaagagtgtctacagcgtgtagctttcattttctaaagattacaggtagggcatgtatatgaattataaatatataaatacaattttgtattaaaagttttgtagtttatggcaaaacctggttctgtggtaggctactgagtccagtcctgtgacaggagtgtttgtggctcgtgtcactgtgtgaacgcatagacagtgtgaagttttgatatatttgtgatatttatcttccctgagcactgcagtctcacccccaagagaattcaatgggaatgttttattgtgacttgtcctctgttgcattttaaagttatttcctgtaatttattttcagtacataattaaaaatttgttgtatatataaaacgaaagttgtgattcttttttaaggaattctttcaagtgtgtatctcaccatataacattgttcatgctgaaagagggtgggtcagggtgcaccgagttagagctcaaggtattgtactttaaagctgagcgtgtaaaaagttatttttcgtgtctttttatgtaagggatattttttgtgataatctatctggggatttaataattttaatcttttctccatctcttcccccactcccatcgtgtgtgtgtgtgtgtgtgtgtgtgtgtgtgtgagagagagagagagagagagagagagagagagagagaatgaatatgtgtgtgtttgcgtgtgggctatatatgtaaagctaccatttttccagtacttataacctc

SEQ ID NO: 25086 - DNA, 1121 bp, Mus musculus
gtgtgtgtgtgtgtgtgtgtgagaacagtttgagatgtagtgtcaacatacttgatgtatgcaataggaaaagcataagtttgattcagtcatgggtaagagcatgttttatgctattggacactgagaagagatgagagagtgtcttgggactatcgcctttggctactttgtggtttctttcttccacccttctccacccctttctgccacactttccaccccctagataagagagaggaaagagatccctgaataaagtcaggggtgggaaaggggcaactctatcgttagactacttcctgctgattaggggtgtccttggggcaagtttgatcttcgctgtcaggatatgtaattttttcttcttgtttcttctttgtgcccgactacttaacaacaacaaaggaccatcaacccacactgcctcctttggctctagcatttatatactgtcaggaaactccacagaattccaactaacacacaatcacagaaactctgcagctgggaaatcctggtcagtggctgtggacagtctgaagcagcccggtgtcccacacctgtgtggacagtctgaagcagcccggtgtcccacacctgtgtggacagcctgaagcagccccgtgtcccacacctgtgtggacagtctgaagcagccccgtgtcccacacctgggattcaagtgaaaacgtagtcttaaaatacttttgtgtttcttacagaaaccaaaactccaaaattgtcattatagacttgataagtagcgctcgactaccatttgttaactgttctgccgttgctcatagatctcggcctttcatttggtggtcatgtgtggaagactttcacttaacagccattcctatcaaatgacttctaaggcaggcccgacaccgccagtttgcttctgagtcacctgcattacaaactaaattgtgtgcttgtgtgaactcatgtagaaaaagaaaatacccccaagacatttccctccgtgtgtggaagatcaaaccgagggtcttccaaacatcaggctaagtgcgcctgcctccagagtggatttaggatccaacactccatggttgtatgattgaccttctagttgataggattctaggagt

SEQ ID NO: 25087 - DNA, 1279 bp, Mus musculus
ctcctgggtctggttgtagaagatcgactagagatgaccaactgcttcccgttccccccagcacacggaggatgatgctgactttgatgaggtacagtatcagatggagatgatgcgcagccttcgccatgtcaacattgatcacctccacgtgggctggtatcagtccacatattacggctccttcgttacccgggcgcttctggattctcagttcagctaccagcacgccattgaagagtctgtcgtcctcatttatgatcccataaaaactgcccaaggatctctctctcgctgaaggcatacatgactgactcctaaacggatggaagtttgtaaagagaaggacttttcccctgaagcactgaaaaaggcaagcatcacctttgagcacatgtttgaagaagtgccgattgtgattaaaaactcacatctgatcagtgtccttatgtgggagcttgagaagaagtcagctgtggcggataagcacgaattgctcagtcttgctagcagcaatcatctgggggaagaatctccagctgctgatggacccggtggatgaaatgagccaggacataatcaaatacaacacagacgtgcggaacaccagtaaacagcagcagcagaaacatcagaatcagcagcgccgccaacaggagaatatgcagcgtcggagtcgaggcgagcccccactccctgaggaggacctctctaaactcttcaagccccaccaggcccctgccaggatggattcactgctcattgcaggccagatgaacacttactgccagaacatcaaggagttcactgcccaaaacttaggcaaactcttcatggcccaggctcttcaagaatacaataattaagaaaaggagcttcctgagaaggcgttgagtagacagactgttgagagtccacagagtgcacttggaaaaacgtatttctgtgctgcaaagcaatggtggggaggcgcactgtgcgtcactgctgtagtggttttctagccaataataaaactttaattggttgttcaaaaaaaaaaaaaaaaaaaaaaaaaaaaaaaaaaaagagagagagagagagactacggtgtgactacaatgtagcctttacagggtaacagattttcaactttgccttctgcttctatcaacagacaaaaccacaataggaccacccgaaaggtggctgctttcgggtaagtatatttcaagtttcccacttctgctcagcatccaggccactcagtgatgtgttgcgcaccacaagcaacagttct

SEQ ID NO: 25088 - DNA, 1830 bp, Mus musculus
agtaacaggcagactctttatggagcttactgtctactaagtagggacagtgacaatttaccttacatacagatttccttcctgggactggagagatggcttagtgattaagagcactgacgcctccctttggcacccacatagtgcacaccacagctccagtgcaggggatggggcaccaggcatgcgcacgcatggatggtataactgcacatgtatttacagacaaaacactgatacacatagatatttaaaagtttttctttttgtattcttactaccaacagtaaaatggtagaataatttactaattcaatgtggtcttgaaattttggtgggttattaacttcaatttttcaatttttacagatggatccaacccctatacgttgaagctttgcttttctacatcatcccatttataagaagagaagagcatgttagaatttatgttcatctttattgcagttttaaagctatacttcatccataataatctaaaatggttggtctaatgttgccttgcttactataagatcctgttctgtaataaacatattttgcctcaagtaagtttgttgttaacttaaatattgttttcaccttaagatagagtaccataatgtagactgtctacagcttctttgtagattatacaaatgtatggtttctaacattattatgaattttgttccatggtaaaatatatttgcattcttaatagtaattatctgcagatgtttttccattgtgtattagattaatgcaggtgaaagtattgcattttaataccgaattcctacaatagatgattgagtctgttacagttactcatattaaatataatttgtatttattatttaatcaaatttgagaatgacgctgcatatgttgacttcaggaactacagacttagctgacgtcaatctctaaaaggcttaatagacacgaacacacttgtatggtatgcactcaaactcagattgctgtttcttttaaaaagtcatcatttgtattgacatgcttctgttcctagttccagtttggaggttttataaagttataataataagttaatgtgttcatcttcattattttgcatgtgacctaatctgaaaagtacatgtagtatttgacattgatattttaatactgtagaagctaaaattaacaattcttctatataataatctgggttccataaatgagtttcagagaacttgtgagcccttccaaaattgtgtgtagagtttggaatatatgcatttttatttcttaatctttgatccatcataatatatgtatttttctatatggtgtaagatttaagagttaattttatttttgatcaaaacagctatttgtctcaacaccatttattaaacattctccctctgggtttgtttctttctcttttaagtgatcatactaaggctgttgttcagtttacacctttttaacaattagagaatgggtgcagtcattttattttcatcttaaaagaagagaggatatgttttacccgtgtagactctgggtagtccatagttagcaggagcaatgatatgagctttagattattaattagatttttttttaaaggcttttttggttggttggtttgtttttgtttttttggttttgtttttttgggttttttttttttttttttttagataagtctcaatgtaggtctggctgtctggctgtcctgaaatttgtcctggaacttgcagtatagacctggctggcatcccccagagatccacctgattcagcctcctcagagctgggattaaaggcatgtgtcaccacacctggacgttgttt

SEQ ID NO: 25089 - DNA, 1193 bp, Mus musculus
tatacatttagcatttatactatgttatatattagatgtttagagaggtgatttgcattataaagaaggcaataaaatcaggcatcatggcataacctgtaatcccagcacttgggagttggagacaggaggatcagaaagccaaactcttcctcagttacatagtgagttccaggcctgcttctctcaaaaacaaaaacaagcgcccaaaaccaagagagtaaataagaagaaggttgtgcatagtttaaatgtacatgctgtagcatttggtagagacttgagtctcttgtttgtttattttccttggcaggagggtggggttcctggaccaatccccttggataaatggttgcctgcaccaaatttaaatagcaccttcttttgttaattcatagaaatatttgtgactacctgctgctttttgtctaacaagatatattgtgcttttcttttctaatcttcagtgtgtctaaacagcactcagttgttcccagtcaaatatttgagctagaggatggtacgagcagctacaaagattttgcaatgagcaaaaataatcgctttacaagtgctggacaagcatctaagaatataatccagccaccgtcatgtgtgctgcattattacaatgttccgctgtgtgtcacagaagagaccttcacaaaggtgggcactgaagaaagcagtgttagaatgctgcgctttgtgttttacgtttatgtagtatttcatagttcagcctcatttgagaatttttctaaaatcctgctttttgttgttagtttggtttgggtttgtgtacgtagagcctacaggttggtggtgttggatggtttcctctgttgatctccaccttgtgtatattcattaaatttgcttttaaaatatgaacattttgccagtggtgtggtgcacgcctttaatctcagcacttgggaggcagaggcaggtggatctctgcatttgagcatagccaggtctacaaattaaattacaggacagctggggctatacagaaaaaccctggagagagaaagagagggagagggggaggaagagagagaaagggagagagggagagggggagggagagagagaaagcatgaacatttcattttcatgcatttgtgtgtcatccttgggcaagggccatgctaagtctttgtgtccaattttagcctatgcattgc

SEQ ID NO: 25090 - DNA, 1242 bp, Mus musculus
attgcgaggccacgttggtgacgaggcacactaaataaacccctgtactttccaggcagaccatgtgcccatcgatgtccttggctgagaattcgtgcatggagcgagcacagcgccaatcattgcgggatgcacacatggtgcctgccagaccaggcacagcccaagatctttcttttttagaaatgaaaatttcagagacaggcatattccagagtttgagaccaacctggtctatacagagaaaccctgccttgaaaaaccaaagcttgtagggctgggtgtgtgtgtaggggcttactagaaataaaaatttcaaatcaaatttcaatttattttcaggtccttctgctaacttgtaatcttctttctttctttctttctttctttctttctttctttctttctttctttctttcttcctttctttcttcctttcttcctttctttaatgtgtgtgtgcttgctttataatgtagagttgaatttactgacaaatgcagtttagccttttgaagttaattggaaattgttttctcttccctaggagggaggtggaagtcatcataaagtttctgtttcccctgttgtccatgttcgagggctctgtgaatctgttgtggaagctgaccttgtggaggcactggagaaatttgggacaatatggtaaggagagtgggaacctcatagatactgaagataatatgggagggcgagcctcgcttgagcgctctgagttgcttgtatgtgctgtttgcctgtgtgtgctcttctgtggaaagaacctctcacccccccccccttttttttttttttttttttgagaggaggcattcctcccaaaggagggccagcttggaacttgtatttattccatctcagcctgttgagtgctaggactataggtgtctgccatgtttggaacccgccctgctccccacccctccctttttttttaagtttttacatttccttatagtgtgtggaggtgagacgacaacttgagaagactccctcgagtcaagtctctccaccttgtgggacccagggattaaactcagccctaggacttagatgtacccttgaagggagaggtcttgccagccccacctttggagatttctaagcttgttactacgttttgtattctggtgctagagattgaattcaggcctttgtgcactatacacgctaagcagacactgccactgagccctgagcttgttctcagcctccctgagg

SEQ ID NO: 25091 - DNA, 1115 bp, Mus musculus
atctttctggagttctcacagacaattcctccagacttcatctaatcctaaaataatgcctaagggcctaggtgtttatttcagccattcccagaccacttctcctgcctccacgggtcctctccatccttagtcatcaagtcctgctcagttttagcctctgatattcctcaagtctctttagtcttccacattggttataggactctgcccatcaggactctgttggcttaagtgacttctctctctcgctctctctctctctctctctctctctctctctctctctagtcaaggcctaactcacactgtgggaacataaaattttgatcaataaatgaatggaccgtgaaaataaaaccttaaagatttatcctccatcaggttcctaaatgtatctgaaatgcaaatcttatttccatcctttaaaatatttttgtagggtctgggcatgtgggttacttgcctagcatgtgtgaaagctcagagtttgctccccagaactgcactgcactgcactgcactgcactgcactgcactgcactgcactctgctgtactggtacacacttctagtcccagcactcgggagatgcaggcagggtagtcataaatgcttggtcactcttgcctacataggaagtttgagattagccagggctacacacacacacacacacacacacacacacacatgcgcagacacacacacacacacacacacacacacacacacacacactttctcattgttacccagcccagacactacgcgattttccaggctgctctgccatgccttgctcgcacctcaccagtctctgaactcccatccccaccttatggggacagtaactaccggctttgcctcctaaatcctctctcacccttcaaaactcatattttccccttgcccgtccttcccaaccttctccagtgccgctttgtcacctgtgcgtggttttggtaaggtttggtgccatgtagagtttcttaccagtccagctccctctccgtctgtccctctaccaccggagatgttctccggacatctgtcaggatagctatcaccccaagaagggtttaatgtctctggtttaaagctagagaaactaa

SEQ ID NO: 25092 - DNA, 2127 bp, Mus musculus
tgtgttagatctttggtagaaggtatttgatccctttgaatgtactgaaatactgaattgctctgacttgtacacaagaagcttcgttacactaattggttccaaacttaatgtttttctttttagtcgttccccatcaggaagtccacacagaagtgcaagtccagaaagaatggactgaagttctcaagttcacccgttagggaaaagttattttgtttacattattataagggatttgttatgtctgtaaagtgtaacctaggaaggatcatcaaccatctaatcaaaatggatctggattattactctgtaaaattcacagcagtaaatattgttttgttgaatgtattaacatcttatggtctgaaaatgtgggtttttatttgacacgtttaaataaaatgtttctaactagatgttttgatttttgtgttcaatattaatacttttcaattgggtaagcatcaggcaaggtaacaatcaagagaattattggccatatttatatgggcctgtattcaaagtttaatggtgttagttaaacatcattaactgttctatacgtaacactggccaggatctgaaaggactttgaaattttcattttactcttgtacctttgggtaagatgatctttgagtccttaatagcatgagtgcatcatgtcagatctctaaattgagaattggtgttaacaatttggaattgtcaagcttagagggaccactgataagcctacaaattggtgcatgacagaaaataagcagagttactgacatgtcagtagaaactgatttctagcggctgagattttagtagtgtagtttttcaggctattaagttgggttaattctgctcaatgtacttttttcctttcaaacaaccaatttaataccaaaaaatgcatgtttgaggaattgtctgaatttggaacaaaaccttgtaaaccagctttgcaaaattatccagccccagtcctctgttcttttgaatggattgccttatcctgtgcaaaaacctgttaatatctgagctagattttgtatgaagctatgtgtaattggcagacttatctgttgcacttggttagcttggttactgacattgttctattttgccaagctggtataaagagatgtcaagcaaagtgttaataagataaagcagttttgtaaaccttacatattagcatttcatgtagctaaggattgttatgtttttgttttgggtttttcctcctttggtagtgtctggtagaccttagaatggtgtagccagtaggttcttactcagactttaaatatattatgcataatagggcagtaatggtcattttcaaacgttttttggacaagctttttactatatttcttagccttggtgtaaaaacaatagcacaggaatctgtccttgtctattttaggctttttcatcgaagttgtctgccccaaatttatttggctgagtggtcactagtatgttgaaagtcatttgggttctgtttttagaatttgactggttgaataagtggttggtatgaagctatgtgtaattggcagacttatctgttgcacttggttagctttaattgttctgtattcaaaaattaagtttgttcaataaatctgcagagattgaacaaataatcctgatattcagtctttggaagtatgatatctgaatcaaaaaacaacccatgtagcttttaaagattagctagcagtagcattctagatatatataacctaaagggatgagaatggagtaaagcatcttagtaaacagttaagcttttacaagagcttgggctgtgtagtcagtcagacacctgttaggtggtatccagtccatttagtacacttagttttttggtagttgagaccaccactgctagacaagacaggaaaagtgctgatacttttttaacactagttttaaatagcccaggccctgttgtgaatgtatgtatgtatgtattaatcattttagcctttggggaatgaagccattaagatcaggaacctatggtcattctaggctacataagccattggcattctggaggctgaggctggaggaatctagagatagagtgcaatgtgggctacagtctgaggctcctta

SEQ ID NO: 25093 - DNA, 1094 bp, Mus musculus
tcggggggcggggcgggcccgagccgggccccacctccaccccgcacgcctcaagtctaccatgctcccgctgcagtctcccagggtttccttcctataagagcgccagaacttggtcgcaggtctggctttccagtctttcacgctgtaagatttagtacttggtgaagacctctaaataaagggagccagacctggtggtgcactagctgcctcagggaggttgaggcctgagagtcgtttgagcgatgtatagctaacatagttgtagggtggctccgagtagatcacttagctggctcagagtctccaaaacaaaacgtgtacgttgcacagctctttaaggatggtctgttttaaagaaatgaattccctatcacacgttgaataacatttgttctgtttacattttttaaacagaaaccaaggtatatgttggtaacctgggaactggtgctggtaaaggagagttagaaagggcattcagttactatgggcccttaagaactgtgtggattgccagaaatcctccaggattcgcctttgtggaatttgaagaccctagagatgcagaggatgcagttcgaggattggatgggaagtaagtgggttgtttttcaaatttctttaaaatattccctcgggctggataagtaatctcggtgctaatcatagactctctgggggtggaccttatttttgatagtgtctctggcctatgttgacctggaactcaccatatagctccggtggtggttggagccctcattctgtcagcctctcacatgccttacccttcaggcactggataacttaagatttaggactaaaggtggaattggcggggttttgtaaacaaaagactaaccgtgtagagagaatgagcagttgacatttttttaataaattaatttttattagatattttctttatatacatagcagttgatatttttaaatctagaagtcacatgtgtattctaacattagcattttcttatgttttgtagagtgatttgtggttctcgagtgagggttgaactatcaacaggcatgcctcggagatctcgttttgataggccacctgcccgtcg

SEQ ID NO: 25094 - DNA, 1170 bp, Mus musculus
ctgcctgtcataatccgaacccactgttaagagaaaaaggccactttgaaagtttgttaaaagaatttttaatatgggtaggtaaactttaagtgtctctgtagtttattgctaagaaaactagaggacaagattttaaaggcttttcttaaagcaaccctgcagctgggtatggtgatccttgtctgtagtcttggaattgaggaagctccttccacttgtctcaaagccatgctgtgctgtgtggcttagaaaggtactcaggaggagctggagagaggcctaagagcacttgctgctcttgcagaggacctgagttcagttcccagtgcccattgtcagacagttcctcgtaaccatttggaatacagttccaagggagcctacacctctggcctcgacgtgagcacctgcactgtgtgtacacacccacaggcagacacatctcacataattagcaaggattaaaatcatcttttttttttaaggcatttcttaagaaacaaaagatccctctgcttcattctaccagctatcaaatttataaatcatgattttattctttttcagaattaaaattttagaaatgtttagtactcataatctccagtccgtgttctctcggctcattgaacctccacatattgattctcttcgtgcctcaaaagtacggttgcgagacttgggagccttgactccagatgaaaaactgaccccgctgggttatcacttggcctctctgcccgtggacgtgaggataggcaagctgatgctcttaggttctatcttccgctgtttggaccctgctctcaccattgctgccagcttggctttcaagtccccttttgtaagtgacatttgtctaaattggaattttatgtcacagttctcaaagggatctttagacttttgaggtatgtgagtgcatgtgtgtgggtgtgaaagatctcagagcacaatggtatgtgatccttagaaaaatctttatttccccatcccccaaaaaaccttggggattagaggtatagcttattaaaataataatatgctttttgtttactattgcttattttagaacaatcaaaaatagtaagcagcaagacaccactatataatttcaaaaggtagtgaacacatgcatcagctgtgaaaagtaactcaatagaaagg

SEQ ID NO: 25095 - DNA, 1189 bp, Mus musculus
atggacctccattccattgctgggcctcctgttcctccacgacaaagcacttctcaacttatccccaaactccctccaaaaacttacaaaagggagcacacacacccatccatgcatagagatggaccaccactgctggagaatgcccattcttcctgagttcctctaagctgggatagtttcctagcccccagatccattgctggcaatggatgcactgaacatgccagcactggggagttcaaatgagaactccaaacactaacgactctacttcacgatgtagtataagacaatgagttttaacctacatggaattatggaataaaatggtattccagcttagaatgtggaaactgattgcacctggaaatcacgtgaagggacttttctggccattgggcaggagtcctcatattgtgaagtgatctttatcattaaagggatggaaaacagtctaatgtccaacaagcccatatgttgacagtttttgtaattcaaaatattatgcacttttaaaaaatcttaaacagggatctcctcctttgttttcctttgctttactcttctactttagaatattttcgtaaaagttattcagaggactgtgagaaaaggctgtggtacctgaccttgttgaaatcaaggcccagcactgtactacagtcctgtttacagattattacagtgatctgaatgggtaccgaggcttcaccaaagaggtactttttgttattgttattgttttaagaataattatgccaattttaagaacatcccctacccacccccactcacaaacaaaatgtggtggtgttgcctttaaacaaaaaatgtcaatgtcattaacatgatggaagaagaacattttaaaacgtaactgtcaagtatacgatttacgcttaggagactgttcatctatgctagactgtcatcccccagcccctttgtctcacagaagtttactggtaatgtatgtcctggctcgtggctgtccctctaaccgtacacagaaacacaggcacccaatgtgaacgagagcactctctgggcctccctgacacctttcatgttttactaatagttgagtagttagcatacctagaattaccttgcattgcctaaatcatgtgtatatagtgaatgttatataatataccttgcaggtctgttattatttaattgaata

SEQ ID NO: 25096 - DNA, 1130 bp, Mus musculus
aaatgaatttaataagcttactcagaaaatattaaatcacatggaagtataggattaatctaaggggctttgcctaactttgagttagcttcctaacatatgttacctaggtaatgtaggaagataaaggaaataggctctgacttcattagaatataagtgttctgcagttttcctttttttttttttttttttttttttgtaaatttgctttttcaaacccttttcgcttatcagaagaagtgagcatttgccacaagccttgaaatacaacctcggctccatctgcttaggtcttgtttgtggtgactgagactctgactctgtgaattcagaaaatgtggcttggggatggggacctaaaggccactcctagatgaatacatataagattacaacatcacagcccactctaaaggctcagggagattgtagctggggatggaccacttaagcattagctagggtctgtcccacactaaccaagagctctcctgtctgagtgcttgggtgaattccttactggattgggtctttttctcatgacagaaggaataataaattcaagagaatttcagcctagtgtagaacatgcttacagcatccagggcctggaacaaagattcaagactagccttcaaaatggaaaaacaaaacaaaaacaaacccatatacacatacatttatgcatacatacatacataacgtgtgtgtgtgtgtacacatacatatagtgcctatagcaataataataatattgtatagttttgaaaactgctgagcagattctaagaatttacatctgagaaaaatatttgacagtatatatttttaaatattttgtcaagcaccatattgtataccataaacatatataatttttacttgtcaattttttttgagacagggtttcattacttgtcaattaaaaagtaaaatttctcaaataaaaaattttattaagattttatttttaatcatatgtatgcctgtttgtgcgttcatgcgtgtgcaccctttctgtgtgaaggtgcctttagaagctagagttgttagacaccctgggactgcactttcaggcaactgtgagcaactgggtaggtgctgggagacaagttctggaagaacac

SEQ ID NO: 25097 - DNA, 1189 bp, Mus musculus
atccttattcccagaaagccagttattttatgatatgttaattaaaggttgatagaaaaattacatgaatgttagacagaaaacaagaatatcacagttgaatagacaattaaaatattccttcattttcccattacatgtctggtaaacttatgtatctagataaagctgtactttatcctgttctccagccacaacagactgaatgcagagacaaatagaaaagtcctgttctctgttaaactgtattgaagattagtaaagagagtatgaagatgttctaaaacaaaatgattggtagagagacatatttcttaattgtatatctatcactaaagaataaattttgaagtattttcttattgtaagtcattaaaattcctcaatatctacattataccttgattataaaataatttttttactgaaaagatatcttgttatacaatacaatatgattgaattaatttttctttctcctccgcaggatgtagaaaacatattcagtcgtatagtagatatacatgaacttagtgtaaagttactgggccatatagaagatactgtagaaatgacagatgaaggcagtccccacccattagtaggaagctgttttgaagacttagcagaagtaagtatatcaattatattgtcaattatatagcaagagaagtctgtctgtaagtacattggcattaaaatggggttcataattcctatttccagctcaagtcacataccgttgcttcttttccatcataggtcaacatttattactgttaccaggtacagaaatagttatcaagcactacgcccagtctcggtgtcactctgaaactttgatagaaagatcaaggcaaggccacccgtgagtgagaaaagcttgggtgtagggtcctagtcctcacagctcactgctcagatcactgctgtgtattacatgtgtggctccaggcgagttaccgatattttgcttctctatacacatttgtaaagcaagaagaataacaataagaagtctcaaattttttttttgtaagttaagataatctcccttaaatatttggctaattccctttacatagtaaaataaccagtacgtgatagccacatttgtttttagaattgaacaatgaggtgctaggaaactcagcccatggcatagacagttcagatcccatgggagtct

SEQ ID NO: 25098 - DNA, 1929 bp, Mus musculus
tacatcttggcgggtcacgaaaacagctactgagacacggtgttcttgacagtgacctgtggagacagtgaccacagctgctgcaacgttagtggaggagtgaagctatgcagaccctgcaggaacctagattctgtttcttataatttattgtggcatgagacagatgggagaacattttgttttaagtggtatggatatatttagcatattgaaccacacaagtgcttaattcattgttatgtaatctttgtacatataagcagtatttttctgtgaaacttcatattgctgaaggcatacactaagaatttatgtagataatgtacttttatgagatgtaaaagtgtcttatctgtacagatgtaaatgttgatgaaaatgcaactggggttaatattttaagaattctttagtatattcttgggtgtggtcatattacaaaatgggatgctggcaatgaaccaagacattaacactattgtatttttattatatataatttagtaatatggacataaatcctgtaacttttaaaatggtaacgagctgtaatcattttataatcttgtttttaattttaatgcacgtgcactggtgtttctcctgcacagagtattgacatgtgatgtgttgtcacagagagcctgtgacacccaccgtgaatacaacatcttttttacatgtatttggattgttttctatgtgaaacaaaccagttaaccacctgttgtagtaactgatctttttatatttaaggagaattgtgtaagataagcttgtctgtgcttaggatacaccttcgcaaaaacttaaatcatggaatggcggtaccacggtagaacactgcagctgtcgccagggttacagtgcgcataagagcaactcgcattgctgaggagtccgcactagacatttcacagtcacactgaagagctgtcacattccagagtgagctgatcaggtttctcgtgggcttttacttctgttggcattagtttatcacttccatatttctttagattttgagtattaatacatggccaaaataatttagttactacctcatacaaacattataatggttactacagatcacaagaagttagtttggttaaaatcattgttgattggttttttccaatggagtgtatctgtcttatcaagatagataccaagttgtagcaaagtgcacacctctgactctctttggtatatgttcatatgttctttatattttgatgtgagtatatatacactaagaacaagctaaattgtgatttatgcttcatttattttaactgataatggttttaaatacgttcctgattgtacatactgtaaaataaacatgttttttaacatgctgttgcgtagttgctggtcagtcggcttagtagcattagagggaaatgcttcgtgtgcagtcagatcgtaagcatccagttctcccatgatcatcattgtttgatctacattttaaatataataattcccacatttgagaaagagggcatcttttgtaggatcttgaattcttatcaggaaaaacaaacactcatagtgttttggttgaagctggagtaggcagtttatatcttagccaggtatagcccacctcctctttttattaataaagttgtgtgagaacacagcaccacctatgtgacctgtcacctaaggctgtgcctgtacttctgtgtcacacctgagtggtttcagaggaacaccggcctgagagcagacacgtgagctctcaggccctttacagaaagtaggctgtgacagcctgggagagcacagccaaggagcgttggggacgccgttctgagggcaggggcaggaggagacgtgggaagaactgactgagtaaccaaaacacactgtctcttagggtgaccttgggtcatttagtccagaaccattggt

SEQ ID NO: 25099 - DNA, 1147 bp, Mus musculus
tagcaacagccataaataaaacttttagatgtcttttggaaaaattcccagaaaaatattcaaataatcaagatatcatatcttatattgttggaaatgccaccttgtcttccttttaagagtatagagcaatacagatttatttggggcttggggattttctttttaaaaagataatgtatattagcgtatagtgattgcggcctgctgtgctaagtcttctgcttcctgccgctaggatctgcaactagagtacggacaaggacaccaaagccattgcttcttaggtggcaacaagtaagtaaagttcttttgaaacttaaattctaagtaattgtcttcaatattatattttatatttaatatttaaggtagtaaattttattgagccagtatatgtcgtgcagcgtgcccttgaccttcccatagtcttcccctggtcagtagttgtcatctgggaagatcagcctaaacagcccaacagtccatattggcctaacctgcagctcgttcttgttgcagtcaccccagctgtgatgaatctgtatctcagcggctgatttctttctagagtggacctgcttaccctctgcaaaacttgcttgatgcatctctcagataagctggccactaagagcagctaaaattttttaaaatcattcacctgcttagaaatccatgttttaactttagctgtgctggtcttttaaagaacactagtaaaataaaataaaatgctagtaaaataaataaaagtagacatgcattcatgaaagctatttcatgagaaaagtagattaagacaccatgatggtgagagcatgatatagttagtttacagacttgtgtgagttcgtcatatgccagggttaagaatccagaactgcccatccttaattcctgattccatagatgaattttcattctataagccaatctgtaagggagtatttgaattaccaaagtattctggggatatatatatatatatatacacacaaaattagaactcaaaatttcaatctattgattacactagagagctgagacatctattgccatacttcaaattaagaaacaatgattactgacagacaccttagtttaatgtaaaccatgtctttctcttctataatctgaacacttc

SEQ ID NO: 25100 - DNA, 1157 bp, Mus musculus
ttccaacaatgccatatttatgtagatagataggtagatagatagatagagacacagagagagagacagagagagagacagagacagagagacagagacagagagaaaggtagttaccagcctcccttgttaccagagaaaagaaaaaccacttcaacaccaaagaatgaggtcacaagccatgcttcaatgcaggggtaacacgtgctctttatgctcctacacgtaatagttgaactacatgcagtctgatgctggcctcgggtgtctactacccaccagaagattttcagagcatacaagtcagtaatcacaatggtgagatgggattgaaaggcttggcaggtagcatgctcgtatggggtggcaggagtgcattgaaggacttcaaagccaactctaaagagaccacattcatgcgacttcagtcctttcttcagcagctctgaaggggaacagacaggaggcaggtccagttctctgttgtctgaaaatgaacagtcaacacatggttacagtactaactacttcttttacctgcaaacttgcatatgccttttagagaacttgggagaaacagctgtagtaccttttcctgagcacaaagtgacctccttccctttactgcaagcctatgagaactcaaatgtctgcctttacagctttaactagcacttccccaccagcaagtgtattgaagaggccccagaaagactgtagtaaccaaatatgaaaggtaatagaaagacgccaaaccagctagggccagcagtctgtgggcaatcaggactacttactgctgcttacatctaaatccttgatttcatctgctgcctcagccaccccacaccattttttcctagctaaaagcagtaagaaatgacacaggcagaagatagaaagcagtgtctacaaattagtagaaatgatgatattgtaatatctgtatgctagaaaaatagcccttaatagtgagaggaatataggttgtcccagttacaaattgtatacttttttttccatacatggtcttgctatgtagcccaggctggcctagaatgggagatcctcctgcctcatctccctagtgctgaatcacaggtgcccactaccaggatgcctgccctgttcaacatttcataacctggataattgca

SEQ ID NO: 25101 - DNA, 1195 bp, Mus musculus
ctaaagactaaaattccttttgtgcttaaaattcagctgagagcaacagctctcaaagctgttctccagctactctctgagccagctcccgacaggaggccggagactagcctcagctttacaatttgcatttgaataaagtacctagacttccccgaaagaagttctgctttcctactttctcactgtctttcaagattttgtctttcaagcaggtaaatcaacattctcgaggtggaccagcggatgtgcatccccgcccccctagagcacacaggtggcagctgttatccccagtctcaggacatttccagcacgtggttttcagtctgagttaaaaatttaggtttacctagagggctagaagagtagatatttctatattaataaagattggtttttattttgatagacaggcttagccccttagctgacctctggcttttcacccttgctgttactgcaaggtgtccttagctcaataggctgtggaaaaaacagggatgaggaggaacgacttccagctcctattttagccacaaatcatggtgttactaacgacataattcttgcttaggctttgctaattctgaggttggtaattctcctttaggagctgcacagcactcagaactgtgcatactggtttgtgattgtacaaattcagtatgggcaccgcttggtgcagaggtactgcaagggaaggtccggcttgaccatttctgagtttcctgtgagataaacccggtttaaaagaggttggtatcatattttggttaaaaataaaaaatattttccggctctacctcgcctccccaaaaggtaccgagagccacatgtgtgggttttacccacgggaggaatcgggtccatgtccacccaagccaaggttaaaagcccactcatctacggatgagaaaatcatttgatcacctcagttaagcgttgccttatttaacttaattaataggggggagagagattggagacgtactattgaaagggcaagcccttcactgcctcccacccaaataaaagagccggtcgaacgccttctccctgtttcccacctatcatccaaaaatgcggaggaatatcaacttagtgttattttcatattgttcagtcaaacttagccagagttccaacgccctacttaaaattcaactagaaagttacctaccaagtactaatt

SEQ ID NO: 25102 - DNA, 1172 bp, Mus musculus
gctgtgctgaagtttgctgctgccacaggagccactccgattgctggccgcttcacacctgggaccttcactaaccagatccaagcagccttcagggagccacggcttctagtggtgacccatcccagggctgaccatcagccactcacagaggcctcttatgtcaatctgcccaccattgctctgtgtaacacagattctcccctgcgctatgtggacattgccatcctatgcaacaacaagggagctcactcagtgggtctgatgtggtggatgctggccagggaagtactctgcatgcgaggtactatctcccgtgagcacccctgggaggttatgcctgatctttacttctacagagacccagaggagattgagaaggaggagcaggctgctgctgagaaagctgtgaccaaggaggaattccagggtgaatggaccgcaccagctcctgagttcactgctgctcagcctgaggtggccgactggtctgagggtgtgcaggttccctctgtgcccatctagcagttccccacggaagactggagtgcacagccagccactgaggattggtcagcagctcccacagcgcaggccactgagtgggttggagccaccactgagtggtcctgagctgctgtgcagacgcctgagcaaagggaaaaaaatggaaggaaaataaagttgctaaaagctgaaaaaaaaaaaaaaaaaaagaaagaacaattctcaaattcatttggaataactaaaaacctaggatagaaaaaactattctcaacaataaaagaacttctgggggaatcaccatccctgacctcaagatatactataaagcaatagtgataaaaactgcatggtattggtacagaattaaagatccagatatgaacccacacacctatggtcacttgatctttgacaaagaagctaaaaccattcagagggaaaaagacagcatttttaacaaatggtgctggttcaactggtggtctgcatgtagaagaatgaaaattgatccatacctatctccttgcataaaactcaagtcctagtggatcaaggaccttcacataaaatcaaatacactaaatctaatagaagagaaagtggggaagagcctcgaatacttgggcacagggggaaacttcctgaatagaacaccaatggcc

SEQ ID NO: 25103 - DNA, 1158 bp, Mus musculus
ggccaattttcacataagtaatttttataaaaagcaattaatagtatattttattcagtgccccagtcaggcaggttattttgtgtatttctgttcaatcgatctatctatctacttatctatctatctatctatctatctatcttacaccctgattgctccccgatcctgagtaccctcctctagtacatcaagtctgtgtagggctaggtacatcttctcccattgaggccagacaaggcagcccagttagaggagcctattctggataggcaacagctttagggatagcccccactccatttgttcagggggctacattggggggggggtgttgctgctgctgcagcagtggcggtggctaggtccagcctgtgtgtgctcttttcagtccccagtatttctgcatcttaacaacattcttcagcatttgtcttaggacagcacatactgttccaaaagtataaagctgtacctgagggcctggggttcctgttcctgagtttgatccctagaactgacagggtggagacaagccaagccccagggcttatcaaactagttagtgtaatatgggctcagtcagagactctgtctcaaaaaataaagcggaaagcagttgagcaagacacccagtttcaatccttgacttacacatgcacatgtacacacatggctgcacaccacacacatacatatgctcacacacaaacatgcaacatacattgacagaaatgaaaagttgatctggatatttttaaagcagttacttgagtctgccactgtacaaagctggaagttaaggcttaatacttactttctgtgttatacaacctcattgacaaatctgttgaaagaaaacgacacttagaactcaagatttaaagcactcttgttgttaaacctcatatcatttgtggggcaggagtttgagcagggtaagctcactggctgacattcaactagagagtcctggtgagtgcttcgttatttgatgcatcggccggaatacttggcagtctaggcttttggaactgcccagccagcagacacatacacatgccccctgtgccactgcgtggttcaagttggttcaaggtagttgggcttcttcagtgaaaatttactcccggagaaagtatttcaggaaaccagagt

SEQ ID NO: 25104 - DNA, 1202 bp, Mus musculus
ggtctcaggtcaccagcatctttacctgctgtgccatcctgttgtccaccactttggtttgcttggtcttttacagtacagcccagacttgcttggaacttgagccaatcctaccaaagagatggcaggtgtgtgccaccacacccagccattactcttttaaaaagagattagactgttgggaaaaggaagatcagcaaaaagtcctttgttaagttcatgacagttctgtttttttattggtggtgtgtgtctgatgggttgccatcttgttttcctagagatacaagatcatgattcattaaaagggagactttgaatagcatgctcttgaaaactactcatgtctacaaagtgatgtgtgtagggaacacttcataagaaaactaaagtgctgtcaccatacagggggtcaattgtgggaaacatctttctagaagttggctcttataaacaaggcataatgtttgtttatttgcttgcttgcttgttttataaaaatgatttggtgtaattttctcaccagaaggaaattctttcttgaacagtctggttttaaaatagtcaatattttctctttttagatgatagtatttctgctgcaagtacctctgacgttcaagaccgcctctcagctcttgagtcacgagttcaacaacaagaagatgaaatcactgtgctaaaggcagcattggctgatgttttgaggcgtcttgcaatctctgaagatcatgtagcctcagtgaaaaagtccatgccaagtaaaggtaattagtgcattgtaaagaagagtcttgtgttttgaaaagttgggcatacagacatatctgcttatttgagttccttgtgactatagtagtttcgtttagcccctgtgtgacagcactgacatcccttacaggcttaggctcctccaccataggcgcctgtactggctggctttgtgtgtcaacttgacagaattatcacagagaaaggagcttcagttgaggaaatgcctccatgagatccagctgtggggcattttctctattagtgatcaagggggagaggccccttgtgggtgggaccatctctgggctggtagtcttgggttctataagaaagcaagctgagcaagccagtaagtaacatccctctatggcctctgcatcagctcctgcttcatgccctgcatgagttccagtcctgacatcctttag

SEQ ID NO: 25105 - DNA, 1138 bp, Mus musculus
ttcctgattccacctggaaagcctcatgtggggtgcgaaaaactcagacattggacaaaatgaggtgagcttggagaaggtcaccagtcctggaatctggcacaggactttattgctactctatacagcaaacagagggtgactgtccctcatttctcattttaggcccagcatgcttgttatttcctggatgagccttctcgggtcctaccttgtgctttgtaagtcaggtctccttacaggcacgcttcccctgagcacactgcctcacaggccccacttctgatttgttcagagctgtgtgcttagcactgtgcttggtacatgctaggagctcagagtatatttgtccaaggaatatggacattaagacaaatacagtataagacttaggtctgggtatgagaggggaaggtgagtgtcctggctctagtccggttttctctcctttgtgcctccataacttcttacacgccttgagtatttgctttaaaaccttgacttttcattcaagatacggttatcgaggaaaggactgtagagcgaatgtatacctgcttcccacaggggagatagtttattttatcgcctcagtggtagtcctgtttaattatgaggagaggactcagcgacactacctgggtcatacagactgtgtgagatggtgagtatcaacactgttgcatccgtgtgcctgcctagctcctccatagtcggcatcctcagagctgtactgaagttcaccatcggaggctgagactataagtaataatgttacatattatatacataataattatatacatgtatacagtgtattctatgcactatatttttaaagtaagtcattaacattcttaaaaacactgtggtgccgggcgtggtggcacatgcctttaatcccagcacttgggaggcagaggcaggcagatttctgagttccaggacaacctggtctacaaagtgagttccaggacagccagggctatacagagaaaccctgtctcgaaaagccaaaaaaaaaaaaaaaaaaaaaaaaaaacacacacactgtggtatcaatagcaatagaatacactgctctaaatctcagttaatctaccctgctgcttcaggtctgtatcccttcccgcctggt

SEQ ID NO: 25106 - DNA, 1142 bp, Mus musculus
tttaaagggattgtagaatttgtgagtgctgtggaatattgcagaaccctggtgtggctcagcctggcttgtaggaagattgtaagttagcatcgcagctgcatttacatggggcagaaatgttaagactacagaagggcttttataagttcttaaagaagactatgtttccaaggttagagatggttcagcaggtagaactaactggtcctgctcttgcagaggaccagctcccagcacccacacatcatgtaccacccgtgactccagctctctggaagtcaggcctccatgggcacctgcacttaggtgtgagcaagcacacagacatacatgtgcataaacatgattaacaagtaaaggatatactttgcttcagcaccttgtctcttttgttagggttatttttgataaattgcaagttttttactttttcccttaaaaatgggtttttgttattgtaacttctaaagcaagcaaggtacaattgattgtacttgaaattctctgtcagaaaatctcaccttaaaaacataagcgaagacaaataatccgttctgtataatttagagagcactgatgtgtaggggagttgaagcaaatgaactacagaagtgttttctcttttgtagttaggtctaccccgggaagtcctggttcccccgctggccgttctttacccctttccaggatgtgttgcaggccctctactgagagtgttcctgtctgatctctggttcagctttcccaggcattgtatatgaatgcaatctatcacaaatgaagaataacgtgtcacagtctcctgattgtcagtgtagatgctgtagtcattcaagaccacaggcttgtgcttgtctcttcccctcttttctctcatccagattcctcaaactcctagatgtccgttgccagaattggtcattgtaaagcaactaaaacttaactccagagtatttatttgttcctattcagggtagaaaggaaagccttgggggttgggggggggggagcattttgttaagaaggactgggttctagggctagctagatacctgggccttctctccccactttcctcctgcatgttattctagcaggagactgtccttgcctacatcataaagatttgagtgcttggt

SEQ ID NO: 25107 - DNA, 2605 bp, Mus musculus
tctgccacccgtgaccccgtgacgtgatggggccaggtaacgggccgggcagtggtgaggtcactgtgaatggaggtttgtttcccatgagatcggacactgtccgcagtccgatatgccaccagtgagctagagcaatccaggagactgtttggtagatgttcacaacttcaccaaacttaaatagcaggaggagactggcaggtgagtgtgtccaagaaatccacatttgtgctgcagatactggaaaccaaactgcagctgcagccattggaagaaacctgttacctgaatgcgatttcctccattttctcaacagctggaggcctctcaggcaccatcgctcgagtggctgctggctctcaagctgccattttttcctgatgcaaaaaatgaaagcaggcaaaagtgctgtcattgtgataccgtcccactcagatgtctaacgggagcttgcttaaggggaatgttagcattgccaagtgcgatggtgttgcctttccatgggatattgcattttcttacactacccgagatgtccagacgtgcttggtaggaggctactccctaggtgctgcctttctaagttctgacgaggagcagccctcagtggcttgtgtacagattgctctatcccagaagcaagccttggtttgttgaagagcttttcatgtatagtaaaccatgattctgagagaatcgattctccaaggagtccttcactggcctaaacattctgtaatgttgggcattcaagggaatggaagaaaacaaaccacatgcctttaacagatgaactgtaatgacgacctgctaactgctagccttcagcgctatctgttccctcacacagtcgctaagtggtcaaattggtgcttgaaattcattggtctagttgtaatttttatacaaattacaccaagagataagatgtcttttttttacagaagtgtaatagtcacagtgccgcttataggctgcacgcaccccttgcggatgtgctatctgtgggcatttcctcctcctgtgagccttgcagcccttgtatggcggctttggtctgggcagtgcatgtgttagtagtgtacgtgggcaggtcgggctttctaagctttgtcagataactatttttcctaagtatgtgtttcctactccagtgattgacaagtgtgcattgcctatgtttgtttatactttaattacaaaactattttttttaacttcctacattgttttcctacttttttgttgttggattatgtaacttttcctaagttcagaagtcttaagtgtgcaagcgtttatgtgaccgtgccattccagagtgcatcagaactgtcatcccttccaggaccttctcaggagtaacacatcaggtatgtcatcagcgctgggaaccgtgaacgccaaggacactcgccactattcacacgctgtgccgagggtgtgtggagggacaacagagagcagtgtatctgagtaagatgcacacatcgaagtgcgttcaaagtctgtgtctaggtatatatgtccgtgtagctctctccttttgtttacagctttttttaattaagtggaaaaaataaaaataaaaaatcctcacctcaacataggtctctttcaaagggagatttcaagccacctgacttcttcagtttagtcttcacccagggtcagagcgcacagcttcaggcatctctgtccaccagctagcagtggagatgaaatcaagaccttgcaaaatggatactaggagatgaacaacaattcaacgtgcttctctcagtgcctggaggatgcagctctccacacgcagggactttatttggggacatctgtcacctttggggttgccatggccaatgagatttataatcatgatcctcttgggtggtagttccaaagacactactaatgtgcagagagcgctccggcctctggtgctggccactactgtttcctgtcagtcagatctgtgataatggttggaaggatgtgggattatgaaactgcttttgttttgttgggtttttttttttttgttttgttttgtttttagaaaacttgtgaatgaaaatgaacccaagtgtttcacgtgaagatgagccatttctatcatgcattccgatgtcatggcagaaaattttgaagataaaaaaataagataatcaaaatgtttcctttgcctttgtttggtcttggttgtcggagacagtcttgttatgcattctaggctggccttaaacttgtgacaatcctcctgcctcagcctggaatgttactacaggcatgccctacatgcagttctttggtttttccatgtatcctaagtaggtttcttctggtactttctgtgactacccagatatgagaaggtatagtagtggagaaggagacaccagttgactgctgttgtagacaaactcctggtagcaagaaacctcatgccagcaggggacagtgcaacttccgcttgcttcttctctgtgatgttgctaatatctaacactggctggtcctggtaattacccagttacctacctgacctggctgcttcctgttgctggtgtttgaaggcctgtacgaaacaggttggcatgcctgt

SEQ ID NO: 25108 - DNA, 1854 bp, Mus musculus
cctacagagtctttatcttcaaacgtttccaggcctctgcccttgcaaactgagactgtggtacaggccttagaaacatggatgtggctgtagagagtgactgcaggcttatcaggaagtacgcctgtgttctgccacactggtgcatcccagttgcccgctatattgtgtttgtggagtagttttcatgatggagagaattttcttttttttttttttaaagatttatttattgattatatgttaagtacactgtagctgtcttcagacactccagaagagggagtcagatcttgttacggatggttgtgagctaccatgtggttgctgggatttgaactccggaccttcggaagagcagtcgggtgctcttacccactgagccatctcaccagactttttttttttttttttttttttaagatttgagaattttcttctttagtttgtagtaaaatctgatctttccagccaactcacagttctttcttgctttgcagaaggctgatggtttccacctgaaacgaggccttccagaccaaatgctttaccggaccaccatggctctgacactgggagggaccatctactgcctgatcgccctctacatggcctcgcagcccagaaacaaatgagcttgcctgtggaggactggttcactttgtggcacaaaccctttgaatcctcacgtttcatgttttccacttggatagtctacttaacattttgcaaacaaaggaaaagataagaatacattgttttgatttgtttatggtgtgcagatggcctgtcagatgtcagagctggtttgacagttaaaactattgtttaaggaaatgtcactgagccatcactgagctgtgcttctgctcctgatttccctggagttctgcaggaaagttgctctccagctcattcgtggccagccgtgctcagggcctcgggactcaggcggtgtctgagcgggaagcgaagcgcggaagccttttggagtgtaggtgtgattgaggaaggaaaacaaaagccagcggacaggtggtgaagtgagggctgagttagccaccctagggattgctccgccttgcagaaaacattgagaggaatgatagcaacctgcctctatttgtgggcagttggtttcaaagggttgtgtgtctcgcccagaacctagggaaatgggtgtttgttccatcgtgggaggagcacctgtcagtgctgcacattagacagctgtgtcaggagttctcctttaataatgctgtggctttacgttatgattgaccggactgcggaataaacactggaatgaagatgtttttagtttgtttgttttttgttttttttgagccagtgtcttgctctgtttcattgtctcacccgaaactcactctgtagatcaggctggcctcaaactcacaaagatctgcccacctctgccttgggagtgcagggattaaaggtgtgcccctccatgcacagcttgagagttcttttcaaactaatcataggggactgagcttccctaaacctgagcgttgatttctttttaattagccaccaagccttttttttttttaatttatttatttaatatgtgttttttttactcataagaatgtatgtgagcctggtgcccatgaagatcagaagagggtgtctgatgccctgggactagagtttcagtgggttttgaatcttccttctgggaattgaaccttctgcaagatcaagtgctcttagtcactgagccatctcttcagccccagccccatctttacaagacagtttctcagagtccagtaataggattgttgatttccatatagttcctatgaaagacccccgaagggagac

SEQ ID NO: 25109 - DNA, 1112 bp, Mus musculus
tacttagatagaataataaataaatctttaaaaattaataaaaaataacagacggtgaacgggttagttttttggcaacttgacataaactggggtcatctaagaagcaggaacctcaattgagaaaacccccttctcagattggcctgtagctaagtctaaggcgtcttttcttgattagtggttaacaggggaaggtctggtccactaggagtggtgctccactaggcaggcagtcctgggtcactgaggaagccgtgtgcacaccggtgagcagcatccttcatggtctctgcttcagcttctgcttccagtttcctgcctcaccctccctcagtgatgggccgggacttggaacttccctcgctaagttgcttttgttcatagtgtctattccagccttataaagcaagctgggacagagggctggagaggtgataatcttttattaaaggagtagatggcttactgttctctgtttttgctccctagtgccgtgggaacatttgcccgagccctggactgcagcagctccgtgaggcaacccagccttcacatgagtgcagccgcagcctcccgagacatcaccttggtaagaaggcttttgccatttggggttagcttttgctccttgctcaattatgaaccattataacagttccggagactcggagatctctggccgctagcccttgtctaccaagttgactcaggttagcagttggttaaccggagtgacctcttgtttgtgagctgagaccggtgaacagtattagggagcgaatagagagtggcgggacacacctcaccttctggcgtggcagtttctgccagctttgtgcttttccctgtccatctatctacttgactttgggtcacataaagtattttattccttttaatacctaaaggattattgttgctatcacaattgagattattgctatggtaaccgcatttcactttgggggttaatttttaaataatttttggtgttcaaatattgtgttttattatgacattttcatacttattattctttgttcatattcaggaatttcaaacacacactcccaagcacactcaaatgtttattcaaaaagacatttgag

SEQ ID NO: 25110 - DNA, 1190 bp, Mus musculus
ggatgctctgtggttgcatggatttactctgcagcactctgatttccaagaactaaggatggttccaagcgtttgggctgatcattacagcctgcgctcacgcgttgcagtgcctcctccacaccctgcgcacgcactgtctgtctcctctgaccttcctccagttgtattactaagtgttgatgtgaacttgtgatgtgtcgtgtaaccctgaccaagcagaagggccaatccaatgtgctttctcattctcatccgtcttcgatgatatgcagtgttttgcttagaattttattatgtctagaattaattccttttcagactcgttgaaaaattgtgtattcaagttgtacagtgtgatgggggtgatgtacacactctgacaagtgatggcagcacctaacacacatctgctgactgtcgtgtgtgtgtgtgtgtgtgtgtgtgtgtgtgtgtgtgtgtgtgtctgcgtgcgcaagtgtggggcgcattccattgccgaaccataacccaagcccacttacacctttttggttagaattttgctaacttgcacagctgaccttgaacctctgacctagaacttgagatcttcccgcctcagtgtttggagtagctttctttagttaaatttattctttctgaaaaagaggctttgtttgagctcttcataaatgactttctataacaactatccttcattttaattgtaaagctatatttgtttgtttgtggtaggacctcactgtataaccttggctggtattgagtctgggctggtcatcctgagtccgtctcctgagtattgggattacaggtgtataccatgcggtagcctgaacatacactccttgactgtgcagtagattccagctgctaacctgtcttttgatttgttggatatctcttgaatcagctctaaaacaaaaattgttacttatcaatatggactgaagcaataaactccaagcacagcttttaaattttgttaccgactagctatgacactaaattctaaagccagccaagtgtcatgtcttagtaatcctgtagtcaggaggcggaggctggaggatcataagttcaaggccaacctagggatcatgctttaataaaaaaagttatggtcaggccgggcagtggtggcgcatgcctttaatcccagcactcgtgagccagaggcaggccga

SEQ ID NO: 25111 - DNA, 2396 bp, Mus musculus
accgctcgttcagcgagaacggggagcgcagccagcacctcctgcacctgcagcagcagcagaaggggggcagcggctcccagatcaactccacgcgctacaagacggagctgtgccggcccttcgaggagagcggcacgtgcaagtacggcgagaagtgccagttcgcgcacggcttccacgagctgcgcagcctcacccggcaccccaagtacaagacagagctgtgccgcaccttccacaccatcggcttctgcccctacggcccgcgctgccacttcatccacaacgcggacgagcggcggcccgcgccgtcggggggcggcggcgcctccggggacctgcgagcgtttggcgcacgcgacgcgctacacctaggcttcgcccgcgagccgcggcccaagctgcatcacagcctcagtttctccggcttcccgtcgggccaccaccagccgccggggggcctggagtcgccgctgctgctcgacagccccacatcgcgcacgccgccgccgccctcctcctcggcctcgtcctgttcctcctcggcttcttcctgctcttccgcctcggcggcctccacgccctcgggcgccccgacgtgctgcgccacggcggcggcggccgcgctgctctacggccccgggggcgcggaggacctgctgagccccggagcgccgtgcgcctcctgctcgtcctccggcgctaacaacgccttcgctttcggcccggagctgagcagcctcatcacgccgctcgccatccagacccacaacttcgccgccgcggccgccgccgcctactaccgcaaccagcagcagggcctgaccggtcccgcgccacccccggcacagccccccgcggcccccgcgccgccctccccgcccttcggcttccagctgccgcgccgtctgtccgagtcgcccgtgttcgacgcgccccccagccccccggactcgctctcggaccgcgacagctacctgagcggctcgctgagctccggcagcctcagcggctccgagtcccccagcctggaccctggccgtcgcctacccatcttcagccgcctctccatctccgacgactgaggcaagggggcgcccgcgaggggttgggaaaggcacagcgggggccaccggttggggagggcgacactgcggcagacttggaggcccctccgagcacttggactcgaactctgccggaaggggccccgcccctaccctttcggttctctcgttttttttgttttttattattatttttattattattattattgtaaagattcgttcttgttgataaaagccaacgaactttttcgtatggatgaacaaaatattcacaacagggcggttgtgatgcggaaagaacaaaagataccaaacacttaggtctcagatgagtttgaaactctagttttagaagaaaaaaatcagcccagcaccagcagctaccaaccaccattccatctcttctttcactcgaaagccttagaaacagtccagatgtgagaactcttggaaggggttccaagaccagtgtgagccagccggctgccacctccctaaactataagcttctagaactcaaaataatgccaggaacatgccttgattcgagtcgctcgctctcagcctcctttgtggtggttgtttaccttgtttttgttttttagacaaagttctgtatgtctgggggtggggaagcccttgcattccaaagtttgataacgggctcattgccaccacgtagtgtgggtgtttagcttagaaccatttcctctgctctctggaagctatgggcagagctcagttcatagttgttgggaaataagtgcttcatttttagttgttctgagttgatccgcaccactgcaccacaactcaatatgaaaaactatttaacttatttattatcttgtgaaaagtatacattgaggatgttgtccatactgtatttatcgagtatgatgaaagcaatagatatatattcttttattatgttaaattataattgccattattaatcggcaaaatgtggagtgtgttcttttcacagtaatatatgccttttgtaacttcacttggttattttattgtaaatgagtaagaaaaatcttaatttaagagattgtatgtaatatttatttcattaatttctttccttgtttacgtaaatttcgaaagatcgcatgaagaaaccatgcaatcttgatgctgtggaagtggtttgaggaacattttgaggttttcttagaatgtataatggttgtagcccatccaactttaaagagagaaaggtgagactgcagtcaggctcacgtgtggcttgcttctctacatccagctttataaaccaccagctctactgtgacattgattatagagacatgt

SEQ ID NO: 25112 - DNA, 2373 bp, Mus musculus
agaacagaagcagcatgctgaagaaaggtggctgggcctcagctcaggtctgcaagacacatacatggtggacaccaattgaaactcttttcctcaggtgcctccccacttctgggagtctaggcttctgtcccttcctactgaggaccttgtctgcagcacactcattcaaggcaacccaattagttgcagctacctaggaagtgaagctgctgtctgcaggtttactgtctccaggtgcaagccacctgcaggcctgaactagtcagttctatcccaaagccagcgcccatttccccatacactgactgcattgaattcagtcttagcttacatgtctctctctctctccctctctctctctctctctctctctcacacacacacacacacacagtgctctttctctctctctcacacacacacacacacacagtgctcttttgtttggttttgtttagcaaatacctatttggtcatatttataaacttttattccattttagtaaagggtatgtttgattctgggaatattaagaacctacaacatgcaaatacttgcattttactatctacctgcccaagtccttcagtggtccatattaagagtccccactgtcttacccagaaatgcctgcgaaggctaggaacccttgtcacccatcactggcctcagctattggacagagcctggggaaagggaagcctgagcaaatgcttaattcattcggtgccaccactgtacaccgtcctgtgattggtggagacagcagagtgccaagaaacacatttacccactttaggtgattccatatagaaaccggaagggtttgtcacttcaggcccagcccagctggcatcctcgaacaccagcaggtggcgctcttgcacacattatgctgctggtctagcgcttttagcctactcttttaaaactttttaaaactattatcagcacctgtacatgataggagggcacccatgccccagcatggatgtctgaggaagttgagggacaactttatagagccagctctctcctcccgcctctgcatgggcttcagagatcgactcaggctcaggcttgcagagcacgcacgtttatccactgagccgcatcatgtggcccagcttaccatgctacgtgtgcttccagagtacgtgacacccgcagacgcttgccttcaattcacggcgtggatgtgttgctgtagtgtgatccacattcccagttatccacaaagaccatgccagccatagaaggaacttgtagggcctatagctatgttcagatacttctcagtgagtagtcacttagaatcatgaggaaaagggagagaggcattctatatgctagctcctcctgcagagacgctgacatttcacatgtaattggtctcagaagaaaaccatcctgcaccacagaaacacggctgtgctggagtagagacctgtacgcagggagagggaagtcaggagctgtgtccttcctggccatgaagaggaacagaaatcccctgggtggtcttagaaacactcagcaccctggggtctgtgtggccctgtagtaattacctagttaggcagtgcaacccactgctgatgaaaaattgaaaacctaacattgtttagtttgttttgggctttgcttttagttttctgagtcaggcttgctatttacactaggctggcctcaaacttgtgttaatcctcctgcctttgcctcctgagtgccaggattccaggcatacaccactatacccagcattacactactttaagatctagttggtgagaggggctggtggtgacaaccttgggagattaattctgaacaggacccaaccttccctctccccttccatctaaaatgaaataaaagcagttacatgacaataaaaccatctcacattggcaggcatgctgtcccaaagcatgtttcagagcaggcttatgttatctccaagtccatcctaccaagtctgccattagctgggacttaccccagacttggatcttggctggctgtggccaatctgggaggacaggagggatggatggctccacaggtgggcttgtatctgcaatcctgctagcagtagctaggggaacgactgctgcatgctttcctgagagaaaccaggaaaaccttagtcacagcctcatgcttacatttggggtcctttcagccacagaacccagcagtaataggggcaagagcaacgtgggtgggaagagtgaagcagccatcttccctaagtcactacacttgagggtcctaagatctgggtggccccttgctcagaccacagccaaaagccagtttgctttaatatataagatggtgagggctttgttcctttataggggtat

SEQ ID NO: 25113 - DNA, 1195 bp, Mus musculus
gtactggtataaatacatataaactgtctgtaatgggaaaatgtaattatatcaatgaaatgtatttttgtcaagatatcttttctctaattgctagctagtgcagggagggttttctggttctagtgagtaatggcctagtcatgtttcctcaaagccatcagacagggagagcttcccatttcctgaaagctctggacagcacagtacagaaagtgtgactccagagagtcactggctttagaagagggttgcgtgcaggacccttgctttgccagaggcttctccttgtgcacgttaaagtgaaacaggaaaacgtgacaaaatgtggggctggagaaatgactcagcagctaagagcactggctgttcttccagaggtcctgagttcaattcccagcaaccacatggtggctcacgaccatctgtaatgggacagctacagtgtattgatataaataaaataaataaatcttaaaaaaaaagtgacaaaatgtgtttgaaagcagtgcctgccttcttcagtctgaaatcttttatgtgtaatcactttccttcagtgaactgggagagcctgatcgccaccctggcatgttcctcttactcctggtgttggagagactgtacccatcgccgatggacggcacatcatctgcgctcagcttggccccttttgttcctttcattatcaggtagtgtcatattgcagggaacttgagagaatgttctatcttgttcttatttggagaattataatcaatatattgtcttagggagccattttgtgaaagcaagagagtgaagctttctgctattgctcctgactgttctccagtgctttctgagcagttacctgtgcttagcccctgggtgtgggcgcctatggctgtgttgatagtgttttccttggagaccggctagtgggtgtgtgatgttgatcggaagtatcccttttgaaaacactgcctatggtttgtattgaacagtattgggccagccaacacaggtatgctgggcgggcttgatcctagcatgtattccctgccctgtggtttaaaagaatattaaggcacctggctctttactctgtggaagtcagagcaaccaggacctggtgtgcctgtggcaatgccacttagcccattgtcccacttaatcttctgtttcaaacttggggtgcctaaaagagatgcaa

SEQ ID NO: 25114 - DNA, 1187 bp, Mus musculus
ttattttacattaggtgagaaattcatccacacttctctttagttccttgatcacaagagtttttggcgttaagagaggaaaggatgaagtttccaaaacaaataggtaagcccagtgcaacctcaccttcacacagaagctcgggctaatgtagctgctgattcagagtcctcagtgagccaagactgtgcaggtgctccagtgggctcagccatacccaagtctgcgtccttgggcggatcagctgtgtaataagcaggtcttgggaggcagcaggagcagggctgcagggcagggctgcagggcaggagtgcagtttgactacctctgggtacataagcaaggcttctgtctgtacttgttatcttcttcaagtattgatgaaatgcccccaattactctttctagttgcacttaaaaaactcttcagcaggtcatcctgtcatgtccaggtagagacgtagccatctctgtctgtgttcagtgtatgtccctgactcctttttccttgtacgttgtatgtggacacgtggaagaatcactacgtctggctttttggagtttatgctctcagatacttttctcgacgtgatatctttagtgaacctgtgcacacattttgattatagacaatttaaatgcacggtgaagttgtatgcgtttctaaagaagagaagcaattaactagggaattgtttccactgcagaggagttgatgcttgtctaacactaggtgtcactgttgttttgtgttcagttgctcccttaccattacttaggatccagtttggttggctaagtggtctttagttttccctctcacctaaaaaggttgccatgctccaaatttaagttttaggctgattacttaaagagtgaatttttttttctttttggtttttgttttctagacagggtctctctgtgtagccttgcctgttctagacttctctctgtagaccaggcccaccttgagttcataaagacacacctgcctctgcttcctgagtgctgggattaaaggcgtgctccattattgcccagctctcagcacaccatttggatgctttgcacaccactcctaagatgacctgcgcctccagcacccacagtgtttctctgctgctgctgcttcttgttgttgttgttttttttttttttatagatttatttacttatttcatgt

SEQ ID NO: 25115 - DNA, 1134 bp, Mus musculus
tagctcccagcccaagacacacagcaaagagggcgtcttaggagctttcttgctactgtgattgaaatattttataaaaagctgcttaaggagttggggtctgtcgtggttcgtggacagagaggtcgtgacagggaaggccaggcaccaggaactgcaagtggctgcttccaaaggcagacagggaagaacagaggggtgggagtctgtgctgagctcactttctcctctgatagagtgcactcacagctggtgcgtcttctcatcccagaaagggtgcccagaggcgggcgggcgggcggctctcaggtcattcacaataggtgtgtgtgtgatagtatagtaatagggtatagtaggaaactttttagttttagtcttctcaaaataaaatgtttcttctttctaacagtgttactgtatgtcactagtgtacacgtttaccttttagtacctgatgattccaaacatttgctcgcttgtaccttttaggtgctctaatgtgagtctgcaaaagctgccagagcagtggctgcggagcgttctggaggaaattaaaggcagtgatccctcatccaaactttgtgctacaaggcgcagtgctgggattcccttctacatacaggtactcccctaagagcaggcactgctctgtctgggcttggacactgtacttctcttcttactgtgtcagtgaaagtattagatgttcctgtcttttcagtaccatagactttgtgactttgttctttttattttttattacatttagtgatttatatgtgtatacaggcatatacatgctgtggtacacaaagagatcagaggacagctttctggagttggtcgctccttccatcatttagactccagggactgaatttaggttgttaacattggtggcaagcaccattcctagctgtgccatactctgtctcctgcatgactttgttttaatgtgtggacagtatgttctgtgtcaggtctgttcttggagcaggagatcagtcttgtataaacagagagtagcatagatttccatctatgtattcagtagtcaggaatcatggagcaggagatcagtcttgtaatataaacagagggtagtatagatttccatccatgtattcagta

SEQ ID NO: 25116 - DNA, 1138 bp, Mus musculus
tttatagcagatacacactgagtacactcttcataacagataccctctctttagaacagacagctcatattgaactaaattagttatagataattggtctgttctgaacttggtatttaactcatttaaactcaatcaccgatgaggcaagtgcccttagcatctagaggaagaaaatgagactgctcattctggtgtgtcttgatgtatgtagaacactaacccagtcactgctgaggtgagcaagtttctgggtaagcagatctgagacactgtagcgcagcttccctgttttcgtactgtgagctgtggaggcacagtgaacagatacagtttatatagtctggattttctgaagtcaacagccaccaaatctgtcaccaagtaacagaaagcccagttgggctaactagctcagcagttcttttagttcagaacagcagacacaactaattcttagttgttttctttaaaattagtgggtgtgctttgtgtttcatcttacctagagcaagccggcgtgtcagttgagaattgatagtggggcattctggcagagagtccgtggcttgacttagaagggcctcagactttcaggatgcctttcactgagcttcacgtgtagccttagtctatggctagcatgtgaggtgaatggatgtggcttctcaggttaggatgggaagctctttgcacagatagtgttagcagttgctcagcagtgtgactgtgcttcctatcattgaaccatacactgcaaaatggttgaaatagtaagtttcttatgtatattttaccataataattgcaaaatatttgaagagtaaacataattatctcagaatcatgtatgtgagtttgctactttttgtgattttatgttggtgttgaatgacatgagctagaaggccatactatgaaatttgcaagtctggcataggaaaatttaatatattatatattaatataatattataaaattaatatattatattcaataaatatataaatatgctgtatcagtcatataatattaaatgagatggcatttttaaaaggcttaaggcaagtgtggtagatcacatttataatccccactgaaggtatgaaaaacaagaatttaggttattcctgatta

SEQ ID NO: 25117 - DNA, 1099 bp, Mus musculus
gtcctggaactcactctgtagaccaggctggcctcgaacttagaaatctgcctgcctctgcctcccaagtgctggcattaaaggcatgggccaccattgcctggcttagtctttattttaaaggaaataatagtctttgaacaattacagtgtttctactattcttgtgaaattgtttataacttgtctttacctgatttatttttctctaattcacatatggtgattttttttgtaaatgttaagacctcaagtaaaagtattagagaataagttataatttctttaaattagtaagataattgtgcttacttggaattattggcatgagcaattatctccagtcatttttattttagaatagcactttaattcatgttagaatttaaagtttaatgttaattggatcataaaagttgacacgtcatagtcattgcatagcacaggaatagtctctgctcttatgcttttggaacaagaatagtcttttctccttttagggtcttgtaatcacagaggagctctgggagctttgatggcgtgtctccgaacagctagagctcatggacatcttcagtctgcaactcaggcctgggagaaccttgtgtgcagtgcaagggtaaagcaaggcttaattcaccaacactgccaagtaaggaaacttttgttgcatccatagttcctaataatctgattgctttagtagcccagctagaggcccctgagttgaacctagcactgtcaggagcctgttaaggagccagtagaatgtgccatccttgtactcagtctatgcagtgtctggtggcagcatagacagcttacacaaagaacctacagctcggagacacattctacatgtgagtgtgccctggtaagctagtttatctatctgtaaggcttacgagagcctgaccagggtgcatggtgcttggctgctgtgagctgaacgtggtctgtggaggcctgcagcaaggtagcacaagaagacaagaaagccgtggagcagaagctgcgggagtgaggctttgacctgtggacctgcgaggcctcagttttatccgtgtaatgagatagttttacaggatgtgatacaagg

SEQ ID NO: 25118 - DNA, 1193 bp, Mus musculus
agagctgtaagagaagacgccaggtatcttctcctgtcctgtgtgcatgcatatgtgcactcacttgaatgccccccatacccatgaaaccatcattacagtacagataatgaacatctcattttgtaaaggtttccttatattcatttgttttttattttataaagtaaaaatattcatgtgaaatttcactttcagtttggccttatttgtaattttgtttttgttgttgtaaatgtcattaaattttttgttcattctttgtatttaaaagtcatagatggggtgggggaagggtatgggggacttttgggataacattggaaatgtaaatgaagaaaatacctaatttaaaaaaaaaaagccgtgatactactttcttttactaggcagcttctaaccatacacatcatggtccacttttcttcaggattaaggagtccacattagatatgttcctgtctagaatcctggcatcttggaccagttcagccatacagatccttgaatcaggctcctcaggcttaaagggtcatctgaacggggactcatgcgtacctaggagacttctggagtatgtctacacacactgggagcacccgttagacgctctgagacatcaaaccaaagtcatgttcaggaatctcttgcaaatgcaccggctcactatggaaggggcagatttggccactgaccccttctgtctggagttgactaagagtcttctgcagctggaatggcacattaaagggaagtacgcttgccttggctgtttggtggagactcttggaattgaacatattttggcaatagataaaaccattccatctcaaattctagaggtgatgggagaccagtcattggtaccttatgcaagtgacctcttggaaaccatgtttaaaaatcataagagccatttgaagtcccaaactgtcaccaatacctggatggacaagtggcatgagacttgggttttccctgtcctttctgtactgtgtggaggaaacttggatcagagatcttatgtgattgattattacctgccacggatactgaattacagccccgagagcctgcactacatggtgcacattcttcaggcatctactgatactggaactggtgagatagtttttgttttatgaatttctatttaggatacttaaatgtaagcctctgtgcagatgtttgtc

SEQ ID NO: 25119 - DNA, 1187 bp, Mus musculus
agatattgccatggacacagtgtgggtacagatatattttgaagatagaactaagatttccttacagatgggatacagaggctaggcggcaagagagtttacagtattttagagagagagatactaggaggtagtgtgggtttggagccacttataaattcatatatgttgtgatacctattagatacccaaatgtagatagtgagtaggaagttagaaatacaagtttgtaatgggagagacctggttagagccaaaattttggcaatagtaaacgtacagagtataattgaaagtttaagagctatgtgagatcagtatcaagggagagaattagatagagaactgagaactgaaccttggggcgctttgacgtagaggaggcaggctcggactctgtctctttgtcagagggtctgaagcttccggttgacccttcacaccagagagaagggggtgaggtatgagagggaggagagacatagacacgtaggtaaatggtttagggagacaacgatctagtcctatgtctggggacagagtctaggagaacgtgttgaagacaggtgggaaagagtgcgcagaaaatgtgttcacgtctgtactcgtctcattacgtcttcacgtcttttcaaacgtttctttcttttttttttttaatttatttattttatgtaagtacactgtagctgtcttcagacaccccagaagagggcgtcagatttcattacggatgaattgtgagccaccatgtggttgctgggatttgaactcaggacctctggaagttcagtcagtgctcttaactgctgagtcatttctccagcccttttcaaacatttcttttttttttttttttttttttttttttttaaatatttatttatttattatatgtaagtacactgtagctgtcctcagacactccagaagagggagtcagatcttgttatggatggttgtgagccaccatgtggttgctgggatttgaactcctgaccttcggaagagcagtcgggtgctcttacccactgagccatctcaccagccctcaaacatttcttatctttgccctaaaatagggaataaggttagtgtgggtaaggaaaaagggcctatacaggtaagaggattagaagtttacaattagtgtctgtgtaactggagtgcttttacaaatgggagat

SEQ ID NO: 25120 - DNA, 1182 bp, Mus musculus
catttggagtcttttttttttcctcttttatttttctatatcagccctataagtaagtgccttgtgccctccccccttttaaagtttttatttattatctttatatgagtacactgtagctgtttctaggcataccagaagagggcatcagatcctattacagatggttgtgagccatcatgtggttgctgggagttgaactcaggacctttggaagagtagtcagtgctcttaaccgctgagccatctctccagcctatcatctggagtcttaagcccttcctccaggactggtttagtcactgttccattgctgagagacaacacgaccaaggcaactcttggtcaataaaagaaagattcaattagggactggtttacagtttcggaggcttagtccaaagtcattatggcagagagtatggctgcaggtgctgtgctggagaagtagctgaaagctacatttttatccagaagcagcgaggagagagagagagagagagagagagagagagagagagagagagagagagagaacccatgcacctaggcctggcatacacttttgaaatttcaaagctcacccccagtgacacacttcctccaataaggccaacctctgaatccttctaagcctttcaaatagccactccccggtgactaagcattttagatacatgagcctgtgggggccagtcttactcaaaacatcacaatgacttaatcctcgggacatttttagattttaatagaaatagaaatgttcttccacttcaaagcagtctgcctagtgtgttccactactaccagatggtagtgatccatttgtatcatgcagtggaatattaaaacagtctgtggtgtattgtcagtgtcttccatgtggtagtatagctcagtggctgagcacttacctgggttgtccctggttctgtctctgtcatggaaaaaaggggataatgagatagatggcacatacacacgtactcactcacacacacacacatgtgttatatacatacatatacacatacacatacacatacacatacacatacacatacacatacacatacatatatacatacatacatatgtgtgtatatatatgtatatatacatacatacatatgtgtatgtatatatatgtatatgtatatatatatatatatacactcatac

SEQ ID NO: 25121 - DNA, 1185 bp, Mus musculus
gcggtggctatgctctgactgtagtagtttgtgacactgtgtgtgtctgctacctctgcagactgcttttgagtattacctctgtttaccttctaggcaccagttctgaagactttgttagaactgattcctgagttacgtgataacgataaagtatattcttgcagcatgaaaagctatggtaataaatttaatcgtgctacgttattcaagtgatgtaaatatttctaagtatagtcaactgtgagatcagctcaaaggaatattcctcaatttcagataattactcatttacttagctctagaatatgttcttaaactatagaaaagcatgaaattgttcctagagctttaacattgaaaaacgttcctgaacacctccagagtgtgccgggccgggcagactctgtgaggaagccgctcctccctcccaaggcccgccctgcagggcagaagtgcggcctcctcctgcctctgcgttccactgaggccaaggcttatctcctgcctcagctgaagtgcacagccatcgatgtccacagtcagacagtccatgcgaaggaggcagtggaaggtttgtcacagagcagatgaagtgctgatgtgtccatgtcccaccctcagacctgctcgttacactcgggtatagtggagcagcagacttagaactagtaaatcgattcttcgttcccacatggagtcttgcaatatttacaaacagcagaaatcatagatctccttatgtgagtagcaaacagtatcaaatgccttaaaaagtggacgattagggcagaggtagataaagatgcagacccaggcctgcagaatgagggcccttgcagcaggggtggccctttcacagggaagctgcctggctgagctttcgcaggtccccactcctccccttgagagagcatcagggctaagccctgctcctcacagcctcatgctctacagttgagaatgtgatcgttcatttacacggtgctttctccgctagatacaccagtgccatgaatggtgttcttcaggctccctgtgcctgcccgccctttcccttaccctcacagtgagcgcggtggaggcaggctgcgggttctgagtggccccctacgggagcttgcagttccttgtctcagatcctggagcgcctgggcagcaaagggtgcaagggaaagaagaggg

SEQ ID NO: 25122 - DNA, 1115 bp, Mus musculus
tgaacgatgctgccaacagcctcctcatcataaggcaagttaggcgggattatttgaaaggtatgtcagaatgcttgacctttacgtcacgttaatgcctctgcagaggtttcttgtaacgcccttcgaatacttggataaaggagtccatttagcaaattacctgcttatcaagagccttttgtggtagctgagagacgtaaattactgtacatgcatttataatacggcttgaatatgaatgtgctgtcatctgaccacttagtccagtttccatcccatttaacacaagatgggctttcttaagatgaatcacagctcttcagacatgcaaaattcgtgttccagagcgagggaaagtacaggctttcaagtgcgttaaaattcacagcacaagtcattttgctttggaaattaacatactttggaggtctgaaacaattcccagcagttatttcatgcatgttgtgttggttgtatatgagatagcaaatgagttaaattgagtgttaagtgtgtgagattgtgcaccaaatgattgtaatattgatttttttaaaacctaacctgatactttttaaatagttcataactccaagaacagtgaaatgcagcgattgtttagagttgcatgtcgcaagggtaacgctgaggacacaaaggtgactgagaaggactgggacatgggagctgacggtttcgtggagcctgttcgtgggttcacagtggggtagattagctctcaagggggtcagtgatgactttgaggttagggaagcagcttttcaattaactttcagggctgaattttagtcagtgtagcaacaaacgcccttaggagggagactcaggttagaagctctgctcttccgctcttaactgccgggctggtttcttccccaggctctgatgataatgcttctctgtgctttgcaattcatcatagtttgcatctacagagaggaagctggctgtgtgattgttcagccttaacagtaccttagcttgctggtcctcagctgtcttcctccccgatggcgaccgtttctctttgcagtttcagctcttcctcaggcgcgctgcataccagcagtctttctgacagttttgaattg

SEQ ID NO: 25123 - DNA, 1196 bp, Mus musculus
cttgttaggtatctgtatatttgaaaattgtatgtttttgtataagtcctgtcgtagccaaataatttgatcttctaattttagaattataggctatattcactttaatgctattgtgttgaaatgttaaccattgtaaccacccacttatagattaaagatagcttgaaagtgaatcttttgcgcccctcaatctaaattatacctctggtttatttggactttaacgcatattttgcgatttattttgcaatcttttgaatttagaagagctgattttcatttttattaggaggaacataatctgttgactcaaagcaagtataaaaaataatttggaaaagaagcccttttcttttcggtggtttgtcttgggagctgggagcacactggggcgctcactgcctgtctccaaggattggcaaccgtggacaggaatatattttgggactttttgttttgctagttcagaataatattgtctccattttttatctttttctctcttatagatgcatataatatcttccttaaagccgaaaagcaaaacgttgtatttagcagtgaaacttatagcaccttgataggcttgctgctgagtaaggacgacttcacccaagcaatgcacgtgaaggatttgtgagtatctgtttgtctgtagaaaccctcactttaaaggaatacaagctgagacgtctcagatgcccagaaaagtaacgtgaaaagttgcttaattttatgagttatttgtttaaagcaggtctcgctgttttccaggctggcctcaaacttgtagccgtcctcggcctctcgagtgctgggataacaggcatgtttgccaccatgcctggtccatgtgtgtgttttgacaccaacagtcacatttggaccctgaacctatttaatgtactctgacttgcgcattttttcagaccttatttacacttcaattaatgcctgaaaacattttcaatggtgtcttgtcggctctaacctcagtggtgtgggatgcggattaatttactttttcagaaaatcattgtggaactccatcttactgtacatagccaaggtgctctgaaataagtgatttggaaagacagggaggcagaaaacagaagagagttccatgttaaggagtacaagtagggaacttaaattgttagggaggaaaatgtaagacgtcaaaggccatt

SEQ ID NO: 25124 - DNA, 1099 bp, Mus musculus
aagagattgggtggggcgggtggaaagtgagagtgtctttaaaggtctatcccatcgacaagactgtaggacaggtctttgtttttattaattgttttgtggctaatggaggttaagttatggtgagaatttctaacactttgttactaaagctaaagcgacaaaagatataagtaagattgaatttatgaataatataccgttttgtttgtaaagtgtctggtgtgtacacacatgctatgtgctgtgtggtattttaacacagacttgtatttctacacacaggtcaggagggtgaactagagctggttgttaacatagcttagatattttctaagtttttacagtgagtagtttttgaaaattgtttttttcaaagggaaaaggatgagaaagagtggagtaggaagagtcttaggagctgaagtaaggctccttgaacagatctgtgagggagaggagagggagggagggagggagggagggagagagagagagagagagagagagagagagagagagagagagagaggttcctgtctacagaaggaaagtcttcactggcttgagggatggggaggtctgagcgtataggaccgccatccctccccctgcggtgtggagcaaatggtgctgtttaaacgtggatgagcttagggtgtagatagagggtacttaaagaagggagctcccgctttgttctgaaagggactcttgggcggggtaaattgattccagatgttagaaaccctcggggctagaataaggagatggggctaattcaaagagtaatagattctggatgtacacaaaaggattctgggtaggttatgggggcggggcagctgagaccgtgagattaatgaggatctcagggtcctgggcatagggcttttttcttgataatactcaagagtaatgacataaaaggtcatgtgaattaacagaggcttactcagaataaataaatatatataatataaataaatatatatgtgttatatataatatataaatatatatattatatatattacacctgtgattggtagacatgccttggctgtcatctgaaacttcttgctaaggtgactgatag

SEQ ID NO: 25125 - DNA, 1124 bp, Mus musculus
ttagaaaggtagcattaaagtgaggtgggggcttgtaaaatttgcctttaatattcactaacatattttcccctattttttctaattctgtactaatttgattcccaattttaggatattaaggttctggttgacagagagaaggtagattctcaaaaagtaagtagtatctgactttgttggttttttttttttttcactgcttctaatgagaattctaaatagtgtccctgcaagggatcttgtctgtctctgagatggtaaatctattcgccatcccagaagaacatgaacatctaggatgatctaggagagagttgtgaactccccccctctgcagacctgagattaatatttaatatcccttggggcatttatgacagagagagaagcaaggcactcccagggctgagtgataagggctgtatttcctttccgtagtaaacttttgttcttcccatgtagacttctcaagttacctcatctgatttggaatcaacacttgagaaactcaaagctgaaggccaacctgtaggatctgccctgaagcagctcctgctgctgctctgctcagaggaggtaaccctgacagtcctttccttttcacgcgtgcgtgctttcgcgtgctttcggggtgagacactctatagaccacagtaagtcaaaccaagtataatgtttatgaattttacactttattattatgtgtcatgcttgagaacggttcaattaaatgaaaggctaactaatttcagcgacaccttgaatgacatgttttcaggttgctgtagttttgtttatgataatctgcaaagtgaatgatagtaacagcgtgataggtttatcatacatgccaagtgtcctttcaagccatggctccggtctctcatatccagattgtcaagcaactgatccatgctggagtcatttgcaagtcaaatacaacacgcttgttaatgcagggattgaaattccatttcctgctaggaaaaagctttctgagataaagggtcccttgccttctccagcaggcctgcagctgccccttgtgttcgtgttagtgtgtctgcagtttgttctgtatcactacacttgggagtttctgcttgaataggattgttcac

SEQ ID NO: 25126 - DNA, 1099 bp, Mus musculus
ttagcataaaaataagaatatgaaagactgggccagacatgtgatgtacgcctttagccagtactctggaggttgggacaagtggattggagccagcctggtctatagtgagttccaggtgagccagagctatgtagggagaccctatctccacaacaaagaagttttatggtgggggagcccagagagtaaagtgctctcggagtcaaggtgtggtagttgtagtagaggtgctctatttttaaaaaggcttttgtgtccaaataaagtgagcatatttggttgatcataaaagccaggatagacagtcttagagggtgggaacggtccaggtaaatggtgtctcttttttccctaggatgtgggttagataaagaactgaggacacattctcactgatggagagaatcgtcagagtaaaccttgtaacttccctgaattccaagttctttatctctgccatgctgtgttttatctcacaggaataatagatatcctcaaaataatgaacaaagtgggagtggatcctgatcaggaaacatatataaactatgtgtttccgtgctttgatagtgcacagtcagttcgagctgctttgcaggtgggtacaagtacgcttttcatggctaacggaagagcatctcactcttcctggtgtttcattatcaggacagcaacattgagtggagaactgaaaacggtcttgttgtacagttgtaaggctttataaatacaccagtcagtgtgtgtagcagtgtaacgtagcataagaagaccaaagagcactttcctctgtcttgatatgactgtgtgctgtagacagaacattaagaagactcactcttcattcttgccctggaaactgttctcattaatgttcctaaacacattaatagtatatttactaccctgcacttgaaacactgcttttccgccatgcttcttggcccttccaggatagggatggcggatgagtgtcacctgaagagccgcttctggagagagggcttagcactctttataagacccagatttgacccacaggcggtagctcacacctgtctaactccggtacctggagatctgacacttttttctg

SEQ ID NO: 25127 - DNA, 1635 bp, Mus musculus
cttagtaggatgttggtgtgtaacagttgctattggattgggcagttaagtcttgtttatttagcattaatacttctaatttttcattttgattgttataaccatctttagattctggagaaagtggagaagtcagaccattacttcatggaccgcgacttcttgcaggttatttttagcttcagtaaggctggctaccctcagtatgtctcagaaatactggagaagattacctatgagagacggtctattccaggtatttcagaatgtttatctgcatgccttctattaacacgtggcttcctgtttctcccctaacagcgaggactgtgggaggtggacagtgagtacctgggtggtgcaagcaggaatggggttactcttagagatttagatttttgtggggtttgcagttcttaagttttttctttaaaagtataaacatttttgtttgtgtgtttgggtgtgcatataccacaggtcatgtgtagtctttctctgctgaaccgtgctgctggccctattttttctttagtgttgattacaatttaacagattgctcagtttagtaacaacagatatctttgttttcttcgcagatgcaatgaacctcattttgtttttagccactgagaagttagaagacactgcgttccaggttttattggcattacccctgtccaaggacgagagctccgataactttggcagtttctttttgcggcactgtgtgactctggatttggtattctgcctgtttccactttgtagattgtgtttagtgctgaagtgagactcacaggagaaaattcatgagattagaataattgtaaacaacataaaactttgtaatgttgaagatttctggatagaaaggagaaattcagattttattaccaaaaggattgactgttgaagaaagtcatgtggtcggtcaggctctgcctgttcaggctctgcccgtcggttgactcggtgtctttttttccacagccccctgagaagctgatagactactgtcggaggctgagggacgccaagctgcacagctcctcactgcagttcacgctgcactgtgctcttcaagccaataggacaggtgctgtggtcttgtagtgcagagcaacattaataagtgtctctgagctagcctggtgacgtggtctgtgatttctaacattaataagtgtgtctgagctagcctggtgacgtggtctgtgatttctaacattaataagtgtgtctgagctagcctggtgacgtggtctgtgatttctaacattaataagtgcctctgagctagcctggtgacgtggtctgtgatttctaacattaataagtgcctctgagctagcctggtgacgtggtctgtgatttctatttctgtttttttcagctttggcaaaagcagtgatggaggctttgagggaagaagggtttcctatccgaccgcactatttctggccgttgcttgctgggcatcagaaaacaaaaaatgttcaaggtgaggttgccttttatggggtcagaactagtcagagtgtttgtttgtattctttaaaagcacacttctaagaacaagatctctcgagacactggaactgtgttaaatcaggctgaagtggatttttccac

SEQ ID NO: 25128 - DNA, 1578 bp, Mus musculus
gacagaaagacagtcttttaaaaaagcaaagggagaaaacccagcagtagccgcagcccactgatgacgtcatggtctacctgcagaggttctcatttagttagattctgtcttacaagctgtatttaaaggttactgtcttggctgcagagatgctcagtagttaagagcactggctgctcttcacaggacccaggttcagttcccagcacccacatagtggctcacaactgtccatagctccagttctagggaatctacagatgtatattcaggaaaaacaccatcactgcacttaaagattaaaaaaagcagtttataaaaatgtcttaaaaacagcatcaggaaacttgtgttgttaccccagtaagtcgggtactgctgaaaatacctaagaaatgaatcggtccagaataaatggagcattgtagacaaactatggcaaataaatatgaacatttaccacccttatttttttctctttcagattcattactaaacatgggtgcatttttggataaacccaaaactgaaaagcacaatgctcacggtgctgggaatggtctgcgttatggcctgagcagtatgcaaggatggagagtagaaatggaagatgcacacacagctgttgtgggtattcctcacggcttggacaactggtcgttttttgcagtttatgacggtcatgctggatcccgagtggcaaattactgttcaacacatctattagaacacatcaccaccaatgaagacttcagggcagctgacaaatcaggctctgctctcgagccttcagtagaaagtgtgaagactggtatcaggactggctttttgaaaattgatgaatatatgcgtaacttctcagacctgaggaacgggatggacaggagcggctcgactgcagtgggcgtgatggtctcccctacacacatgtacttcatcaactgtggtgactctcgagctgttctgtgtaggaacggacaggtctgcttttctacccaggatcacaaaccttgtaatccagtggagaaggagcgcatccaaaacgcaggaggcagtgtgatgatccagcgtgtgaacggctcactagcagtgtctcgggctctgggggactatgactacaagtgtgtggatggcaagggccctacagagcagcttgtttctccagagcctgaggtttatgagattgtgagagcagaagaggatgagtttgtcgtcttggcctgtgatgggatctgggatgtgatgagcaatgaggagctctgtgagtttgttaagtctaggcttgaggtgtcggacgacctggagaatgtgtgcaattgggtagtggacacttgtttacataaggtatgtacgctcttgttgttgtttgaactaacactattgattttcaaaagacatggtaagtacttttttctaaagcaaacttagaattttataatttttactgttttctggagaaaactctgtattctcagatatcttcttcatggacgttaaccctttttactaacttaatctgccccaaccttctaatttgaaaattaagtgataacaaatatcttaaacgtattgagc

SEQ ID NO: 25129 - DNA, 1147 bp, Mus musculus
gactctgatagggatcattagtcaggggtttgcagatccccagaaagtcttgaaagtgtttgcatatgtatacattctttattaataaatatgtctctggtttttatcagtttctcaaaggagccagagtccccctactccgcaagaataattgcctaaaggattcttccttataacgtgtaaagtaccccttcttaaagtacctggctctacagtgataccctcccttctgctaacatgctggttgcgagattgggcttagtctgatttattttgagtatagcgtcagtacccacagcagtcagtaccaaagctctgcttactggagagatgtatgcagctggctggcagatacaaagccccttgagtaggacaaagtcttcattatttctgatcgtctacatttctttaacctgaaagggtgaatttggatggatggcttaattcatagtgtttaccacacagacctgagcacctaagtttgatctatgggaaatacataaaaatagggtggagatgggacccgaggatccctggaatgtactaactagccagtcagtgggctccacgtttacagaaagattcacagctacagggcagagtgagtgaggaagacactagaattgactctatctacatgcacgaacagagaggggggggagggaggggcgggacgggggggggggagaagactctaaaataatgagataattggtagcaaagtgattgccacacaatccacaatatccttctaaaaacccaggtagagtgatgtgtgcttttaatcttagcactggggagctggagatgagtggggctcactggccagccagcctagtctagccgtcagcctcagatgcaggtgacagtcctttctcaaagtgacatcatgtgagcagtgacacaagaagctgacctctctgacttgcacgcatctacaacaacaaaaaggttgctgggctgaagagagagttcagctgttacaggtgaggcagaagactgctgattgagatacaagtctgtatttgtattttgtgtatattgttatgtgaggttttacttatttgtgtaggtctgtgcaggtctgtgcagttatgtatgcatatgtgtacacactgtaggtccacggatgttggtaactttgatc

SEQ ID NO: 25130 - DNA, 1116 bp, Mus musculus
acatataaaaatttaaatcatgggtgttttgcatatgtgcctttgtatcacatgcatacctggtatccgtggaggcttgggactggagcttcagatagttgtaagccactatgttgatcctaggaattgaaccctggttctttggcttaacagccatttctcttttaactgctgagctctctctccagcctcttaaacatcactgtaaataagtgtctaaatccattagaaatttctcatgcaaaactactcatgtaccataatgcattcaatggcacattcagattgatgttggtgacaggtgggcatatttctgaactctgctcctcattaacacaaaggacagagctcttgttacagtattactcaagagggtgcctgtaaagatgaaatgaccctgtaaagttcctagcacagtccttggtttcccctcctgagagttatgcaggatatggataagtaggtgaaaatgtgtgtcctagttagaaaggctgggaggcctgcaaggtggaggtccttattatatatactaggtacagcgtaggtgatctgacaagaagcacagaaagggcgcccatgtgttaaaatgggctgcatggtgcagggatttgtgtgtaaggctgtgtgatgggtacgtgtgaaggagcacctgtggaagactgtctggagttcagtttgtcagtttaattcatcagtatgcattgtgagagctttctctgctaacaagcttaagtagatgtcattttagaaacccatggactttctagtatttagtatttaaaatattgtatttatctagagatgattttgttaaatattgtatcttaaggcaaaaataattttattttcaaaagtttttaaatctccaaaagaatccagtctaagttttcgtagttttacatttgtatcttttctcctaccagttagagatgaagtaactaacactgtgatcactgctcaacattctaccctttgcctcgctttaaaacactagatcactttagccagcaagttttttgggtttgtttgtttgtttgtttgtttgttttttcgagacagggtttctctgtgtagccctggctgtcctggaactcatttgtagaccaggctggcctc

SEQ ID NO: 25131 - DNA, 1136 bp, Mus musculus
gggaaactaccgacagctgctggaggagatgctgactagttacaggctagctaaagtagagggagaagagagcccggctgacccagcggctgcagctgcttcttcgaacagtgatggtggaaacccagtggcaatgcaggagagagacactgagggtggtcctgctggcctagacagccgtaatgaagatgcagggacaaagaggagtgctgaaaatatatgaccttttttgagtaatatctttgtgatcttgatttgacagtttttacttaggaagtatactgtgtgcttttatataaccattttgttatttgaatcttgaaaaactagttttcttatattcctatagtcttggtttttttaaaggcctttgcatacacctttatgatagtttaagattgactatttatagtactttgaatttaatgaacttatatgtcatttcacattgtatgcagaaaacaggttgtcgttattaaactcagtagtttaattcttagtagttagggttagagattactggttggaaagacaactatacattgtgagaagaaaccttgttgtgtagaattgttgtgtagaattgacactgcttattttccatcctcatacctttgcatagtcagctttgtaatccatttgtgtctacttactgttttagttcttccaaggatggctagagctggcctataactttcttttagagttgataatctgtctgttttaatttgtttatattttacatttctgtagttttatttttagaatttattgagatgtgtggttatctttcctttctctgtattctttatgaaaatttttaaagaactctgtacttttcctacagctttcatttgtatattctgtatagcctatttacacatcacaatgtatgtctcccgcgtgcttagactggaacgatgcgtgtagtaaataaagcctgtgctgtggcctcgcctgcgcatttgtactctctcagtttccacttatttcacagtcagctttggggcactggaaaactcaataaaggtcatttatgtcctggtaaatttggcacactttggctcagctgttttttatcaacaaaagagaaaacattttaattaaaagtatatattaaagtcttgcttactcaa

SEQ ID NO: 25132 - DNA, 1117 bp, Mus musculus
gctgaacatgaagagtaaaatatttatcaaaaagaagttactggagtttggagaagtaatgaatgtatccatttgtacatggttcacatgttgtggatgctctgtaaacattttcccatgttttaattgtttttcagcaggttgtgatgcccttttgtgtagttaaaacaggagtcattatctggtcccatgtgaaatggaatttatggtattttctgtatcattttgctgaggctgtttctggggagccacacatttgaatgcagacagctttcctgatcacttgatttcttgtgcacctgatttttgctctaaaaggaattactgccacaatatattttatttattctctagattttagtcttgtaagttacagtgcttcacatgatggtggtaaagctacttgtcccttcactgggggttgggggttgttaaaagatggggaatgaagaatgccactgggtcactgttaacctgtcccctggtgagactgtactgatagtccctgtccgggatggtcttctgatgtctcctacaatgcggtgagcagaaccgacttgttacctgaataaagaatcgatttgaaaacggtgtgacatattactctttggtgtgattttcaagaataaagacgcaacattggttgtggttgaaacatgtatcattggcatacttgtggaaacattggtacgatcatagatgaattctagctctaaaagaggctgggtcagccggaccacataggacacgactagttaacctctccgccgctctaaaacctcctgttgagaaaaacgcctcttgagtggttagtggacgttgaagtggcaatactgtgtttataacctagaaagagaaacccacggttaatgtttctttgctccggtgacctttgctgtccagtttcttgtaaaatttgaactcaggacccatttttaattttaaattttaaatatcccaaagaactttttgcttttgtggattatattgctatctgtataggaatttaaagcaggtatttttgtctgtaactttaaaacaccacactagcagaaataacacactagtttatgaaaaataatttcttaagtataaacaacaataacaaacacaaaac

SEQ ID NO: 25133 - DNA, 2236 bp, Mus musculus
gcaatttccacaactccactttaaagaaaaggatagcattcttcatatttaaatgctttagtattttggcataatcttttaaacactttaaaaacagtgcattcgtgctacagaaatatctaagaattgatgccattcatgagtctgctcagccctgtgcgtacgtgatgttctgggtggccatctcttagggagcttccttcctaacacgagctatagaggatgtccagtgcactggagtagcacgcccgactggaaacaaagcatctgtctctgaaagcggcctgctgatggaggggagccttcgtgctgtgctccaagaccaggccctctcccttctccagagaaatggcacgggtgtcaacagcactgcctttggaggctgagttggtacttaaccttattctcagctctggaggaagatctgaaatgatcccctgtagatttagcacagttgatgattctccaaaattcagaaccacgaggaagacgttatctatgccgtccagctctcttgtgtacaccacagagtgactgtcgtctctcaagaggcaaaaccagccccggctgaggaccagctctgtggcatggagtagactcagatcctgatacagcctcagtgctgagctcggctgggtcttttggacctgtttttaaaaagaatattgacataaatgtttgattttaagaattatccacaccccccccaaaaaaatcccttgcttctgtttgccctttacactgtccaagtaagtaaataactgcccaattataaagcatttataaatagttggtcctaaagtcaattacaaattccaattttcttcgtgtctgcgaatcacttcagtatgcactgtgcacccacatcttagagctgcagaagcccagcctgactccgctcgggtcatttaacttggaagaaatgaagtcactgctgtgctctaacttccagatgcctggaagcaaaaagccaccatcataggggacttgggcttggtcctcatctgtaggttgacctgaagggcactattgtgcagatgcggattctcagatcgctgaggatagaaagaacactgcacgctgcagagtctgaggtgcaagttagcaaggctacatttgcttgctttctgctggccgtaaaagatagcttttgtccactaaagatgtgggtgtattttacagctacacaagcgtatctgatgtgatgctgcctgcctttcctcataagcatctctgatacctcattcccccaggtgtcattgtctggcacacaactctaaacgggcccaccttccttctgttccctgccaagtgagcactcgcccgcccatctagtatgctcatctcagacattctcattcccctcccttttacagtatttatctaagatagattatcagacagataattcccgtgtcaaaagggtatgcacattcaatacataatgctaaattattcgtagctgttgccaaatcaacagtaatgttcgctcatgacacccttgccagccgtgtctcgggcggggcagttgttgccattgttactgtagttcttttccggtagatgcttaataatgtgtattgaatgactatctcatggatgtttaatgatgtccgttctgttatcaggcacgaagtgttcctggtctgtgtgtgtggctgtccgtgttgtcgctctctcagtagcttagatgacacatgagaagcagcatggtgccgctcgcacgagggcccagggcgctgtccttctcatctctcacgtgaactctctctgtaatcgtgggcttgtctctttctcttcgcatttctcaaagtacttgtttgatatatcttgaagcttcagttaacatgcataaagatttgtggggtttggtggactcttcaatgcttttcactgtttgaaaactgcatttctctcatatactgctttcatattgaattctatttagtctgctattaaatatttccaagcctacttctttctgaaagtcttttttctctaggaaatacatgcacataaacttcagttgcaagaagaatatattcaaggcaatcatgaaatgactaggtatcatgaaatggtaaccccaagctactgcaagcatctgtaggcatgtttacatatggggccatggaccatcaagtgttgtatttatatatgttaaaagtgttctccatggtggcgcatgcctttaatcccagcacttgggaggcagaggcactcaaatctctgagtt

SEQ ID NO: 25134 - DNA, 1177 bp, Mus musculus
ccccgaggaccaccttcatcccctgacacacctgcagcatcatagttccgggccctgtgccatcatcaggctgagttggagctaagggggagggcatcattaagtttggggtgatgcttgcaattcagagtgagcagtgcctttctgctcttttggaaacgtcatttaggggatttcaacaattctcctgaacctcgactccggtactgtgcttgaatttttcttttggatgcacgcccaacgataaatgatccacaatgatctgaggacggctctcccatccaagaacttaatcagattaatgatgtatttgttttataaaaatgaagtacattaagcctgagaatgcctaatttacatacgaaatggttgctagggacccaaaatactagtggtttttacaaaacagaggttacagaattgactattgtcttgaaatctggtagtaaatagcagtgaaatgcaaaataataaacaaatgttaattggaagtatttgtgtatgtaaattcatcagatggcgtactgttgttcaaaagaacctaacgatgcacatggacgcccccgagacaacattactgaagttggagatgacggtaaacttatttgccgtgttttctagctgatttgacctcaaatcaggctttacatcccactgtcctattttctcttgagatcctaggttagtatatgcaaatataaacaggaaattagcagtttaggtatctgccattttcccgggaaagagcttgatataaaaagaggaaggagagctttcatgaaactgctgaagtttcccaactacacaaacgagaaggacgaatagccttcctggatggcctcttgagttttcacacacacacacacacacacacacacacacacacacacacacaaactggctacagtcattcaacaatctggtcagttaggcaaaaatcacaactcaaaggagcagcttctcacttcaggtatcaaaagggagcgctggagacaaagaaaagccagtcaaggccttagctaggagctagcaggcaactcacagagggaggagccacgtgccctcccctaccacctgacaggacacaccgccctctgccaaggccagtgtgagaacagagagacccaaagctgctgagagttccatctgtagtcacacatatagtatcccggtttca

SEQ ID NO: 25135 - DNA, 1146 bp, Mus musculus
agtggtcagcagaaaaaagagatttttgcttcgagtcctaaatagttcacaattctcttagtagaaagccttccctgccaggctcttcagaactatgaagcagacaccttggacacaccattccaaacttttgtgaggttttagttctcaacttctgctcttcctaaccatttgaaaacttttttttttgagtctaaccaacttgacagtgcaggagtcttgttctctttgtttcagtgtgtggatgggtgggaggggagtgctttgattgctaactgtggctgccttctgttgttctccaggtgacccccctccagccccccacacagggggagttgatggggatgtttttttgaccacttgatttacctgctcccattgacttcatgcttttgaagagtgactaagcttttgacaactctttctttgctaattcacagaagaacaaggcttcagggagaaaaaaaatgtacttgatgtttaagaggcaactaaatttctttgctgtttgttttttggacttgtattaaagaaaattgtgaaattgtaatgactaagtgcatatttttgaaggttttcactttgtttactgccttcataaaaacaaaacaaaacaaaacaaaaaaaatcaacaccagccaaaaccaagcaagccagttactgttaaccctgattcgtttttttttactcttcaagtgacattacttttaactggctacatttggataataaaagccatggattttaaaccacttagtaatttggtttcatttttaacacaaataacaccttttcatccattttatataaacttcaaacaacatatgttttaacttactgccaaataagaagaaatgtgttacattaaagtgcatgttgtttgcttgcgcatttggaaataccattcattttatagcaattttgagttatttttctgtcactttgtattcctattcaaagagacacacagaaaccctcactcaaaacaactcccttagggtttcctcctggatgtcaggaggcatgaggagaggcgaggaggtacagtacaccacaggcttaggtcatggaagtgccaagtcctggtgacttgcatttagtattgtcctttgaattgtgtctgcctgaaactctgtgaggagtatt

SEQ ID NO: 25136 - DNA, 1156 bp, Mus musculus
taaatccatttgatccataacttctgatagcttccatgtgtctctgtttagtttgtgtttccatgatctgtccattgctgagagtggggtgttgaagtctcccaagattattgtgtgaggtgcaatgtgtgctttgaactttagtaaagtttcttttatgaatgtgggtgcccttgcatttggagcatagatgttcagaactgagagttcatcttgatagatttttcctttgatgagtatgaagtgtccttccttatcctttttgatagcttttggttaaaagttgattttttttttgatattagaatggctattacagcctttcatacttgggcctggcagaatggctcccgcaaagaagggtggcgagaagaagaagggctgttctgccatcaacgaggtggtgacccgagaatacaccatcaacattcacaagcgcatccatggagtgggcttcaagaagcatgctcctcgggcactcaaagaaattcggaagtttgccatgaaggaaatggggacaccagatgtgcgcattgacaccaggctcaataaagccgtctgggccaagggaataaggaacgttccatatcgcatccaagtacgcttgcagaaaacgtaatgaggatgaggattccccaaacaagctctacacgctggtaacttacgtgcctgttaccacattcaaaaatctacagacggtcaatgtggatgagaactaacctgctcatgtcaaataacgttgcagaactgcaaaaaaaaaaaaaaaaaaaaaaaaaagaaaaaaagaatggctattacagcttgtttcttgagaccatttgcttggaaaattgttttccagacctttactttgaggtagtgtctgtctttgacactgaagtgcatttcctgtatgtagcaaaatgctggattctgtttatgtatccagtctttattttatgtctttttattggggaattgagtccattgatgttaagagatattaaggaatagtgattgttgcttcctgttatttttttatgttatttttatgtttgtatggctatctttttgggggggtgttgaaagaagattaatttcttgttttttctagggtgtagtttccctccttgtgttgacgttttccatctactatcctttgtaggcctggatttgt

SEQ ID NO: 25137 - DNA, 1197 bp, Mus musculus
gtacactcataacagtgtctggataaaacagagacatggttatatgaggcctgattctgtaccaactcttaggaactatggcgttgccaaatgacagggggtaggggatgtggagtggaacgcagacaaagacattgagattactgaactaaataacactggaagaggctgctgtgctgccatgccttgtcattcttgtttgtggtttatatttgtaatcatctgctaggctttaatttgacttgcaaatcttcaaggctctttctcgtgattgtacatatttaacttaaaatttgtatctgatggagcagttgtagaagacaggtatgaagatgtagacagtttgctttggaattgtttgtggtgttatatttctgtggtgagcagaagtagacccagtgtgactcagggtcaggatgtttcatccctgaagattgactacacaaaataccttctgttcttttttctgagaagagaatttggatgaatgaaaatcttaagtactttttgtgttgtcccccttcccctctatttctaaagagccaaactgacatcagatgcagagaagcaatcagtaatgatgtttggacagaacctccgccagctccttttaacaagtcctgtgccaggccgcaccctgatgggagtagatcctggctacaaacatggatgcaaactagccatcatttctcctactagtaagttcttcaacttttcatatgagagctttttggttgatcctaaattccacttcatagatattgttgtttagaaattgttttctcacggggctgtggggatgagagggcttcctgtatgtctggtcagaactctcatcatgtctctgatcccctctctccattagctagtgttagtgtcaggctgaactcctggtctcctctttccttctcttctgtttttctcctctctcctctccctctcccgctccccttcgcttcctttctttcttgacacagtttcttgtagtcaggctacctttggtgctcttggtggctgagaaccctgaactcaggatttcttctgtctctcctgaaatttggctctgtaggcctgtgttagcgcatctgtgtacgtagtgcctagctcttcaagcccaggcaagtattctccagttgcgctctatagaacccctggtgctgagacttgaactcatagctcttatcaacttcaactctt

SEQ ID NO: 25138 - DNA, 1172 bp, Mus musculus
caaccgcccccaaaagtcagctgaggtctgatatgtgatatggtagaaagctcccaaaaggaggccatgcctccatctccctgatgcaggcttctggggtgttctgatgccattaacggacaggggtcagacaccaagtgcctctgtctaggccttcgttttcatgtctggcaggtgactgttctgtgcccttcaattgaacaaggctgcacagatgtaaactgccacagaggaagggcacattgctgctatgattcctgtgtacgaatgtttctggcgtgctcacacctggtagtgacatgaactgattgacacttgcagcctgcaaatacggtcctgcaacctgaggcaccaagggagaagtcagctaggaagcccgtgaggccttaagttgttgaatgaagtcatgctgcacagggtggggggtgggggtgaccgtgctgcaggatagaggtgagtcacagtgcaagactgttggggagtcaccttgaatctgagccaaaaaagcagaaatattgggactcgtttatcagccttctatcaggtacatcaagttctggatggccacccactggccagcgacatgatgtggacggctctgctctaccgccctgggaaggctctctgctggctcttgccccgctgagcaaagtccgcttgttcgctggagttcacacagactccttgccaggcctgcccagaatcctgtctcctctgacttcctgtgttcttgcataatatttccttgcctcttgaatggctggccccagtgcgggggcagctcactggctctgctggattgagagtaggatgtggagggaggatgggtgatatttggatctaatccgtgggtgctccgcgtcctggtggcagagcccctcaaactttttgatggaagctttcagccagaagggagtgagagagcattgcagactgtatacacacactcgctcgtgcacatgctccctggcttcttatattcatgaatcatctccctgggaaaattgttgaagtagttcaattgttttcttctggtcataaaaatatgaattattcccatatagtcactgtataagaagcctaaaagtaaaataaatatatatatatatataaataaaaaacaaaaaaatgtattattgaaagataagttccattaacagtgaatatagttt

SEQ ID NO: 25139 - DNA, 2168 bp, Mus musculus
acacacacccctacacacatatacacacatgcacgtatgcgtgcacacacacacacacacacacacacacacacacacacccctacacacacacacacacacacacatatacacacacacacacacacacacacacacccctacacacatatacacacatgcacgtatgcgtgcacacacacacacacacacacacacacccctacacacatatacacacatgcacgtatgcgtgcacacacacacacacacacacacatctaatcaccatattgtaaaattttgtgtttttaaagccaactctttgctccggttttttcatacgacttagtatggggcaaaaaagcaatgtgaagaatcaactctagggttacctgtgaagccacgcggtggtgttcgaagctgtctggtaatgcccccatctctccccgggtccagtggatttttttaactattattcaaaagcaaaactgagttttgttttgtttggttttttaagaagaatttatatccgggtttagtgtttatcatatatatgggtactctgtaatatctaaaagcttagaaatgggatcttgctcacaagaatcacttttaagatcttttagggctgttaattttatttttctcagtgttctggacactgtagacctgtgcagtactcccacaggcctgactaaccgccacagatctctctttctttctctctggtgactttttgcttttgtgatatggcagcggtgtgacagtcccaggagagaagtcattaagggggaacattgcaagctatcttttcgtgttctcagtgtattatgtacgtgtgtgctgttgccgctatgagggctcggggcttgcaggctctgagggcatgtcgcaggcgagctggaaggaagcgctctcactttttttcaggcaatgttgctagcccttctagcacactgagctacgagactgccaatctctctcctgcggcacgtttgggttggcacagctaccatgaaatgtttttaatgggaattcataaagcaagttaggattcacaaatgtagtgacctagtccttggagctaaactgggagtgggtgccaggtggagggtagcaggtctgaccagccctacaccctgccacagatcacagcttgccgggcaaatgaccctgcgaagccacggtgcagcgccccctgctggcgagcagcgggcagacctccaaggacagcctctagctgaggtctcagtcacatgaagtgtgacactgaacaggtagaaagcactgaaaatcgtgttccaagagcactttgtaactcactgagggggaggggaagcaccttttgggtttgcgataccaatcaacataaggtgttgttgactcgggtacaataaaactctcaacacacacaaagcccatcaggcaagagtacagtaagcctaaggggacttgctgctcaaaccaaaaattaactctgaaggtcagtctacctgacattacctaggcatggtgttgtccaagctgcgcatcggtgcacagtgtggcctggcacacacgcaggcgggcgacggaacttgaagggttattgacatgcaaatgctggtgtttgatttcctgtgttgttgcctcagcgttaagggcatttccgtttgcagttctactaaagacactctgagaaatattccgagtttcgtattaacctttcctgtccatgtaacaacttcatgaccattactgcattgtcaaattcctactgacgacattataactgtacgggagcttaactttataaggaaatgtattttgacactgatatcttattaaagtattctgatcctatcctgctcgtgcctcttgttttctgtgcatttaccgtggactgtgccgttggaaaaatagggttcttactcaagagcacacagaaatggactttggagctaaactagaccagcctgagaccaccccacaggaagtccaatgaaggaaggcgtttgtgcctgacagttgcctgagcccaggagctggtcgctatcttctgcatttctgtagctactatgtgtctagccaaggccctttccttgcatgctgggaaagaagggaagaaaccatgggctctcacttcagagacccacacgaggcactgaggtccaaggagaagggcaccctgggccaagggcatcact

SEQ ID NO: 25140 - DNA, 1287 bp, Mus musculus
acatgtatgtggagctcacctaggcattaggcatgtgtgctcacaaggcacaagagggcaccatgtctttctttcttactataccttttgaggtagggtgtctccctgaacctgagatgcctttttctcagttgggctagaagccagcaaaccaaggttcctcctgtctgcaccccacttggatctgaaattatgggcatttgtgagagtgtggatgctggactccaaactctggtttatatgattacagagcaagtgcacttatccggggagccgcctccctgtcccactgagtgaccttttaggcgttagattgacctaaataaaccaggcagttgcactgcttgctcacacacgttttcttgtgtttcaggcatctgtgcgatgtgtggcaaaaaggttttggataccaaaaactacaagcagacttccgtgtagatatattgatgaagatcctgactctctaggattgtactttgtgcttcaactattcaaggcatagcatgaatggacgtccatcttacaaaataacctgtgtgaagatgaatgattcggcctgaagcagggaagttgatcagtattgatttgtctgctctcacaaagttctgaacagcaatgatacgcccagttttctgccttaagtggttgttttccttgtgagcattgtactgaactagataagagacaaaattaatgaataaggtgttcctgacttctgtacgcactgtctactcaacattatccatatgattcttacctgatccatgcatttatttatagttactgcaaatgtgaaattactgatcctttgctctgaacttgacatccagacctcagatttctcatttattcacaaatgtcacagttcttagaatgagcagcaccttagttaagtgcattttcatgagctataaattattgcagagtggttccttagtgaccagtcctgccgaaagtctaagacaagttgcatattttacttaaatttgctgttaacactaaagtccaacatgtgactgagagccatggggcccaactgtccaggcactgaagttcagagatgtgcattccgtcagcattatcttaaattcaaatgaggataagtttcttctgtttcggaatgctctttgaagcaagaaacaagtctttccttaacatccctccacccccgctgccactccctcagaaataaagcaagcaccctggcctgttgtgtcttcaatgatgtcactgtagactgctaggagattatttttgaggtttcaaatgaaagtttttcttgttgcc

SEQ ID NO: 25141 - DNA, 1906 bp, Mus musculus
gctggcatatgtagtttctcacttggagttttataaattgaccctgcctggcctgagtctggattcctagaagtggcacattctccctcgagggctcctagataagtgacccttgtaggcgtttgctaatgccctccgtaattctgcccctcaccgtcttgtgtacctctcggtaggaggggagtgagcaggcgccagtcatgagcgaggatgagctcgtcagcatcatagatggtgtcctgagggacgatgacaagaacaacgacggctacatcgactacgctgagtttgcaaagtcactgcagtagaccgttggctctttcctttgtgcacatgtgacccttgctaatgtgatggatgtgtctggtaatgcgaaacaacttatttccgtctactgctcagcactttggtaagagcctgtggcagtctgtaagagtggggtgaggaagaagccacatgactgtggagagaagtgggacaggcctcagtccctagaggtgtgtttaagcttgttgggcaagagctggatgcggatcttcggaagggcggtgggtatcccgagttctcaggaatccgactgtagaatgccactctgacttcttgatgttaatccatgctacctaaagtaaagacaggctgcttggccaagtggacacacttgagaaacagtggagggagagtgtgaaagccacacgcttgccctggttggtcctgtctttaggcagatgtggtcagtattctgttccccaggcatacagcatcatatattaaagccacagcagaagaggaatgtcgcccactgaggccacccagatgcagagtctaggattccttgcccactggccttttggaaatgaagcaccactggcctgaataattagccttttccagatcttcagtatcttccacaactactgccataccctgtgttgtatcatttgaccaggagggaaaccttgaattggggtgtgttctctaatcactttccactgtctgagctttcctgacccctgtattgtatccttgctcccagggctcccttcatggcttgtgaactgttaacttggtatctcaggttaaactgtcagctggtctagcctgagcgaggcctgagaccatcagtcactaagagcagtggctaacctcatcgaagttggaaggaatgtttttaaaattacctcttcgagcctgaatacaaagaataaaagaataaaagaattcttttaatttcagggaagatcagaaaagaaagcctaaagccctttagcgttgtgaacctcagtagtagctgaaagagaagctgccacaggttgtacttgctctgtgagatgttgtagacattccgtaagagaatccagaatgatagcaggatcaggaaagaaatggagccaaatctgctctaaggtgaatagagacttatttttctttattaaagtattcttgtaagacagttttctgtgtcaagtatttgtgaaatcagagctgacatgtaagctattcttgtaatatctcattattttgaaagatttatataatgaactctggctatctgacaataaaatggatgaaaaagcaagcagctgttgacgttgactctgtcccccatgaagcctcctgccgcatggaggctggatcagtgccagcattcacacctgccttcctcccagaagctgtgaggtagctcaccaggccctgggccgttctgtcttgcacaggggattctgtgttcagcttctctttcctttttagcgtggtttgtatccttccgaatgaactcgcttttgaatcttccttctccggctggattctggttgtgacagttctctctcgggtgggcaaacacactgtttccccttgagtctgctaacttactgattatagatcacattattggagtgctccgtgg

SEQ ID NO: 25142 - DNA, 1143 bp, Mus musculus
gacacggaccctggctggcctggaagcacgcgggtctcaggcgttactccatctgcctctggctcccccaccttcctcggggcagacccacaggtcctgttgtctcgacagggttggctagtttgagcctaggaggttaggtagacaagggatgctcgtttgtctcgttttccctttctgggacatggcacctccatccacacatatgcccaaaccagaggcctgggcgtcactcttacctacactcatcaaatacattgaacctattcaaaactctcacttttccagacaccttgccttagcaatcagctctcttttctgctcctttaatattgattgaccctcctcaacgtgtccagtacaggggaggtagagacacgctcagccaccctgccccattcccaggtccttctgtggattctcattgcccttccaagctcttctttccttcctgcaatgcctgttgtgactcactcactgtctttgtactttactcaagacctgcccctcctcatctgaatattctggattggacttaagtcatgtttaggtgttcactgccatatggaggggcgtgctttgctttgggttgaaatatttcttctcatgctttctgtggatgggggtgtgtgtgatacccctggagtgcctctttagtgacctgtgttttgctgtcgagaggcgtctgactgttctcacagccttcacagctctgctctccctatgtaactaggctcttagttaaatgttagttataagggtagcatggcattcctttggaatcccccagtgaacaaatggaccagactattaaacaccagcctattcaggacaagttttcaacctcagcccatgtgggggctttctgtaacccagaaacttgctggttacttggacttcaagagcatggagatgactacaactaggaagcactagtcagttggccttggctccgtgtaacaggatgtctggggtgttgtcaaatgtgattgctttgaatgtaaattcccaactaagagcctctgaaggctgccaacagctgctaggaggaaagcccactccctgataggaataatggcccagtgggaaggaagggtgggcaggagtgctgcaaagggagagctcagccttaggccagggcct

SEQ ID NO: 25143 - DNA, 1132 bp, Mus musculus
gatgcttcctctcacactggcttcactctcacggtcctgcttggaaatggattgggcagcccctcactcccttgtggtgtgagccagccccctcactcccttgtggtgtgagccagccccctcactcccttgtggtgtgagtgagccccactgctctgcccagctgcactccccaggacgtgccctgttctccttacaggcagatggagaggtttgggctttgagattgatgcccaccactcccctgcccccacttccccaccccctcccaccccctacctcaggaggagccccatgagtgagaacttttctatgtgcaaggagatagctttcagcaggttcttaaagggacggagaccccagaaccgtggtgatggtggaagtgggtgtttgcctttgtgcatcctgactgtcctcactccctggtgcttttcttcccctccctgccccacccccacgccacccccacccccacagtgttcttgtggagctgcctggaaaatagtgtctctgcttctgcaggaagagccttaagggggcagcctatgccatgagaactgctcactgacagagactgcacccggggagctgcagaagctgctctagggtgtgagaccctgtacagtattgttccctgttactacagtgcgctgttctgcagagcacgagggaatgggggtgatctaccccgtggagacctccctcactcggtttgctcaattagtgggatccaatgacgtggagaagtccgtctttatcagctctgctttgatctgaactggccctaaaaggctacaaaactaacagataggaattccctttgccaataaattaaaactgttccccacagatgaaaccctggggtacagaaacccatggattatcaggaaatgtcattgaatccattacaggtcagggatcactgaaaaatgtcactgcttttcggctgcgtgtcccgcttccccagctggccccgtgctaagagcaggccgtatgggactccagctgttgctagcaactaattaaaccaccagtccagtaaatattgctcagcaaaacaacagaccaacctgccacggcctggcctcatcagccccagcaaagtgtattctcaggcctgtgacatggcttg

SEQ ID NO: 25144 - DNA, 2075 bp, Mus musculus
gaatagatgacaagtgagcacttccactggcttccatgccacttctcctcccacactccacaccctgcaggcccagctgggcctaagctcctgactgaagctggggggacaagatttgcatccaaggcaaacgcctcgcctcccccagagactgccggttgctgggcacctcttagataaaaggtgtgtctgggagccaagccccttccttggcttcccccaccaccccgggtttcctggtttgggatgaaccaatcttgagtttgtgtaccacagagatgagtgccttgggagacaaactggcttgaatctcagcgacttcacagagctgtgagcagacgtgccggagagccccggatacatttccccatccgatctcagggcagtgcaaagcttgaagccttgcccaggacagccacagcttgaggtcccagatacaaagagggacagtgggctcctgggctcttgtcagcctgaattggccctgttgatgcctggtgtttcctttatggggaggttgcctagaggctacatgtgatttctctgtaccaccaagtgccttttggactcatgtcggccaggcctctaaacaccgtcccccgtcttccattttcactcactgtcatctccctggagacacgccccagtcagtagactccgtgggccctgagccggtggcctccaggatacgccttggaatacaaaacagggttctgacgtagccattcctggtaccttgagtacacagtccctcaagtctttggacccgcccacttgggtgaatgacatccaagtgaccatttataggcctcagcccagtacacctcatcacccactgcccagttttcatcttaggctttgctgagtgaccccaaagccccagcttggccttttgtgctcccctgcctagattcccacagcggccatgcttgaggaacctgacagcctgcctcacctttctgtgcccgcgtgctctctgtcaggtcgctgggcagctgtccctccctggctcgtcagccatgcactctggttttgaaactttccctcaggaagccattccccaaggcctagcagagagttccttctgtctcccctactctgggtagagctccctcgggttcaccttgcgcttgtgttagaatgtgtcaggggtcaccgtgctgaccacagtggccttgcggagaaagccgttggagtctggctccgtggtggactgatgtaccctgcttgtcccctcgtgtctccagagagctggtgcctcctggccacagccacaggccaaagggaggctattcagtccttggttgaagggtctctatgtgtatatgtgtatgtgtgtgcatatatatatatatgtatatgtatatatatgctagagatctatatttttatggaattctgttagagtaaaaaagagaaaagcagatactattggctggccttggaggtcaatcttggcagtgggaaagacagcaaatgtgtggactgactaagcgtcctctctttggaggccctaggaggcaggcccagtgcctgacagtgactttggaaattgaataaaagacccttggagggggacaagactgtctgaagagtgtccagttacttgatgctcagcatagagcagtgacccgggccctggagaagagaccctgtcagaggagaaacccaaaaggcagggctgagggaaggagagtgggaagagagaagaggcccagctccgagaaggttgattcctatcgggtaagcagtaagactagaggtcaagccaatgcctgcaagttctcgggggaggtagaggggtctgggcctggcctgtgtcccgtctttcaaataagcctgcccagtaggcaacctcgaggattgggggtgttagcactcaggcatctctactgcccagtgacagcagagcaagtcatcactagctgccacgatgtgacacatttctactgtggccactagttggacatcctcccgtgctcgtgtgctaggccagtccctccaccctcacccagaggcagcctctgtagactgctccctgatacacctcgcatgtgagatctggcttagatcac

SEQ ID NO: 25145 - DNA, 1317 bp, Mus musculus
agtgtaaagtaagccaagtaaggcaagaatgctctccctcccattctgttcctggggattgaactctgggtcttacctctgctaggcaagtgttgtacagtaagctctatccctcagccccaacattaattgcctcatgtttaatgatctatctaagtttctagtgattatgaagataagctttggccattaactggcttccctgctgctgaggtgattgaaggaagggacagaggtgcagtgtgtggtcacgctggcttgtcctatggatgactcacgtttctgtgtttctcatttttttttccagagtttgtacaaatgatgacagcgaagtgaagacattgtacagaatgtgttaaatttcttgtacaaaattgtttatttgccttttctttgtttgtaacttatctgtaaaaggttccccccccctactgtcaaaaaatatgcatgtatagtaattaggacttcattcctccatgttttcttcccttatcttactgtcattgtccttaaaccttattttagaaaattgatgaagtaacatgttgcatgtggcttactctggctatatctaagcccgtctgcacatctaaacttagatggagttggtccaatgagggaacatctgggttatgccttttttaaagtagcttttaggaactgtcagcatgttgttgttgaagtgtggagctgtaactctgcgtggactgtggacagtcaacaatatgtacttaaaagttgcactattgcaaaacgggtgttttatccaggtactcggacactatttttttgtactgctggtattgtaccaggaacattttcttttattgttacttgctttttaaactttgtttagccacttaaagaaaacctgctcatggcacaacttgcctcaaatccattccaagttgtatatttgttttccaataaaaaaaattacaatttacccaattgttgctctgaatctgagtgatttaataactattagtgtctgattttggggatagcgtgtgaagttgctttctccatggtgtgaggtagactcttgtaggaacttcctgcccttacaaaaattaaaagccctttttatggctgagcctttaaaggaagaagcaggcacatctcttaagtttaggggccagcctaatgcctggtctacatagcacataccaggccagactggactccacagtgagaccctgtctccaagaagaagaaaaaaacccttttataaatgaaccttttgtaaggaattgggatgtaatacatatttagcatttaccttttcttatttaaagattttaggttgatgggtat

SEQ ID NO: 25146 - DNA, 1178 bp, Mus musculus
taaagttcttaagaataacgtatattaaaaaaaaaaagaataacgtatattttacttttgtaataaagttttaaagcttaaaaagttttctattcaaaattgtctttttctctataatgttagatctaagtggacattgatagcttggctcaattactaatatcagtatttgatggtttctttcttgatgttagaaaactagtccttttaatatttttctgaagttcttgctttgatttagtattttattaattgtagacataacctttgaaggtccctctaaacatctgtctgtatattggattttcctgagcttttagtccttcctggtagctcagtatgaaccagcatagtggcttggttagccaaagattttgacaaattctcacaaggtattcccacctaatttattaggagtccgagttccacttgaagtgctgtctatctttgccttcttggagagttagtacattttactgcgtagggcggcggtgctaacctgtatgtttggacgtgtgttctctctggcagagttcaaagaagctttctcactatttgacaaggacggggatgggacaataacaacaaaggagctggggacagtgatgaggtccctggggcagaaccccacagaagcagaactgcaggacatgatcaatgaagtagatgcggatggtgagtgtttaatttggggctggagggtttgtcacagaggcgtctgcattttgttgtatgtttacacaaactattttcaggtaatggcacaattgatttccctgaatttctgacaatgatggcaagaaaaatgaaagacacagacagtgaagaagagattagagaagcattccgtgtgtttgataaggtaaggctcgggcgcattcgtgggcagtggaatgagaccgatagagcctccccggggaccccgtgtaaacttactgcagaggatgcatatgtcatgtgcctttggaggcagggagtagtagctggagacagactacttaatgacatttacagatcaggtagtgtggattctcttcactttgtgtgaaaaaaatccacccaagacagggtttctctgtgtagtcctgtctgccctggaactccctgtagaccaggctgctacagactcagagaaccacctgcctctgcctccacttgatagaaatttctagagtcta

SEQ ID NO: 25147 - DNA, 1204 bp, Mus musculus
actaaaggcgtgcgccagcatttctggctcaagaccacttcttaaaggcatgattgacagaatgagttgacagttggagctacattttaaacttaattttttttttttttttttttttttttacaattttctagactgtgtctgtgacaactacaagctggcaacaagttgctctctgaatgaatatggtgaatgccagtgtacttcctatggtacacagaatactgtcatttgctccaaacgtgagtaaatcaatcttcttattgcctggaagtttaatctcgataatacttttcaaatcgaggctcctcgagttgttttattggctctaatctgttattttgtggaaagtatcttcagccagtaattcagtgcgggggggggggggggggaatagaagggcgggtagaatggaagggcgcgtgaataatccttggcctggatggcagcagaataaaaagctgtgctctgggcacgtgaagccgcggctgtctctcattgggcgttactgtcatcgcctttccagtggcgtctaaatgcttggcgatgaaagcagaaatgactcacagcaagtctgggaggaggataaagcccgaaggggcgatccagaacaacgatgggctgtacgaccccgactgcgacgagcaggggctcttcaaagccaagcagtgcaacggcaccgccacgtgctggtgtgtcaacaccgccggagtccgaagaaccgacaaggacacggagatcacgtgctccgagcgcgtgaggacctagtgagtgagctttccagtgcgcttaagtttagctttgaataccaaataagatttttgtgcctcggaattcaaaaaaccgggaaaagccgggcgtagtagttcagggccagccacagtgagtttgagaccagcctgggctacttgagatcccttttggagtgacaagtgtccatcctgtctccgtgcctcatgaaatggcagtcaccagccttgagttgggctttattggccctaatccagttatatttgttttcttggctctaatccagctgtgttgttttgtggaaattgccgaagctttttatcctcggcaagtcattaagtgtgaggaatggaaggaggcctggaatgatctctggcctcaggttgtgacatttccagagctggcttctgagtcctgtgtagacaggctgggtcttaggttttacggaaacggt

SEQ ID NO: 25148 - DNA, 1337 bp, Mus musculus
atttatttagatccagggtccctttacatagccctggctgtcctggaactcactctgtagaccaggctggccgcaaacttagagaaccatcttcctctgcctcctgagtgctggggttacaggtgttagccaccacatccagctgaaaacgtaactttaagacccccaaacattgagggggtggtgttggtgtacgcctttaatccccagcgctcaggatgcagaagcaggggatcgctgagttcaaggccagcttggtctactggctgagttctgggacagccggttctttgttgcttctaagcaaagaaaccctgtttcctcctctgttgcagataaaggagatgggtgagatccacagagagcttaatgcctagccgtgctgagtgctgaactgaggaggggccgcccgaccggaagtggcagaagagctcggactgcagatgtataaacctggggaagatgaagacctgcgaagggttactgctttgatagttactttgttagtttcacatttgtaacagtgaaatttgtactcgtaaatacaagcagctggacaccggcattaccgatcgtaaaattagacgaacgtcttataggtgcaggtccagtgtggtactcagaacttagcctgcaaagttaagagagttgatgcttattatgacagagtgtgcgtcgcaaacattccaacagtagaatgcggtgactagtctcattttttttttttttttgtgattaaggctgcccttctatatacctgagtcttgtacataataaacttttttttaatgaaataaaacattttaaagtgagtttctaagtttgtttgaatcaaattttcctagcatgtgcataattaagataatagatgtctaaatgctctggcactgctaactggtacaaacctgtaattctgtacttgggaggtagaggtaggagggttagcgcttccgaggtagctgctgtgtatctgctctgccactgactggccttgactatccaacaccctatctgaaagaaataaaaatcaaacttaagaaacgtgggtaagtcttgtgttatgggaggctagggaatgagtgtggttttgaaggcagcccaggctatgtagacacagagttccaggctacccagcgagaccctgaccatcagtaacatattgtgagagttggggtagtgtggggtggttgggagggttgttcagtggtactatgtgcttaccatgtgagaggccctgtgtccaatttgcactaccagtgtcttagtcagggtttctattcctgcacaaacatcatgaccaagaagcagttggggaggaaagcgtttattcagcttac

SEQ ID NO: 25149 - DNA, 1085 bp, Mus musculus
gtacctccaaatcaataacagcccgcagcctaggagcgaggagtggagggcgttttgagagcttcctttaagacaccctcatttgccaataggctgtgttttgttttgttttttttaaaccgtctcgcttgagaacctgggatggaccattgctgaagggcagtatcgccaagtggtcaggacctaggatatgccctggagctgaactgcccggatttcagttgtggatcccctactgtttgctgagtgcggttgagctagttggaaagctgtgcttagctagctagctagctagctttctttctttctttctttctttcttttttttttctgccaccttggctctcaccactcagcatcatctctccctaaaaggcttcagaactcatttgtggcctaggaagattaatttgatcaccataataacctctcccccacccacccccgttgctttttctttcaattacattgaatgtccattatatcatactttggagttgtgagttctaattttttttttttttttggtttttcgagacagggcttctctgttatagctctggctatcctagaactcactctgtagaccaggctggcctcgaactcagaaatccacctgccttccaagtgctgggattaaagacgtgcgctaccaccgcccagcatgagttctaattctttatgctgttatatgcaaatggatgttacagacatcgtatttctgcctggtctgtgctaggtaatagtctgctgccttcacaaccagttgaatttgtttttgttagacagctattctttatcttgagttaaagagtgacacacacacacacacaagaaatgttgtgtccattaataatgttctctcacaatcttcccagtcctgacctctagttttccttctctggatattctgggatgtagcatgtaaatgaagagcttcaaggcttatctctgtcatcagcacttcgttccttttggttgctaaataattgtgtggatttcccacatttcatttagctccttgtccctggagtttgttttggcttggtttttggagacacggtctcactctttagccttggttg

SEQ ID NO: 25150 - DNA, 1198 bp, Mus musculus
tgattttttttttttttttctttttctgagacagggtttctctgtgtagccctggctgtcctggaactcacgctatagaccaggctggcctcaaactcagaaatcttcctgcctctgcctcccgagtgctgggattaaaggcttgcgccaccacgccccggcctggtaaattctttttattcatctcttgtgtgttatgtatatggctgaacacaatgcagtagggatgcaggagtcaggcctattcttctacctgagaggtctgagtgtttgaactccattaggaagcttttattcatagcagttaccttgataacgtatcttctctgtagtccaggctgccctcaaactcctcctgatctgaagttatacccctgcctcagacttccaagtggctagactgctgatatgccccgttgtacatacatgccccgttgtacatacgtagtgtttgttcattcagcagtttgttggaaggttggcttgctgaggaaatgcaagtttaggctaatttgtgaagttctcaaacatgtattacctcacagcctcatctttaacatttaaatttgtttatttgttgtttatttcagggagtaagaccctgcagagtgttgtgcttagcaagatgaactttgagtctttcgtgaaagatcttcttctggttcgccagtatcgagttgaagtttataagaataaagctggaaataaggcgtctaaggagaatgagtggtatctggcatttaaggttgttattttccttttggatgtttgtcttagaaaattaaattcagtgcatgttttactatattaactaggttgtgatagcaaaatgccttgagaaattttgatagtgttgggtttctaaaagttacagtttaatcacagtttagaaattcagtagtctatctatataaaatgttttgaacacgccaaaccttgtctcactgttcctgaaatacaacattagatgataacctggacataaatgttataattttaaaaagattagttttatttatttttttaattaaaaaattacttatgtgtactgggtctgcatgtctgtccgtgtaccacttgcatgcctgttgctagagcgaggagaccagaggagagggccttggatcccttggggttggtgttagacttgtgagccagattctagaagagcacccagtgttcttaatctctgcctgtc

SEQ ID NO: 25151 - DNA, 1099 bp, Mus musculus
gaagccctttccgcagctgtgtatctagtgtttgtaactttgtttcattttgtgctacacaggctgttttggcttctaataaaacttattttcagaataatggttttaaacatatgaaataaaacaaggagaaaagaaactaattgtattgaagtgtagttatcaagatacaaaaccttgatacagagccatacacttgagtttttgtttttgtttttggttttggtttttttttttttttggtttttcgagacaaggtttctctgtatagccctggctgtcctggaactcactttgtagacaaggctggcctcgaactcagaaatccacctgcctcacacttgtaattaatgcatttaaattgtgtatgcgtgcgtccatctgtctgtccctctgtccctccttcccttcggaagagacagtaagatatcaggtctcctggagctagagtaaatgtagttgtttgctgcctagtgtgggttcttggaactaaacttgggtcctctgcgggagcagcgtacagtgttaactctccagctccttagttaatgcatttagaaagattgtaaggactggagagagagccggctaagtgtgtaagatggagagagagccggctaagcgtgtaagatggagagaaagccggctaagcgtgtaagatggagagagagccggctaagtgtgtaaggtggagagagagccggctaagtgtgtaagatggagagagagccggctaagcgtgtaaggactggagagagagccggctaagcgtgtaaggtggagagagagccggctaagtgtgtaagatggagagagagctggctaagcgtgtaagatggagagaaagccggctaagcgtgtaaggtggagagagagccggctaagcgtgtaaggtggagagcgagccggccaagcgtgtaaggtggagagcgagccggctaagcgtgtaaggtggagagcgagccggctaagcgtgtaaggtggagagcgagccggctaagcgtgtaagatggagagagagccggctaagcgtgtaagatggagagagagccggctaagcgtgtaagatggagagagagccggctaagcgtgtaaggtg

SEQ ID NO: 25152 - DNA, 1135 bp, Mus musculus
cacatactcatatacacacaaacacacacacttataatcacacactcacacacacatacatataccacactcttacccacaacacacatacatactaacatatacactcacacacatacacacacttttacacatactcatacatacacactaacatacacacgtacacacacatcacacacacacacatgcacacacacacacacacacacacacacacacattcacacacatgcacacttcaaagctgtcctcaatgtgagtctctattgtgcccagtaattatcatgagcaggccttacctctctggtttaatgatctgaaatgcataagcttatggaaaagggatggtggcacagttaaagacccttatgtatgttgtatttctctcaggacagaaggtagcacggtcaccctcttgacttctggagcaggcatggggcaggtgtgtaggagcccggccttcttgacttctctgcctgactgtattatagcagtgcaagggagtcgggcaggcaggagaagtgggtaggctgtgtgtggctgctgtggattttaattcaattcagtctgtatggcttactgaatcaatgttgggaaaacacagctctctcctgggaggagaggtgtttggtataaatagaaggtattatcactgtgaggcaattgggggatgtctgtcactccaacatacagctcaacacagcaacctacgttcactggggcttgccccagataagagaggaggggggttgggagagagagagagagagagagagagagagagagagagagagagagagattactcagcactcctctctggacacttagttgctttgcttggaaaatggaactattttcatttggctctctgtcccagtcatcctgaggtgccattgatggagtacttccatgcaggtgaggtgccatgaatggggataccgcttaacccctcagcaccaggtctgacccagagccgcatctgccctggttaaacactttgaggagctttaaggggatccactgtccaattcacccatttaacagaagtcccagccactcagaagatgaaggcaagatcagaagttcaaggctacggctatgaagtttactaagactgtctcaaaagaaag

SEQ ID NO: 25153 - DNA, 1107 bp, Mus musculus
atctaaagctctagcttttacattttattatgatatcatcctgctttgtgcatttgagtctacgttgggagtctacatggctacagatataaaggctggaaaccatgatggtgtgaattttctcatgagtcttcagtttaggaaagacaaagtggttgagatcatctctgctctatcccatgccagctggagcagcctgaagcccaggctggaatctgccgggggtaggttgctcacagatgtgtaatcctcagacctctcaggcgtatgatatctcagaacagtgctctcaggggcgggctgtccgtggggacagtgacaggaatgcattgcttctttaactggtcagtgaccccaaatgcagggagctggctcgtgcaattagggcagacctcagagaaaaacaaaattgagatgcaaaactagtgttgtgctaggtaatgagatgtgaccagagaaattaaattaagctcaccgctgtttccaccagggtggccaccccttcagctgtccagatctaccacctaccagaaccaactcttagggaagttcttcagctgtggtaggagtggaattctgtctgtctttggctgtcagaccagatggagaaaagcagcagccctggtctcaggttaagcggcgattgttcttcactctttggattcttcctctctctgtctgaagttccagagcatcggagagaaacagagatggtgccggtggggaggggtgggaacctagaaacagatgaccacaagcacacactgagcatctgtgtgcagcaccctggcctccaggacaggctgctccaaatcacccttagttagaggtcctccctcactcacaggatgagagcttgactgctccaaggtatgcttgaggggaaggtttgtttaagaactacaggatttattttttatttattattttctcaatgtattgcttttaattctattttatgtgcattggtgttttgcctgcatgtcatcccatgtaaggttgtcagatccctggaaactggagttaggagcaggtgtgagctgccatgtgggtgctgggaattgaaactaagtcctctggaagagtatccagtgctcttaaccacta

SEQ ID NO: 25154 - DNA, 1131 bp, Mus musculus
tgactaacaaatggaagggtccagatccagttctaatttggggtaaagactcagtttgtgttttttcacgagataaagatagagcgcagtggctgccagataaattaatttgttagatgaacacagattctaaatcttctaaagtatcaccttgaggactaaaattcctcttttgcttaaaagtcggcttgaggactcaggctccgaaaaaagctactctctgagccagctccccgacaggaggccggagactagcctcagctttacaatttgcatttaaataaagtacctagagttccccaaaagaagttctgctttcctactttctcactgtccgagattttgtctttcaagcaggtaaatcaacattctcgaggcagaccagcggatgtgcatccccgcgcccctagagcacacaggtggctgctgttatctcctttccaaggacatttccagcatgtggctttcagtctgagttaaaaattaggtttaccaagagggctaaaaaagtagatatttctatattaataaagattggtttttattttgatagacaggcttagctccttagctgacctctggcttttcacccttgctgttactgcaaggtgtccttagctcaataggctgtagaaaaaacagagatgaggaggaacgacttccagctcctattttagccacaaatcgtggtgttactaacgacataattcttgcttaggctttgctaattctgaggttgataattctcctttaggagctgcacagcactcaaaactgtgcatactggtttgtgattgtacaaattcagtatgggcatcgcttggtgcagaggtactgcaagggaaggtccggcttgaccatttctgagtttcctgtgagataaacctggtttaaaagaggttggtatcatattttggttaaaaataaaaaatattttccggctctacctcgcctccccaaaagatacccagagccacatgtgtgggttttatcaatacccacgggaggaatcgggtccatgtccacccaagtcaaggttaaaagcccactcatctacggatgagaaaatcatttgatcacctcagttaagcgttgccttatttaacttaatcaataagggggagagagatt

SEQ ID NO: 25155 - DNA, 1185 bp, Mus musculus
ggtcttcaaacacatcagaagagggtatcagatccccactacagatggttgtgagccaccatgtggttgctgggaattgaacccaggacctctggaagagcagttagtgctcttaactgctgagccatctttccagccccgccttaactcttcttaaaaaataattacactatttatggggggtataggagatgggtatgggagatgtgtaaatggcacagggtgtgtatggagttcagtacaatttgtgagaggcacttttacccaggtactaaaacttgctgagtcatcactctggcttcttaatcctttctccttccttttttttttctttctttcttttttttttttttttgttgttgttgtttttcaagacggtttctctgtgcagccctggctgtcctggtactcactttgtagaccaggctgacctcgaactcagaaatccgcctgcctctgccttccaagtgctgggattaaagatgtgctcagccatgccttgcttctttcattcttaaaccgagtctatatgtatctcaggctggctatgaactcacagaaatctatccttgtcttttttttttttttttggatttataaatctatttttaacaccattgctctattcagacacactaccagaagagggcatccaggtccattacagatggttgtgagccaccatgtggttactgggaattgaactctagacctctggaagagtagaattaactgctgaaccgtctctccagccctgcccgtgtcttctaagtgctggaatcgaggctgtgcatcatcagtgtttgtagggctggggagattggatggattacaaggatgagagttttagttaaatgcacagaaggaagccacctagaaaataagctggaaatagtggcagatatccttggcactggggaggcagatctctatttggcaagttctaggccagtgagagattatgtctcaagacaaaaaaggtggctagtaaccaaggaatgacacctgaggttgacctctggtccccatatccttgtgtatatataatttgcacacttgcatacacacaaagctaagcttttagtattgtgtgaaaaatctgagactggcaagatggcttattaggtagagtggctgctgccaagcctgctaacgtgagtgtgaagcctctgtctctacatgcac

SEQ ID NO: 25156 - DNA, 1105 bp, Mus musculus
gaagcgacgggtcatctcagactcggagagtgacattggtggctctgatgtagaattcaagccagacactaagcaggaaggaagcagtgatgacgcgagcagtggagttggggacagcgatagtgaggacctaggcacctttggcaaaggcgctccaaagcggaagagagccatggttgctcagggtggacttagaaggaaaagtctgaagaaggaaacaggctcagccaaacgagcaactcccattctctcagaaaccaagagtaccttgagcgctttttctgcccctcagaattctgaatcccagacccacgtcagtggaggaggtaacgacagtagtggacccactgtttggtatcacgaaactttagaatggcttaagccagaaaagagaagagatgagcacaggagacgccccgatcaccctgaatttaaccccaccacactgtatgtgcctgaagagttcctcaattcttgtaccccagggatgaggaagtggtggcagctcaagtctcagaactttgacctcgtcatcttttataaggtggggaagttttatgagttgtatcacatggatgctgttattggagtcagtgagctggggctgatattcatgaagggcaactgggcccattctggttttccagagattgcgtttggccggttctcggattccttggtgcagaagggctataaggtagcacgagtggagcagaccgagactccagaaatgatggaggcgcgatgtcggaaaatggcacacgtgtccaagtttgatagagtggtgagaagggagatttgcaggatcattaccaagggcacacagacctacagtgtgctggatggtgatccctctgagaactacagtaggtatcttcttagcctcaaagagaaggaggaagagacttctggtcacactcgtgtgtatggtgtttgctttgtggacacttcactgggcaagtttttcatcggccagttttcggatgaccgccactgttccagatttaggacgctagtggctcactatcctccagtacaaattttgttcgagaaaggaaatctctcaacagagaccaaaactgtcctaaagggttcactgtcatct

SEQ ID NO: 25157 - DNA, 1168 bp, Mus musculus
ggctactgagtaagattcataatgttgggtctcccctgaagagccagaaccatccagacagcagggctataatgtacgaagaaacgacatacagcaaaaagaagatcattgattttctctctgctctagaaggattcaaagtaatgtgtaaagtctcagggcttctggaggaggtcgcgggtggttttacgtccaaaaccctcaagcaggttgttactctgcagtcaaaaagtcctaaaggccgctttcctgacctgactgcagaactgcagcgatgggacacagcctttgaccatgagaaggctcggaagaccggactcatcactccaaaagcagggtttgactctgattatgaccaagcacttgctgacatcagagagaatgaacagagcctcctggagtacttagacaaacagcgcagtcggcttggctgtaagagcatagtctactggggaatcggtaggaaccgttaccagttagagattccagagaatttcgctacccgtaatctacctgaagaatatgagctgaaatctactaaaaaaggctgtaaacgatactggaccaaaacgattgagaagaaattagctaatcttattaatgctgaagaacgcagggacacatccttaaaggactgcatgcggcgcttgttctgtaacttcgacaagaaccacaaggactggcagtctgctgtagagtgcattgcagtgttgggtaaggctttggttaacccttgtgtcccaactatccatctctaaacctagctatgtttaatatgggtgtgtgcatggatgtttaaataactacaacttaggtttcactataatagccttatgacaatttttcctagtcttggaatagtttcgaattttatcattgagggaagatttattttcaagtctctttttaaaaacacttactggtactaggtaatttcctgatttgtttaaggatctgtagcccaagctgatgttgaactcctggcaatcctcctgcctcacatccccaagtgctaggattagaggtctgggccactatttcccagcttttacaattttattttgtcatgctggcatcagatctagacctttgtgcatgcagggctatttaaacattttggccacggagccaaaatcttgagcccaaaatgcttttataaatgcttatt

SEQ ID NO: 25158 - DNA, 1093 bp, Mus musculus
aggttattgtctgagataaacttgctggatccaggtattcctggtagttaaagcccagaggtctttgttagctaggtatggaataccaggttcctacttaaggattcttgaatccaatggtattgtgtacagatagattttcaaataccaattcctttcttcccatcttcccaggctggtctgttggctgtgatggcccagctgggttgttacgtacctgctgagaagtgcaggctcacaccagttgacagagtgtttactaggcttggtgcctcagatagaataatgtcaggtgagttgcttttcctccacacaattttacaattcagttggcaaggataacctgccttttgttttaaacttgatgtaacaacatatatgcttttagtttaaattcttgctcatcattttcaaacaagatataatctgctcttaactcagttgtttctttttttaggagaaagcacattttttgttgagttgagtgaaactgctagcatactcaggcatgcaacagcacattctttggtacttgtggatgaattaggtaagacagattttgtttgaatgccattagggtggaaaacccatgtccccaatagctactgtttccccctctctggcggtcctgggatttcctgtcttgtctggtaggcaagagctgtactgctgagatgcagtctccataatcatttttatttaagactgctcatcagtcaagagcatgcatgcatctctgtaccatgtacatgcagtgccttgggggggggggcacttggatgtcctgccttttcctttttttttttctcccttttggttgtgagacatggtttctctgcgtagccctggctgctctagagctcactttaatgtagagtgggctggctatgaactccgagatccacctttctctgtgcctcaggcagtgcctggctgggttcattgcttttaactgctgagcatttacacatttctggtgtggaagcatatgggggtcagcagatgctcagcatattgtatgtcgtatccaggccactgggctcctgctcatttctgacaataagtagacaaggttggcctttccccatgtact

SEQ ID NO: 25159 - DNA, 1101 bp, Mus musculus
acagccacaaaaaaattcagacataagaataataaaatgcagtgttgtgaattcctgacaagttcaataatacaagattttgctttttagatgtcatacttgtaacaccacagatcgaaatgccatatgtgtgaactgcattaagaagtgccatcagggacatgatgtagagttcattagacatgataggtatgtagcagtatgcgtgttgctatggtacccaattccttcccgtcactttgctaattcttggattttcattttgctttaggtttttctgtgactgtggtgctggaacgctgtctaatccttgtaccttagctggcgagcctacacacgacacagacacactctatgactctgccccacctatagaatctaatacgttgcagcacaactgaattccttccctaaagaaaaagtcctgccattctaacataacttaaaacatcttttggaagataaaatacttgcccatgctacagaaagagactgtactgaaaaaatggacacacaaggtcagttgacactaggaagctcaagctaccaaaaaggaagtggcaatagattgactcaggatgtcagagctcgggattttagcattactgcgtaaagacttttgaagggacagaagtgaagaaataagctgcaattttgtacagataccaacttctgaaaaagctggtgtttttacaacgagcattgaatgcagtctgatttgcagtagtcatcttccacagacaagcagctttgttgctgcctttatggacatgggtaccaattgctttttgtaatatggtaaaaatgtgagctagcacttctgcattgatttttttttttttgtttaacatgtattcagattgagaatatgattttaatgctttaatctcatgtagttcgtttttaatttcaagcaaatcttattgtacttgaatgtgccctgttttgttagcacacctagacttgctgtaactgtactcatgtcccagtatgtaccttctttctatgaaagagaaaaacactaaccttaagttatatccagcaatgtttctggtatcctttaagaaaagttaagactattatctccttccctttcctgtg

SEQ ID NO: 25160 - DNA, 1179 bp, Mus musculus
tccacgttctcccctccataagacgaaatgctgcctgagattggcttgggcttacctgttccgccatggtagtaggtgtgtgagatcagctgcagtggctgatcagatgtttttatggtctgcaggccactcggtgtgcagctgagtttgagaccataagtctcagccttaaaaatggggtggggaacccctcatttttccagtggagcaaaatgactatgtgattatggtttgtcgtatctttttatctttctctgaagtgtttgtggtgctgtggtaccatggaggccagagaacaactttctgaagctggctctctcctgccacctttattggattccagggagcaagaggtctctaggcttgtgccgtgttttatccactgacattgtcttgctgaccccaaggctaaatttttgattaatgttggtcagattccagggtaaaatttttaattaagatagggattaaaatcttatattcataattgacatttacatttgctagccatcagtgtgaaatagtcaatttttaatatcctggttatgtgacttctggcaagagctaaccaattggaacagtggtagaagtttttaagtgtgtgtcggtatgtgtgtgtggagggggctagtgtgtgggtttgtgtgcacgtgtgcgtaaaatcgggatcaaactgaggagatgtgtgtctgccagccttgcccagcaagtgcctttagcactaagcctcttgcctacccagagaatattgtaaatattgtaattatttggaattaagtgctcagaaatcctataacaccaagagacagaaacaatattgacttttctgtgcaacctaacatagtttaaaaccctatatactttattgttgggggggggggcgacaacacaaagtcttccattaagtgtctgtttactttaaaaatagatatagatgttttgttttgtcgatttattaaaaaaagagattctgtactgttggtggacagacagaaaaattgacaggacagcaagaaaaagagaatcccagcactcgagagtcaggcagactgtctcatgtggcctctcttaaaataacgtgccacataaaagcttaataccttattattctgacttatattcttccattttactatgatgggtcctgggtcccaccttcagtttcaattaattgtattc

SEQ ID NO: 25161 - DNA, 1135 bp, Mus musculus
gaacactgctggtcttgcagagaacccaggttctgtttccataactcacaactgtctctaacttcagttccaaggaatctgatgcccttttctgccccctcaggtgccaggccatgtacatggtacacatatacatgtgcaggcaaaatacttgtataaatatttttaaaagttttctccccagaagtaaagttttgatttgaccgagtttcaaattgaaattgcagatcatgtaataattgcttctctagtagaataaaatccaaattttacttctagaagttcaaataatgaaaatgaaaaatagaaaacaaaatagggcagacaccatccttactttcagaagagagtagggtgctctttgaaatatagtgtagttatttacgtcgacttctgtacctccttaaacttttaacaatcaaaatgaggctcaaaataaggatgcacacaaaactaaaaattacttacttaggaaaacttgatgcaagaagcagatttcttgcagaataataaatggaacgaaaagaaataagccatatagtgacgaaaacaaaattgttaaatacatcaatagatcaagttggtgtctctgtccccccacacacacacacaatcaccccttattttaaaaatagaaccaaagtttcagactgcaacaaatatggaagagagaggagtttattatgtcaaaaatgctattttgttttgctctattgcccaggctagtctcaaacttgtaatacttctgtctctgcattcctgaatgctagagttataggcatgagccaccatgtccagcttaagaacactattttccttgtttacaagtatatcagctacacttgtaactatgacacactaaccatctttaaaccctcttgaagaaatatcctgtagctctacacccaagctgcctgagtgaattgtaccttagagacagagccactaggtcagggccaacataggcaacaaaaaaaaaagggtgtgtgggtgtggagtggggatggagaaggcaccctggcttgtcccttactaatcacctcaccttcctacactttcttctgtataaatggaactataacaccctctgtagtactgggctattgttgctacttttcttaaataatatccacaa

SEQ ID NO: 25162 - DNA, 1175 bp, Mus musculus
aatccatcactcttcatagcttctctattacgatgttgtaataagagaatttgagttaggtaaataaaaacatagaagtttttgaaagtaaggagaatttcttatatgtgaaaaaagaacatgactgttttagatgctgaatattttttgtttgtttgtttctttgtttttctgaggcatgatttctaactgtgtagccctggtctggaactctgcagaccaagctggccttaaactcagcctacctttacctccagagtgctggactcaaaccaccactcctaggtcctgaaattttaactataaagcatttaaatgttctaatgccatatactaattaatagaggttgctatttatgatctggaatgatttcatagtacaaaaatttagtctttattctcatatttgtagaatgaaaagtccatgagactgtaggcttaaggcatttaaaaaatttaacttgttggaataatttagtacatgcagtattacctaacatgtctctgatagtgcgactctgttatgtagtgtaagtgctgctggtagtacttcaagactctctgtgtgtgttcctttcccttcccttcctttcccctccccccccttccctctccttcccttcctctttccctccctctctccttcttttctttcttatgacactccttgaaattttaggaaaggcaagaaccaccatcagatgttctcttaataatgagagtctgccttccatatcttagatttggcagagttcaggtctcatcctggagtgtcctgtggagggggctacctctaagacccctgtaccaaagtctcagtcctgacagtgcagaatctgcatgtaaattgtatatatcctgccgtagacagtggatggtctctggactattcataacaatgcaagtctgtgcagcttgtaaacaccgtcttatgggcatagtaaggaaagggctcacatgcatgaaacagtctgtctgtcctgttttatgagatagggtctctattatgtagctttggctaacatgaaacttactatgtaggctagtcatttggggacttaattttttttttttttttttttaatgctggaaatacttaagaccttgcatggtagtatatgcctttaatgttcaggaagcagaggcagggtgatcttggggttccaggccagcca

SEQ ID NO: 25163 - DNA, 1187 bp, Mus musculus
gtagaactctcagctgtttctccagcaacatgtctacctacatgccaccatgctttccactataacaatggacctctgaactgtaagccccagttaaatactttcctttttaagagttgtcacggtccctcttttcctcctctccagctccggagctgtagccatcatgaatgacacagtaacccttcggaccaggaagttcatgaccaaccgcctgcttcagaggaaacaggtggtcattggtgtccttcatcctgggaaggcaacagtactaaagacagaaattcgggaaaagctgtccagaatgtacaaaaccacaccagatgtcatctttgtatttggatacagaacccacttcggtggtggcaagaccactggctttggcatgagctatgattctttagattatgctaagaagaatgagcctaaacacggactcgcaagacatggcttttatgagaagaaaaagacctcccggaaacagcgaaaggaacgtaagaacagaataaagaaggtcaagggcacaacgaaggccaatgatggtgctggcaaaaagcaaaaggagtagatctgcggtgactcgatgttttgctgtgatgtgcagatttctgagaggacaaataaactaaaaataatttctacaaaaaaaaaaagacttgtcatggtcatgttgtctcttcatagcaaaggaatactaagacagtaataagatatttgttcaaagagattgatttgtagccttgtcttaaactcataagtcctttctttctgaagaggacagggtgggaattcagagcaaagcaggagggtgtctgctctcctgaaggccatggacccagccatttgtctcctgtgtccagcagatgcacaacttccttcaagagatcatagcgtaaaaatactccctggagggggctggagagatgactcagcggttaatagcactgactgcttccccaaaggtcctgaactcaaatctcagcaaccacacgccacctgtaatgagatctgacaccctggtgcatctgaagtcagctacagtgtacttacgaataataataaataaatctttgggctggagtgagcagggactgagcaagcactggagtgaacaggaccaaccagagtgagcagaggtcctaaattcaaattcccagcaaccacatgatggcttacaaccatcagta

SEQ ID NO: 25164 - DNA, 1146 bp, Mus musculus
ttctagagttttagatttgcattcattggtaatttgttttttattgcagaaatatacgagtaaatgggtccagtaattggaatgactccagataagagagctgagaccccgggagctgagaaggttgcaggactgagtcagatttacaaaatgggaagtttgcctgaagctggggatgctgccaggccaaaggccactcttgtgggcagtgagtcagcagatgacgagctaacaaacttgaactggcttcatgagagcagtaaccttctaacaaacctcagacttggaagtgaaggccttcccatggtcagtccgctgtatgacatagagggagatgagatgccatcctttggaccatcgtgctaccagaacccagaaaaaaaatcagcaacttcaaagcccccgtactcctttagtcttctcatttatatggctattgaacactcgccaaataaatgtttgcctgtcaaagaaatttacagctggattctggatcgcttcccatactttgccactgcacctacaggctggaagaattctgttcggcataatctatccctgaataaatgttttcagaaagtggaaagaagtcatggcaaggtgagtgttcataaacatcgttctgtgtggtgagggaattaatagagtcctgtaaaattcaagaccaagagaaataaaggcatgtcaggttagctcgaagttaattatagtcttcatgtgctttaatatatggtgttttaagatttcttagtgttgaaagaaacttactaaaattacattcagtttgcttttggcacctagattattctttgacgtttcttttctaccttgttacccacccttccccttatctgaaattgaacttagggccttgaagatgctttgttaggaaagcatgctaccactattcccagaccaccaagttgcttttcttcctttcctttcccattccctttccgtctcttctgtgtagccctggaaatctactctctgtagatcagccagacttgcctcaaactctcagagatccatctgcctttgcctcccaggtgctaggattaaaggtgtatgccaccactgcccagcagattttatttttagatgtgtgtgtgattctgggtttgtgcttgattatattgtcttcag

SEQ ID NO: 25165 - DNA, 1201 bp, Mus musculus
aatgcatgttttcctccaataactcatagtgcacaggcattttatcctcttcttcattggttttatgtatatttttccttgaatgtggcatttaatttcttagtaatattttcattggagttactttttcctaatattatgtggcccatgataatgcaacatttatgaaaaagttgaagaagaaagagaacaataatattttgagacatagtatctactatagctgcaggagtacttgtgaccttgtgctaaagaattttaccatcccatagattaggatatagttcagaatattttttaaagatttatttatttatttaatgtatatgagtacactgtagctgtacagatggttgtgagccatgtggttgctgggatttaaactcaggaccttaggaaaagcagtcagggctcttaaccactgagccatctcaccaacccgttcagaatattttttacaagtttagactaaagggctttaatttggactagtgaattggcttcttataaaggaattttggggctattacccaccaccaccactttaatttttatggcattttgatatttaatgggttctggctgatcttccctaactcctcctgtccaccattgtcccgcccccacctaactcttccatctccaatgctctaactttcttttttgtctttgttggttgattggttgttttttattgttgtttgtttgtttgtaagacagtctatgtgaccctggctggcctagaactcttaggtagacaggctagccccaaactcacagcgatccatcagatgctgctgcttaagggctgagattacaggctgtgtcaccacaccctgctcatccaccccacacgtgtttattttattaccgtctctatcgctctcccttctcagggggcccttaccagtgtccccacatctacctgtctgagtgctcacctaggtacgcatatgtgacacgcagaggctgagctccacttggagagaacacgctctctctatcctcgtgggccagggttacctcactctgcacctccatctcttctcctcaggttgcacggtttcctgttgactgccgagtaaaagtctgttgtgtgtgtgtacgtttcgttatcctttcatctgcctgtggacatctagctaatgccactgctttgctgtgtgagtcatgaacgtacagatgtacgagcatctcagag

SEQ ID NO: 25166 - DNA, 1387 bp, Mus musculus
tttttatactactatttcaaaagtgcattggctaagatattttaagtatttgaatggaactgcttatataagtcagttttcatatcacttacagtttgattatagtatttagagcagggatactaatactataactcacatatatatttttttacagtggtgagagaaactttgggaaagtttagtcttatttcatgatacgtcctgtattctagacagcaacctttgaatttttctcatttatatggatatatatacacttgctatatgcaacatacataggctcaggttagtttcctgctttcaaatgtttttatgactatggacttttttaaagagacaaatgtttttatttttacttctaatttctttctgggcaatactgtcaaatgagaagaaaaacagaagccctgtttcttaattgacaccacttaagctataacagtattgatatactcccgtttccatgttagttgtaattaaatctggatagccgacttaatggaattggtgctactaaaatatagacatttttcttttattgataatgcaggatgaagaatttggaatttttctaattcataaatgtcatctttctagaaaacagttaaatgaagttagtttttactgcagtgaataaaacaccaagcagaagtgtgaagtgtggtcttatcgtggtacaagtcttaaagagatggtagagttcagtggatagcagggaattgtgaagcaggtcaccacgcccttctgggtggacctgtcacagggtcaccacattccgtgcttcaccagcagtatgtctctcaaggccctgtgcagcgggcatgttgttctgcaaatggaggaaaatggtctgaagtaggaggaaagagttgttctcagctccaagagaaagacctctccagaattcgtgtttaggcagtaacttaaattcctttccctcctccttcaaatggcctcttacttaaagcaacagccattagcaaggatgatgcatgcccgtgcactcaagactaataagcagtgttctctaacaccttgcacttggctctcttacaaggattcgatttctcacttttcatttgctgctgtgtctaagcatcctccttcaaggggagagagagcctttgagatctggtcccttgtgatgttcttagagacagattatgctcctgtttggtgtgctcagattgaagcctggcttggaaccatccaggcgacgaattgtatgggctagaaattcccaatagataacaagctttgtgtatgaagtaaacacggcttagaaatccagggacagcccaggtctcagtgatttaaagctggtgttggctaaggtatactctgccttacaccgaaacaagaatttggttggaacgaattccat

SEQ ID NO: 25167 - DNA, 1196 bp, Mus musculus
agaagtaaaatctctccccagaagccagcagtgatcttcaaaatccctgcttttaaacaagcccaggagggaattcaagaagaaacactccttttaaacattttaacttgggtaacttttttacctgtgtgaccactttggagtctgtagccaactaaggaaatcactaccctggtctggttatttgggcagcaggggaccacattaactgtgccaatgagagcatgggtgatagttccatgatcagttatgtaggactgagcataagaacacttccatgtctgtgggaatggctgtttatcaattacaaaagataagaaaggtggcacacgcctttaatcccagcacttgggaggcagaggcaggcggatttctgagttcgaggccagcctggcctacagggtgagttccaggacaggcaggactacacagagaaaccatgtctcggaaaaaagaaaaaagaaagaaagtcacactctccatcttgtctttaggtctggtctgtgtatcagagaactgcagttgcctttcattcagcagctatgtttattatctaaccaatttcctacaacttcagttagagagttttccttaacaatggctgttacaatgttttactcagaatatgacttcctgacctattgttacaaactcagaacagactgaacttgataatcatgtaacaaagtattttgtagattacatattgattttttacaaaattaaagatgtatttcaaatagttcttgctgtgctgtgaacttacatcttcgtctgcaaggcctggagactttttttttaaaggtgtgaaatcaatttcaataaccacacatgattgactctgtcgggtgtatatacatggcttcactattaaggagtctctggacatgacatctcggcctagcctagagaatgaataccaacaaactatacttgattgtcatgttgaagatgatagatgatgaataaaaaaaagatttattttattatttatttatgtgtgtgaatgtgcacacgagtgcagtgtccattgaggccagaggtgtgttggatttcctggagctgaagtttcaggcagttatgagctgctgggtgtgggtacttgggaactgaactcagtactctgaaatagtagtgtgaactcttaacttctgggtcatctctctaatactaagaatgattttttttaaaggaga

SEQ ID NO: 25168 - DNA, 1209 bp, Mus musculus
gctgagagttcaacatcttgatctgaaggcagtcaggagaagactgtcttctaggtagctaggatgaacttaaagcccatacccacagtgacacacttcttccaacaaggccacaactccaaatagtgccactccctggaccaagcatattcaaacagggggctatccccaaagctattgcttgtccttgggatatgttcttctagatggggtgccttgtctggcctcagtctctatgttaaaatggcaaaaatgtcccagtctgtcgctttcctccgccccagcgcttcacagccgcttctggctttgcaaggtgtctgtctccgccagtgcagtggcctgccgggaagggtcagagtcctcactgtcccccatctgtccagcaatagtctgtccagagacaagcttctgtagcggcagggcttccgcaaaactagcctgctttgtccaggtcacccagacactgcccctcacttcatgtactggacgggagccgtccgtccgtccgtccctgctggtctctgtctagagagtgctgttcgggatctgctcctctgtcccgggaggtctcctggagttagttgtgtggtcaccaagaggactgaggacacagtagccctgagccaagttgggctcatcttcgagggagcaaacctaaagctggcagtcagccgccctggccagaggcctgcagtggatgagcacaaagtgtgcccggccacagccccctccctttaggctaaaattctcacccgagctttcccacgggaagctctaggataggaggaaggcgggaagccctgggtatatctagcccctcagagacttgatgggctagatgtgttgggggataatgagggggtgaaaactctctcagaagaggagagagagggatagagggaaagattgtgggagggggtaaactgggaaatagtgcagtgagcaatatgtaaaatgaataaataaaacataaaatgaaataaaataaagagctggattaatggaccatgaagactcatctgtaagggttaggttggaaactaattttcctttctctttggatggtaaaaggcacagagcttttgtaattttaacaagaagaagagatgaggatccaaacccatcgatggtccagatatagagatgggatgtttaagatgactgacagcattatgaattaggtgatatcactaacactttcatagctga

SEQ ID NO: 25169 - DNA, 1188 bp, Mus musculus
acgtaattgatcattgcctacaagcatttaatgccatgggattgcctaaccttattaagacagacaatgggccatcttattccagtaaaaactttatttcattctgtaaagaattcggtattaaacataaaactggaattccttacaaccccatgggacaaggaatagttgaacgtgctcatcgcaccttaaagaattggctttttaagacaaaagagggtcagctatatcccccaaggtcaccaaaggcccaccttgccttcactttatttgtcctaaatttcttgcacaccgatatcaagggccagtctgcagcggatcgccactggcatccagttacttctaattcttatgcattggtaaaatggaaggaccccctgactaatgaatggaagggtccagatccagttctaatttggggtaggggctcagtttgtgttttttcacgagatgaagatggagcgcggtggctgccagagagattaattcgtcagatgaacacagattctgactcttctggtaagtatcattctaaagactaaaattccttttgtgcttaaaattcagctgagagcaacagctctcaaagctgttctccagctactctctgaaccagctcctgacaggaggccggagactagcctcagctttacaatttgcatttgaataaagtacctagacttcccccaaagaagttctgctttcctactttctcactgtctttcaagattttgtctttcaagcaggtaaatcaacattctcgaggtggaccagtggatgtgcatccccgcccccctagagcacacaggtggcagctgttacccccagtctcaggacatttccagcacgtggttttcagtctgagttaaaaatttaggtttacctagaaggctagaagagtagatatttccatattaataaagattggtttttattttgatagacaggcttagccccttagctgacctctggcttttcacccttgctgttactgcaaggtgtccttagctcaataggctgtggaaaaaacagggatgaggaggaacgacttccagctcctattttagccacaaatcgtggtgttactaacgacataattcttgcttaggctttgctaattctgaggttgataattctcctttaggagctgcacagcactcagaactgtgcatactggtttgtgattgt

SEQ ID NO: 25170 - DNA, 1190 bp, Mus musculus
atccttttcaggtgggtctagctttccatggcttgctgtggtaggagagctgggatctattggtgtcaaagtatattggtttctgttgcttatgatcttgtgcttgcttcttaccctctggctacctttggtgttagctggcctcagtatctctgtctggatcctgactcctgtgtccctgggttgtagcagatctcctggggcttctgtgaccctagctacagctgatctcctgggagacttgtagactattgctctgactgcagctgatctcctgggagacttgtagactattgctctgactgcaacaaatctcctgggagccatgcaaagtgcttccctggctatggcagatctcctgggagccctgcagactgtgcagggtagagagagtgggagataaaggctgatcttcccccaagcaggtgcaaaccagaaggttcatgtgtagggtggaggagtcccttgtctgctggacacctgtagaatccctgtcactgtaattatttgggtggctatcatacctgtcgctctgactccagcagatcttctgggagttatgcagtgttggaggtgggggtaacaggctgatctgcccccaagatttcctggatgtttcatgacagcagtctttttagatttatctttttatttgactgacatattcatttcatctacatctccaatgtctgagattccttcttccatctcttgtattttattggtgagactttcctctgagattcctgttctagttcctaaacttttcatttccagttctctgatagtttgagaacttttattgactccttttctactttcaggtcttgaattgtttttatccattttcttccattctttgtgttttcgcggatttctttaaggaatttatttatttctctttaaaggacttctattatatacataaataccattctatgtttttgtattatgcttcagctatgttgcaatacccaaggcctactgtagtaaggtcgtggagctctagtggagctaaactgccctggctgttattgattgtgtttaaaccctggtgtctaggcatctgagtttggaagactgtaactgtagatgcagatatcttgctcgttccttgcctggtagggaatgttgcggttcagtagtcagtttagggaaggtttccattaaatgtgtttctagatactggg

SEQ ID NO: 25171 - DNA, 1132 bp, Mus musculus
agttcaatggtagaatgcttgcctggatcctcaaaggcttatgattgattctacagcaaagatttaaaaaatcaaaagacaattttggaatcacttttaatagcttaactaatgtcaatataagatgaaaaacttacctgaaattattataaaccaaagagtgattataataaaaaaggaaaatcaaaaaagttattgaattacatttaaaatgtacttaaatttaaacaacattgttaacttactattttataagaggctctatggaacattcagtgttaattttatctatatttataatacattcttttatattgcttaagtttattatctaaaataatattttcatagtataaaattcttactttattttcatttttatttaaacatttgttttatatattagctaataactgagagcgatcaactttattattagggtctttcttaaaaacaaaatattagtctttattctttgattgaaactagatatttttctcacataatatatcttctttatggtctctcctcccgctactcctcccatgtactccccacttccccttccctctgaatggactctcggtctctcattagaaagctaacaggctacaaagagttaattctaaatgttgctttcatttccttagataaagtgatgggatacgagctatccccaagctgtgcaaatagacacactcttcagcccaaagcatttccttctctcttctaactatccctaggcctaggcttaggcctgtaaactagattccgtataatctaatctgctaagatgacttattcaatttgtcttccctcaacttctgactgaattactctgcctgacctgacctcattctaactttggcaatatgtcctaatcttcttgacccttttcattctctggcttgttcttcttcacctgtgtctagctttttctctgtaatatttctctgtaaaaacagtcctagtaagtttgtcatacacaaacatcaccccaccacagccctctcttcttattcttcttctctttctctctccctctctgctcttaagtgtcctctctttcctgtgtagtttgcctgtgagtttactggatcctatttctacacattctgccgggtctgtctct

SEQ ID NO: 25172 - DNA, 1151 bp, Mus musculus
tctctacttcccatgattattttgttcccccttctaaataggactgaaacatccacactttggtcttccttcttcttgaggttgggatcacccacccatttcaaaaagattaacacagaattgttcctatataaaggaaatgcagggacaaagagtggagccgagactgaagaaaaggccatccagagactgcagcaccttgggatccatcctatctgcagacaccaaactcagacactcttgttgatgccaagaagcacttgctgacaggagtctggtatggctgtcctctgagaggctctgccagagcctgacaaatacagatgtggatcctcacagccaaccatcagactgagcactgagaccccaatggagatgttagaggaataactgaaggagctgaagggctttgcaaccccataggaagaacaatatcaaccaatcagacctcccgccagagcttccacggactaaaccaccagatgtttatgtagcagaggactgccttatctgacatcagtgggaggaaaagcccttagttctgtgaagacttgatgtcccaacatagggcaatgctaggatgatgagataggagtgggtcaggtgggagtgggtgagtgggtaggtgggtgggggaactccctcatagaagaaaggagtggggggatgggatagggggtttgcagcgggaaaactaagaagggggataacatttgaaatgtaaataagtaaaataaccaataaaaaagtttgttttcactgacagcttgaaggtatgagggatcatggggaagtcagggtggctggatcttgaggtaggtggtcacattgcatctgcagttgagaaaaagaaagagatgaataagtgtgctcaggtagctttgtcttttattacagtccaaaccccaagccaggagattggaactgctccttctttggctgagtcttcccaccttaattaacctaatcaagataatctctcccaggcatgcctagagatttctcttctggataattatagagcttgtgaaattgatagacagtattaagcctcacagcaatgaattttgcttaagatgaaagctctttgtgttgaaaactataaggcattagtgataactgaaatgatactaataaaaagagatgtccca

SEQ ID NO: 25173 - DNA, 1199 bp, Mus musculus
agagaaagaaagagagaaagagagaaagaaagagagagagaaagaaagagaaagaaagaagggggaggggaggggaggggaggggaggggaggggaggggaggggagggaagggagaaaaagcactcacctactgcccagaatgaagatcagcccccaattcatccaccttcctgggaacaagaattaggaagagtttttcttcctaattatgggccatattttacttcctttaaggttttcattagatgctagaatcacacattttatctcgggtggtatcttttggaaatgtattcctgtaaatattcctattctctgtttttgattccagacattaggcatctcaaggataatagcacagacttattttgcttagtttagattaaactaaagaagcaatcaaacttgatttaatttttatctatttttagagacaaaatccgttggagtgtttttctcaatgtcccacaaatggttttctatttattcctatctctgcatgagcacaggatcctgctttgcctattcttccaggctgttcatgtgtatgatctatcctcagttgaagaccaggagaggaacatctaggaacagacctatggaggtctctatttccatctccatacaatttttctcctcggcaccctgtcttctcacaatctttggtctgtctgtcttctcaagtcctaaagactcttggatactactttgatttctagcaattctttccagtcagtaacctggaaaatcctaatactccacttattgttatatctcttcatagttatggtacttcagaaatcattgatctttaatgatcttttgggaattctgtttcaacgattttacttgtttctttgaagttctaaaacagattcccatgttaatagagacatctgtttgctcattgtagccagagtgaaaaacagtttccactcctattctctttgttacctgtagtggcttcctcaccactgatgtgaataagttttagtctggaaactttttttttttccatcatagtatcaaggctttacaataactcctagttactctataaacatggaaaagacatttaaaagtcactattctttaaagggaatataaaggaatatgtatacaaacctagcaattgctctcatgggactgatataggctgttaatgccacaaattaatagacattttgcttctactgt

SEQ ID NO: 25174 - DNA, 2537 bp, Mus musculus
gcccggaagccaacggcggtctacacaactacaaaatgagatcgacatgggattccctttgactcgccccagttgaaactgcaacattgctaaaggtagggagagcttaaaaatctatcgccaggctccgatctccaaagtgtctcaaaacaggcccactaatttggctaaggtaaaaggtaatgcaggggccaattgaacctccctcaatgttccttgaaaggcttataaaagccttcaggcggttcactccctttgatcttacctcagaagtccagaaggcctcattggccatggcctttcataaggcagtcagctccagatatcagaaagaaacttcagagattagaaggtatattacaagaaagagacagttatgcgatctagtaaaagaggcagagaaagtgtgtgtgtgtgtgtgtgtgtgtgtgtgtgtgtgtgtgtgtgtgtgtgtgtgtgtgtgaaaaagaggcgggaggcaaaagaaagagaaaacaggagggatcgtagacaagaaagaaatttgccacagtggtaggaaaaaaagaaaagacaggatctagacaggaaacctgggcaactgaagaccgaacctcagctaaagaggctcagctgtgtcagactgaagtgacttatttgggatacacccttcgaggtgaaaagcagtggctaaaaaaagccagaaaaagactgtaactcagatccccaccccaactacaccaaggcaagtaagagaattcttgggtactgctggcttctacagactctagatacctgggttggcgaccttagctgcccagttgtaccccctaaccaaagaaggggaggtgtctgtgtggaccccagatcaccagaaagcctttaaagagattaaagaggccctactgatggccagcctatgcctgacctaaccaagcctttcactctttatgtgaaagagagagcaggggtcaccagaggagtccttactcagactttgggactttgaaaaaggccagtgacttacctatccaagaagttacaccctgttgccagtaggtggttttcttgcctgaaagctattgctgccataatctgcttgtcaaggatgctgataagctcactctgggacagcaaataactgtagtgacatcccacattcttgaaagcattaccaacgctcctgtgacacatcagagctttttgttgtctaaatgagtgaccttcgcttcattccacctgctgtcccactgtgtgagactgcacctactcatcactgcactgacattctggcagaagaaatgatctgaattatcagatcagccttggcctgagggtacgagctggtacactgatgacagtagcctcgaggttaaaggtaagcagaaggcggggacagcagtatggtggtgaacagaaagcaagtgatctagtccagcagccttcctgagggacgtctgcccagaaagctgaacttgtgactttaagacaagctctataaatggcaaaagaaaagtctacactgacaacaggtatgcttttgccactgtaccggacaatatacaaagagggctgttgacatctgcagaaaaagacctaagatgctgtggctaaagaaaatcagatggcagatctaaccgccaagcaggtggctcaagaaacaatgatcctggcagtcaaagagtctaaagattattatgacatcagagagaccagctttagatacaccgctgagcactatcaagctatggacagtatttggcttggcctgggggccaagaaattcaaaggtgtggttaggtcctttgactactatgttacaggactctctgacttggcagaagaaatagtcaaaagcttcaaggcctgtgctataatgaggtagaatttctaaaagaaaacttcccaaggtaatggacctgcctttgttgcccaggtaaatcggagactggccaagatattagagatcggttaagagttacattgtgcatacaggtcccaaggctcaggacaggtaaaaaaaattaatagaaccattaagggatccttaccaaattgacagcggagactggcgctatgattagatagctctcctaccctttatgctcttcagggatagaaacacccctggacagttttttagactgaccccccctataaattactctacagggggcccccctccactgataaaaaatagcctttgtacatggtgctgacatgctgctttcccagcctttgttctctaggctcaacgtgttccagtgagtgagacagcgagcgaaaaagcagctccagaaggcctactcaagagaagaagacctgctacattagacgtctccacgcaaaaaaccttaagactccggtggaaaggcccttatcttatactcttgacagccctactttctacctttatgggacccttttgattttgcttctgcttttaattataggtccatgtgtgttaaataggcaagtcacctttattaaaacagaaattagtgcagtgtggcttttagttttaagacaacagtaccatgccctaaagtaaaggatca

SEQ ID NO: 25175 - DNA, 1118 bp, Mus musculus
cagttgtattagctcctactcaaagggctcattgtgtatatgtttagaatatttcttacattatcatggaaacatatacccttttcagtgtacttcagcatcacatagcatttgtttccttaagttcgtgacacagtgtttcctgttaaagattttataggtaaattgatagcctgagagaggtttaagatctaatgggctggtaacaactttgactaagccattgggtttatctactcagtcacattttaaggaagttctacaaaacacttgagtacaggtagttaaaagggggagattccacagtccaactcatgttgtctgttaatctctgtttggctgtatgaccaacccaaaattctacagggagtcttaattaccagttcagttactaatctacttgagtttgatgacaagtcagaactgtatgttgctgaatcacacagccaaccttttctgtgtaaatattcttaaatatctagatctcccagttcctgtgaacttgagttagatctacagattttcctcccaagatcaatccaaattcttggaccaggtaagaacagatgacttgtaggagtggagaacagaggagcaacattgtccacactggtctttcaggtttgacaggcctagtatccagtgttgacagcaggctacctacagtgacagctcaaggaagcaaatggtcggtggcagtatgagaattgctttattccatgttgttaaagacaatatagcatccagatgttttgtcatttaacacaggctggttttgaacttgctatgtaattaaggctcgtacttttacccaataaacctggcctaaaaatcatctttactagagaaacatacaaacttatgcaacacaatatatagataccagcaccatctcagatatataatccaaaaggcagagccccttgggctccatgtgatggttatttttgacagcatacttcattgattgaaagtaccttaagaaagtcacaaacgacatctagtgtgcctgagaatgttctcagggagtattcatcagggaagaaactcctgctgcatttgtgaggctccatatgatttgctaggggtccatgtgaaataacaggagaaagaggaaa

SEQ ID NO: 25176 - DNA, 2199 bp, Mus musculus
caggagatgtgtaagagtattggaaaactggagagtcagtatgtgggcattgcagtcctcgagtctcatctgcaaatgaaaagcattaaaatagagctcactggtgctgctcctgagcctgcagatgcttggtcctctggttcctgacatgaatagcagagcagctatgacatgtttgactctaatttgctgtctgttttaaaaactgaaatagtcacctgctctactcttccctggtttttaaaagaaaaatctgtttctttcttaatattgatttttttttttcccctgacagaagttctgagagactacatcaagccaggtggccagtgcttggaattgtttgctaggaatttacagccaggttggatgagttggggcaacgaagtcctcaagtttcagcacatggattatttcattgctctggagtccggatgctgactgtaaaagttgtgctgtctttacctcagctccttccttcaaacttatttccccttgtaccagtcagtgtgcttagacatatgaacttttacaccattcagtgtacccagaagtataaattttataccaatcaatgtgcatagaaatatacatacatctcctacagccctttatagtgagtctcttccttccttccttgatctctggcgaacagtggtttgttttcttacgttagtgtttcctaacgttgtgtctggcttcttccactgagcattcaggaaaaccactgacactgtatataaaccactcgctgcttactaaggggattgttagactgaaagtacttggacaagcttgcttcacctacccactgatttcatcagacattaattttgaggtttgttcatcttttgagggcctaagactaatatcttttattattcctttaaactgccagttgaatacaaggctcattgaattattaagtatattcctttaagctttttatggagttttcctgtctaaattttttgatttgtttccatgcaccagatatcctgacctgcacctgactttctgccttaaaaataaaaccaagggcacacctagcttgagactagcttagttgttgcccttgctctgccctccatgtgggatttatctactgtgtccatgtcagttctcaaactcatcttccctggggtcccaagtctcccttttcaagctcccaactctagagacagttcatctagttggatggacactcacaatgtagcccaggttagccttcaactttaatcttcttacattgggttccaggcatgcatcattataccaggccctagatgtaaaccctgaaagaatttttagtttcaagaacacatgaggttaaggcttttctactcatatgattcaaaagactgtaactatttcaaagggctagtctatgttttttctttttctttaatttttttaaaaaagtactatttctatgtatttgggtgtttgtatatatgtatgtgcactatgtatgtgcctgatgcctgcataggccaaaagaatcattagatcccctggagggatgattgtgagccattctttagaagagcaacccgtgctctaaaccgctaaaccaccttcagccttgggcctcacattctttgaaggagtttctatgtcccctcacttttcctatcatgtaccaccaacttgttgcgggcttggggtttcccactcgcacccgtttctgaaatgactctgagacttaattgtttatgaataaatgcctaggccataagttttggctcatttcccaactaatttgtaacttatataatctgtttgttctagtttgtgtctgccacatggttggttacctctccttagtttcatatgcccgattgctcttagtccaggtggccgatcttactgctcttgtatctttcccagaattctttctttctctgctggatgtcccaccttctatttcctgcctcagctaataggccattaggtttttattgacaggtgatgcttctacacagtacataagagattttctctacaacttgtcacatcctcggaagtgctaaagcactgtgtgtacagttcccagtttaccaatatcttgctttatcctcaatacatgcttatgaagatacagctaagatgagggagcaggtcctcagaataactggtgtggctggagactaagaattgaattctatttgggttccttactgaaggtactttatgttg

SEQ ID NO: 25177 - DNA, 1194 bp, Mus musculus
cagggtttctctgtgtagccctggctgtcctggaactcattttgtagaccaggctggccttgaactcaaaatccacctgcctctgctgagaaaaatgttttctaatgtctcctgtgatttcatctttgacctgcatgaattatttagaagagaactatttcagttgcatttgtggttgatcttagtatttttttttctttctttcttgattttcaacttaagtcatttggagtataaaaataaattctagttctttaaagaatgttgtttcgttggccagtatatgaattatcttggagattgtactctgtggggttaaaaaggatgtatgttctgtaactgctggatgcagtgctcctatgtatagtattgaggactttggtatctgtgcaatttttgtgttgttaattgtgtttttgtgttaattgttctactcttactgggtagtgttgcaggatgtttgatcacatggtgagtcctgagactgtgctgcttactggaaaacctgtttctaattgtggtgtggcttagccctagcacagacttttaatctaagagctatctgtttattgttatcaggattaaataaagtcaaccatatgtcaggaggtggaacaagcaaacatttgacaaagagtgaacataggaaaataccatagagtgtaagagaaagtcaggaggatggatagagagatacacaggaagtagaaggggggggacattcatgttgatgttaggtcttgcttctacctcccagtcccacgtgcccagaaataagactcagcctcaaagtatatttacatatacctttgccatatagctaggctcttctcagactagagtcataacttatgatatattttaatctacattatgttatgtggctggttccctgtgctcaggtaccaagtgtctgtctgctcacatcttcccaggcagatctcccgcctagctctatcccagaattccttttactccctggatgtcccaacagtaggttttaaaagatgggtatggtcagtatttctcccatactgagatatgtgagatgtggttcccagcactcctgtgaagaataagattttaggaagtgaacgagttagttgaccatggtgtttcacagatggtggcagaagatatggagtgtctgggccaggacagagaactctgtggctctgctttatgttcacaggt

SEQ ID NO: 25178 - DNA, 1157 bp, Mus musculus
ctttaacataagatatggagatgtagaatttggagatttcccagctggcttttggtcttgttttggtccagtatttcctcacaatatcatttaggaatggtgaagtatatcttgtgtagttggaactatatgttttttgattttcttttttttgttgtttttttttgtttgtttgtttttttttttgtttttttgagacagggtttctctgtagccctggctgtcctggaactcactctgtagaccaggctggcctcaaactcagaaatccgcctgcctctgcctcccgagtgctaggattaaaggtgtgcgccaccatgcctagctcttgattttcttttttaggggattagttacatgattggatgaatctcagaagagactttgaactttgaacttttaacatttttgagactggtatagatgatggggacttttaaagttggacctcatgtagttttcattatgctatgtttaagtatggtccccatatattcctgtactccaacaagcttataggggccaggtagtggaatgtgggagtttaaatatgtttgtcacagggagtagctctattcagaagtgtgaccttgttggaggaagtggatcagtctggtggtaggctttgaagctctactcagtgcagaacagaccctcctggtagccccctgaaagacagtctcttcctggatgcctttagatcaaaatgcagaactctcaactccttgtctgcctgcatgttgccatgcttcctgctatgatgaaaatagactaaacctctgaaactgtaagccagccccagttaaaggtttgcttttatgagagttgccttggccatgatgtctattcctagcaatggaaatgctaagacagaaaccctgtgagtatatggtgaagcctttgcacaattctgtaggcttcatcatcatgaaagaatatgtactggagataaaccttttgattgtattcactatggttaagcttcttactatggttaagaaggaatgagtttgacagatagttatcattctgtctgtttagacggtgagcatcacacaggagtttatgacaagctcattcttaggaactgtctacatctgttaaatcagaagttttgctctcagcaatgtaaaatctgtaacattcaggaaacaagc

SEQ ID NO: 25179 - DNA, 1075 bp, Mus musculus
aaaccttatcaatgtaatcaatgtggtaaagcctttgcacatcacactagtctccaatatcataaaagaacacattttagaaagaaacattagaatgcaatcaatgttgtaaagactttggatgtaagactaatctccaaagacataaaagaacatatactggacagaaaccttatgaatgtaatcaatgtggtaaagcatttaaaagtcacagtcatctacagcaacataaaagaacacagaggaaagaaacctggttattgtttacatattgacataaggagatacaagtatgtttaaaattgacaaggaatggattgtgattgctactcttggttttcaatataagatataaaatggaaagcataggtccaggcatggtggtacatgcctttaaaccctaggagatgagcatcaagcatctgagttcaagtccatcctgatacagaacaagttgcagatgaagaaaagcttaggtctaggcctgtggatacagagcctccagatctctgagttcaggacagccaagctgaggcagtaaaggagttggagaagagaaaactggtgataatgtaatagaaggggccatgtcccaggcccagcaagcagcagaacccagcagctttgtccatgtggctctggctttagaagcaaaaatagaaggggctactggaaaaattgatgcttgttagctgtagctaagagattagaagtgatgaagaagagaccagcatcactgagatgaaatcttctaggaagtgttttctgagaggacaaagaagctgtgttccagagatagccacattgtaccttgtgttgcagctgaacttggtcacatgtaagaatcacccaggtggtactggttttgaaggcatgaaggtgtcctgcagaggcttggcaccatgaagggagcataaatgaggctatcagtgaagcctagttgcaacagaagaacccagcattttgaagatgccagtcccatgggatgagcaggacgaacagcagcagaagtagagtggagtcaaccagagcttagagtgatacagagggcagagctggagaagtggcccgatct

SEQ ID NO: 25180 - DNA, 1173 bp, Mus musculus
tattccctgggccaagcatattcaaactaccacaataatcaaaaataaaaccaaccaaacaaggacccccctcacccccatggcattgacttctacaaaatgataaaaggcacagagaataaaaaaagtattgctgattttttgagatttatattaatttggtatagtccaataacataaagacaatataaagtctacttgaaattagcgtattttagatattaccaaatgcagtttatcacagggacatatcttcaaagattgcatgaacgtttaaaacagagaacacacacacacacacacacacacacacacacacacatacggttgtatgttccattgtatgcacatagatcagaggacagctttgtgcctggcatgatagactagggaggtagaggcaggcagatctcaatgggttcaaagccatcttggtctacttaatgagttctaggccaatcaaggttgtatagttagtacctggagagaggggtaggaggttatctttctggaatcagctcttgctgtagactaaaaaaaaaattaaagtttaataccacttattgtagaataatgaataatgaggagtttcctatgtagtacagactggccttgaacttgactgttcctgccttagcctccagagtactaggattaaatatcatcatactcaaagaggcagcaatgtaagttaaggccactttgtagagcaatttatctgtatctactagtgttcaagagccagataaagtccatccatttatgctgaaattcacactcaagagaaattcttacatatgtgtctaatcctttaggttcaggtctgtcaagctccaggtcctgctggaaatgcactcaggtagagactctgtaggatggtcatgtcaggaaccacatatgggatatctaaatgcacaccaatgggaaggaggaaagtctgtgctgcatgagtaaggccagggagcccagtgcacaaacctgggctactgattcaggaactctagagaagatatgctctatagagatatgtggctctatagagaagtctgctacccagccaggctcaagaactgtggccagagagacctgccttcctctgctattagccttggtgtgggcctcactgtgccctgtgacaatgggtactagtgttgctacaggatagagctctcc

SEQ ID NO: 25181 - DNA, 1219 bp, Mus musculus
tcaagcttggcggacagattgcaagtttgttaactagttcaccaccgcttttggctgcggggacgtctttagatcgaataacaagtctgactttagcatttctcttgtggtaagtatctgcttgaagataggcacgtattagggcacctgtaatgcttgcattaccttcggagaggctctcccagcacctgcctagtgacaagtgggctatatttaggccgaggttttggtgcttgctagattcatagacagagtgccctctagtgccttgtaagggacgtgtttgtctttcattgtttcctcagccttttctacttaagctttgtaataagttcattaggttttgcttttcttagttatagataagtgattttgaaatactgagttaccagtgacctttgtgtagtttgcgacattgtttattcagttggatttatttgtaacccagttttgaatttgcagttgaattgagaataaagaggattacaaggcttccccacaatttagctcacattgcattgtttctgagatgttccttaagaagctgttgttttgtcagatggtgctttttgtgaagtctgtagattgcagcagctatggagcaactgaggagccccaaaccagacactgttgtagtgtgatcctgaaatcaatgacttttttttttttggtgcatgcatttactttagaaaaaatattggtctgtttcttttaagcaaactttaaatttctattcaccatttgactgtcagagcaggaaagaaaatagtaatacaataaaatagaataattaaagtatcaagtatgtttaaaggtgaataattaaggtattcatttatattagaattttagccattgcttgtgaattatatattcatatacttatgttgatagaatgaatatgtcatctttgaagcactttcttcttatagtttgtttaccaccactaggctacagtttcaaatttaaaattttcaaaaacactaaaacttataaatgttgaacaatatccaacatttcccataagacccaactgtagtttggaaataactatttttctgaatctgtcacttttctcagtgacatttgaaaagatgttatattgaaaacaataaatgaaatttatatcctttttattaatgtgcaaaactgcacccgattgaagaacattttttgggactgtggcagaaatgctcttagcagtctttggattcttggc

SEQ ID NO: 25182 - DNA, 1223 bp, Mus musculus
tcctctccttctaccactccctaatgcacacacacacacacacacacacacacacacaaacacagttcctgagttccagggataaccagagctctactgtagtgaggccctgtctcaaaagaaaaaaaaaatgtagtggagctaggaatagtggcacagcaagctttgaatcccagcattcaggagacagatgtaggtgagtctctgtgtttgaggccagcctggcctacatagcgaaatctaggagagccagggctgcacagggaaaccctgtgtcaaacaaaaacaaaaaaaatcaacaaacaaaacccccaacaacaacaaaattaatgtgagatttcagttttgaatcttctaattacagtttgaaattaaaatagtttggaattacatctgcttaaatatttacatgcttatgtatttgaatgacttctatgaaaaactttaggattgaaaagaaacatgcattaagtgaagagaactcaggtcttactttaagtttgaatatattgtgctcctttgcttgggaacttttccagttttcaacttttgatttttgagacagggtctcactatggagctctagttggaattcattatagacaggctgatcctgaattcatagtcatctgcttaactctgtctctttttccacagtgctggtataaaaggggtgcaacactgtgcctggctaggttcccactcttaaaatccatgttttctgtcgttatcagttatataagacctaaaatttgccttatgggcctggggatgtataactaaaaattagtggcttaagagatgagtaggtaagggaatgaatgaatgacagaaatatctcttcacagtgcctatgataccagctgagtatggcagtgtgtgcctatgataccagctgagtatggcagtgtgtgcctatgataccagctgagtatggcagtgtgtgcttataatctcagctgagtatggcggtgtgtgcctgtgatcacagctgagtatggtagtgtgtccctgtaatcccagcatgtaagaggtagaggcaatagaattacgaattcaaggtcatcttctagttctaggacaacctggggtgcatgaggacctacatcaaaaactcgaaacaacaaatacatttcttttcactgttatatatgttggaaactttctgtaatagttttgctattttaggacaaggtctcactgtagcctagactagcctagaa

SEQ ID NO: 25183 - DNA, 1099 bp, Mus musculus
gggctctggggtctgtatctgctcactcagtgatcaggtcaagaagcatctcaggctttagtctttgaagtgataatttcagtggccaaactgtagggtatatgtgaacacaaaagaaaagcataggccaaagtggggagaaaaagatgtgcaaacattgggcgaagacaaaggagtttcgactagtggagatggtcttctttgtgctcactaggcctgtcctttcattgagcttcagtaccatagcttctgtaccgtgctccccgccccagagtctacactttgcattgtagctcactatatgtaggcagcaaggttggggaatgagtcagaagttccagggtaaatgaggcaactgcatttagaagtttaacttgtatttgtttgcccacaagaataatttctatatgtcactagggaatatttatatttacattatacctttatacatacaagatccatttaattaatcttacttcttagtattaaaaatttagcatgttttggtgctttgatgttatatataagtatttaagaataaaaaaagctgctagcattctttggattttcgaatagtttcactagaactatgcattgttttgagtcaccctcataatcttgtgacaagagtatcaaacttgatgaaataaaatatctcccacatatagttacattttttttcttcgtatttatatgtatgcagattagtgtatgtggatacacttgcttacatacaaaggctagaggctgacataggtgtcttctatggcttttgtaccttatggtttgagatgaagtctcacctggagctcactatttttggcaagactttctggccagtccaggccctggtattcactcatcttcattaactgctaaggttacagatgtagtacactaaccccagcttttacatgggtggtggggagtgaactcaggtcctcatgtttgcacaactcagccatctccctggcccaaagtcatatttttaatatttgaaagatatttgttgaaaattgatttgattattttgatttcctatttttattttttgttagttccagggatccatcttgaaccttgtacatgttagacaagt

SEQ ID NO: 25184 - DNA, 1761 bp, Mus musculus
ttctgattttcttcctacatgtgaaatatgtttgatgtttacttttttatcttaaatttcaagcctgtgtgtgtgagtgagtgtgtagaaattgctttttttttttcttccacagtgtggttacacagggttgaacttaagccatcagccttagaggatacacatagagttcccaactgtctctctttgtcctttgtttcttccattcagttctggttttgccacctctctctcccaccagttctgctttagctttcctgttgctaattatctaaattcactgcttaaactctgacaaagttgtaatgggtcaactgttactatatactacatactccctacttcagcattgacagcccatgtcctctaggcaagaactttcaaatgcctttgcattaaccttaagatgtctctggttggttggttggttggttggttggtttgtttgtttgtttaaggaaaacaatctagaatatcaaatggaaacactttggatgatcactgtactgtcaatttttgttttaatcgtaggtgaagttaaaatgaactatttgggaaaaccatatgtagctatggttacaacctaccaaatggcagttcttcttgcctttaacaacagtgaaactgtcagctacaaagaacttcaagacagtacccagatgaatgaaaaggagctgaccaaaacaatcaaatcattacttgatgtgaaaatgattaaccatgattcagaaaaggtaaccttcccaagggatttcaacccttagcagatagaggctcttgtatgggatattggcagttttaaggttgtgtgatattcatatgactctgtaagttagcttagcaattttcccagaagaaaaggccattggcttttctaaaaataaacaaaatactattgtgtgttaactggatacataagaaccttggaagcaagagttcctatagaatcaactcacttgttagtattgtggctactgcagcagtttcagacagaagatgtatatatattggctgggccttaaaatagctaattcctaaatagaaactgaataatgttctggtaaatgtgaaatcagaaaaaaaaaaatttgttttaaatataggaagatatcgatgcagaatcttcattttcattaaatatgagcttcagcagtaagagaacaaaatttaagattactacgtcaatgcagaaggatacgccacaagtaagtactggtttgaatgtcatctcttctagaaatatttaggcagtgttttgaaagagtctattttataccaagatcgagcaaacctctgcactctgaaattaataacatgataatacttctctggtttattcttgcagttgttggccttattgactgccagtatgttagtgtttaaaaaataaacagcttaggcaaaacagatccagctcagttatctactcattaattagcacatatcaagtataggtggttgtggctttattgtgatattttcacatgtgtatacaatatatttctctcctccctctcttactctactgctgccaccctctgcccagtctactttgtttttcttttaatgactccatgagttgaatttggattacttaaaggaacttgggcaacttaacagtgtcttcacttctgccttagttagggttttattgctgtgaacagacagcatgactaaggcaactcttataaaaacaacttttaattggggctggctggcttacaggttcagaggttctgtccattatcaaggtgggagcat

SEQ ID NO: 25185 - DNA, 1099 bp, Mus musculus
ggaggaatactggattccaagccagaaaattgtggtctttgtcttgactctgttgcaaggaaacttggatcaaatcacataagcctgtttgtaccttacttcccatttaagacaaaaaaggaaaagtcagttgcccagtgtacctgcagctttgttgtgcctgaaggagcataaggtaaagttgcctctcactctcattattcacagcttgcaggccttcctcacctggatgcattatctgacattccttctcttcctccctgcagagtgggcaataccataaatttaatgaatataaaaacactgtggtgtggcatgactgaacaggaatgggaggttgaactgattgaggagtcttggctttctctgctgagccctgtaattacagtgagctgtaaagcactgcacagcacatttgccatgagcactctagcaaatagcatagaattacagggttgcaagagtcttcagagaatagccctgctttcattttacagatgaggaaaccaaggttcaggccgggtgaggagtttgcctggggctgtacaggcttcctgatgatactgagtgagggactgaaatctgacccctggtaagccttcccattgacctcgaaggtgtcagctggacttgaggcaaatactgccttagaggtcatgactgttggctagcacactgttactccagagtggaggccttccctttcttattggcttccattatcaaaataggaaacagttttctagaaaggtctcccttgtgggttgggttgttgatgtctccacagcattactgtttacttcttgaaaaaacacaggaccacatggaccatggatttgaacttttaaaactctgcatctaaactggggcttcagggtcttttagttgagattcgcatggggctttgtcttcctaagcaattcctcagctaaaaaatggcaaaacaactctaaaacctttgtacattgtaaactatgtgataagaatctgtaattattaccctaaaagtctccaaatacaagcatatgtcaactcatgtaaacaacacttgtgtaatctctggtgcagaataacgcaaaccatggctacagaaacacgg

SEQ ID NO: 25186 - DNA, 1194 bp, Mus musculus
tcccctttgagcagtattgcagtacttggattgcagtagcactgtaatgcttactgtggcataatatggctgctacgggttcattctgctcaagcctgcctatgcctgtctacaaagttatgccaggcactcagaagatttgatgacttactaggtctagtccagttatgtgtgcctctaattaatgtagttgacagtttcatgcatatgtaatatattctgctcacatgtcttcttccctactcctccactactactctccctttttcccaccagatcttcaccctactttcattttagtagtcaaaggtgactgtgcctaacctatcagacagtgtccatgtttgggtgatacttaaagaaggaaaagaacaggaagagaagagaggaaaagagtagaaaaccagtttatcaggcttgaatgctaagatgtggaaaaagcaaagatggtcttacctttgagtttcagtattttctatgaaatctttttagtgaaaaggaacactgtgctggctagttttgtgtcaacttaacacacaaatgagttatcagaaagaaggggggccttaattgagaaaatacctccataagatctatatgtaaggcattttcttaattagtgattaatgagggagagcccagctcattgttggtagttctatttctgggctggtggtcctgtgttctatacataaaagcagactgaacaagccagtaagcagcaccccttcatgacttctgcatcagttcttgtctccaatatcttctgtcctgacttcctttggtaataaacagcagtatggaagtataagctgggttttggtcatggtgtttcatctcagcaatagaaactctaagataaatacgtcagtagagaaagtctctgggtttttaattgaatgtgtttatagaaatatttttaatgtgactcttatttttctttgctagtaattttttaaattagaaacagatttttttcatactatatattttgattatggttttccctccccaactcctcccagatgctcttcgattccacactagcccttgtccacagctttttttttgtctcagaatacaaacaggcagcttaaaaaataagataaagtaaaaacatacatacaaatagaaaaagcagctgaagaaaaagcacaagtaacacacacaaatgccgagacacacatttgcaca

SEQ ID NO: 25187 - DNA, 1135 bp, Mus musculus
ccagcctggtctatagagtgagttccgggacagccagggctttacagagaaaccctgtcttgataaaaaccacacacacacacacacacacacacacacaaattagttattcctttctgagtctcaaaatgaaagacagagccaaccccatggtggttctgtagcaactgtaccaaggaactgcactgcatcctggagaggaaaaatacatgatctcattaaagagataattagcatggcttactgtgaacctgccttcctgaaggcgattccttggctggatgagtaaaatggggttagcccttaggaaggaaacagaggcatgtcttcacctggaggtagatgccattctttaatgaaaagcttcccgacaccgtaagaagaagtatccctaaaatcacttaggaaatggggaagtagatacaacccatttctaccacaaaaacctatggatccatttccaaagctgttcacaagaaaggattaatgtctggactggagtgttagtttctactcttacacatactcccaactccctttgctttaacatgcagtggtcagaagttactctgttcactgccataacttaatgtaaagactgggagcttacacaaagtatgggtgttggaggtcaaagctggattccaagcaatcagacccagtcacatttttctcccaatacttagtatggtggctcagtttgggtttctatttctctgaagagacaccatgaccacagaaattcttataaaggaacacatttaactgggactggcttacagttcaaaggtttagttcattatcatcatggctggaagcagacaagcagacatggtgctggagaaatgtgcattccagacattgaatctgagatatcaggcttggggataagctttatctgttgagccatctcaatagctcccaacctcaaaacaagccttttaaatacttaatgacttcctaaaagtttcagatttagagcactttatatttcaaatttgataattatggatacttaactgataaagtctatgctgttatcacattatacataaatggtatttattctagaaatgtgactttttacattttaaagtcagagtaaaacagaaatgaattatgcatccatccacct

SEQ ID NO: 25188 - DNA, 1768 bp, Mus musculus
ttgcacagacagagctgtgagagtacatttgaagataccgctctcgaaatcaaccaacttcacggtcattttgcatccatgtccactagacttgccaacccccatacttctgcctttgtattcctatggggaatcttccccgagaagagacgtttctcctgcctactgccttgctcctttaaagaaacatatatttttgtctagaatgactagttaatcttgcatattctgaaaagtgcttgggatcagtacctaggtggcattctatgtgcacacataccatgacggaagtataaaggggcccgtgtttccactattgattggcctgcagagttcgtgtattttgtggcatttcacccttctgcctgtgaaaggtttttgttaactaatattttccaaagcctttgtccccttccttcccctcttacctcttcccctgtcctttcctcttttcttcccctcaccctccacctctctttctcgattaattttttgagacatttagacattttctgacatgccaaattcctgcagtatgagcccatggctggtcagtcctctggtcctaagttcaaacaggactttcacagtctcttatctccaccatatcattttatttcctaagaacctcacatgcactgactggactacacaaagcagagtccaagtagtctcgatacaccttcccagatgcacacatctacagtcttgatttgaacctgtttctcatggccgtccttgtccaaagcttggctcacgtagggaggggtttgagctgtaaatctccctggggcagtggacaaacaggtgagtggtttgcaatggtggttgaatcatctgcgaggggccagtgaaggctaaagtatactagtgtctgtgtgcatgtgtatacatgtgaagaccccagtgcacgcctgtgtacctgtgtacatactggtgctgtactgacttcctgtcacataacctgctaccgtctgaagactctaggacagagagaaggatcctgaaggaaagctgttgtgccttatgtatctcagtctggaacaagctgcacttccattttgtcttgtttgagatcgcatcatacttccccacagctggtcagtcacatagtgactattatagattaacttaagttttccatattctagcccataagcaaatcttttggaaggaagtagtaacgttaaacttagaaacttgaaattttgactacaacttttcatattcctaggtaatgtatatctgaccaaaaatgattttgctgaggtcttaaggtcaatacaaaccaccatttcctatgtaaatttcagatgtgcccatgacttttggtggaaaaaaaagtcttccatattctgtgtttgtaattatttttctcattacacatgttggtattcaataatttggagtttgtgaaattaaaaattctaatttcaaccatttgagctaaaaagtataggaggaattgtgcctgtggttgtttcagaacttaaagacatgatagtgaggtggttgtctttggcctcttcgggggaaatttcctgaaggactgaaaatgagatattttacttattctaatgaatatttacacattcagttgtgtttctgtaagccctgggaaacctctaaagatgcaaccagttcctgggagggaccatcaggattatttccataattataaatacatatttcctttattaataaagaccctgattgtgcatcacctctttggtattgtgtcttctttactgggacggtggatttaggg

SEQ ID NO: 25189 - DNA, 1117 bp, Mus musculus
atggagatggggctggggaaggggtgcttttgttcattgccttgtgccacttcaggtcagctcttggcttttctgtttttacagttgaagatggctgactcatatccctctggagccatgagtcaaagtaaactctttcttctgtaagtcttgtttggttatgatattttatcacagcaacagaagagtaactacccccaccccccaccccaacacatacaccttaaaaagttctgcaagctcactgaacttcctgtggaaaacttactttgacttttgagcacagacactagtctcaggccagatagcaacacttccagattttgcttgctccagacctataggctccaacacagtttcttctccactttctacttggctagaccagcggatctcaatcagtgggtctccatccctttgtaggatatcagatatcctacatataacatatttacattatgattcataacagtagcaaaattatagttatgaactaggaacaaaataatattgtggttggggtcagcacctcatgaggcactgtattaaacgtcacagcattaggaaggctgagaaccactgagctagctgaagatttgattaagagtagtgctctatttacaaaatcttgacacaatctctcttcccttcttaaaaatttatttttgcagttcattttgttgttgttgttgttgtgtgaatgggtgaggaggttgcacaggtgtcccagagcccatgtagatgtcagaggacagcttgtgggaattggttcacacctttcaccatgtgagtcccagggattgaactcaacttgtcaggcctgtagacaactgtctacccactgagtcatcctattggctctcctaccaagatttttatcctctttggttgccatattcacacagattgcttatagtttgtccacagtggttgctctgtttcatcttttcagaatggtcttcccattgttctagatactagggaacaaatgagcaaattgatgagatgtggcagcaggcaccatcacctcatttcagttaggtctggtgaggcagctaccatcaccaagtatatgtgtgtgcatgtgtctgcaaactcagtgttttataaaattttg

SEQ ID NO: 25190 - DNA, 1195 bp, Mus musculus
gacacctgggcttctgaacgtggcacatgcacttggcagtaaggacccaaagccactaagcagtagcacagaccaggtccacacttgcagggacatgtgcatttcagcaggatttgtttccatgtccatcaagagaaggaaaacaaagcaaagtcttccagggtcccctgctaggtgtcttcttcctttctagcaaactataattaaacctcggccctacgtgggcctagtcatcattgcagtgtataaggtgacctatgtctgtttgaagacagtcatccagtgtctgggactttttccaggaaatcaaatcccattgtagaattggctgttttcgggtctgtgcctgtgtgtgaatcttaggcaggaatgggttgccctaactgctgctgcactaataaggtcagttaaggctgggatctcagatagcacaaaaaaagacctgaaaactcaaggaagggacctttgccacactcgtgctggaattgtctgtcatggctgaagagtgtcatgccgtggggtgatgtatgctcacgggttgtcattcctcctgtccctgaggaatggttgcttgcccttcatggctctggaatgtgtgcatgtgcatgcttctgcctgactgaacccaggcacagagtgaccggcacagcagactctgctcttcccatcctctacaatgttcctatttattttaacctgtaggaagaaggaggacttacagatgataatgccatttctaatgtgctttgggtaagcttaactctaatgcaggtgtccttctgtaacagaacacagtggaatccgctggtgggtgcaaagcttagacacacagcctggagacggaggtacaaagagagaggtgtctaccttatgaacactacagagaattctcagagccatgcctctgaataaggaagctggggattcttagtggaatcttatatgtatatatgtgtatgtatgtatatgtgtgcatgcatgtgtcagtcctgaggcaggataccaggaaacaggagagtatccatggtttcagctgagtacagtgcattcctgcccaggtcgctattggtgaatattccctcagctctgacccacatcatctgccactacatcagcatacaggatagtgtccctcccctcatatactctgtacttccctgaccattattcttaccttcttgattttgctcagctg

SEQ ID NO: 25191 - DNA, 1196 bp, Mus musculus
gggccacagagaagtcgctgccgctagacccgaaaatgaatggagatacatatttggactagtagttttttctgtcaaagaagaaagtatttttgaatcagagtttttcaaaacctacagcttgttctagagttgagcattctgtaaatgtataagagaactcttctgattgttcttttccacagttcaggtgaactgaaaagaaaagtgtcttttccgttcccctcagccaagtgctgcctcagtggccgctgcagccctacccttctggtctggctcagcactgccttttttaaagcaattctctttataaagtgttattttgatagtttgtgaattctaaatatatatatatatatttatataaacacatataaatcaagtatgtatttaacaaagcaatatgtattcattcacttgcaactgttttctttggtgtcaaaacaatattagaggactgtgttgcttctgttgagttaagcctaccaccagtctgtcccgtgctcaggagtgcctccttcagccttaggtctggcttgtgctaagttctgcttccggtgctaaagcaaacaaagactttgtattcttagtgtgaactctgaagaatctatttgaatcaacctttctaccttaatatctccccccagaaatgtatagtgccttgtttatgtacagtttatatacagaaaagtttgctctgcttttttgatgctggtttggaatattatctacagctttattctcagtagaaataaaaacatctcaatttctcatacccattgtaaacattacacatgtcattttgtggcacaggatcccaaaataaaatatcaaagtaatcccaattcattgatcagttcacattgaattccaagcctgttcatggggtggggcactattcctgtaagggggggggggggggacggacactatgtagctgtccaacaaacactagtgtgctgcattggtgccaactcctgagactctgaacttcaacgcagggcaggacataagattaaatagacctggcagacacttgacccataaatttgctctaaacactgaacatgttcttaacaccacagctgcatcgatactcactttaagatctcagtgccttttctccaagtgtgaattgatgtgtaaggtgttaagatataaactatggagttagggtaaatagctcggtggggagt

SEQ ID NO: 25192 - DNA, 1195 bp, Mus musculus
tctaatgctgcattctcaaacttctgggagagcacagtagtgaagacaggtctacttagaatgcaatcactccctggcttcaggtagcttggctcagcacatcctttgcctgtggagtctttattagatagaaatggtgttgagaccctctctggtgtcttcagatctgatgagaaaaacactggttctgtccttcttgctatagggaggaaagtgaggccaaaatagattgaggattgttgtcctgcctagattcatgctagaagtaaatagaagagccaaagacaggcctcacttctctgtcttgcatacactttgttttcttgtctctgaggaagtccgcagcccctgcaagtgtaattcatgggatcaggccatacattacaggtgctgctcaggtttactgcgtaggaggtaccacatgagaaactggtagcattcctggacctcttgactcacacctagagttctttggtgacctcagtagtattgtagagttagaaaatttatgggtaattcatattgttcttttaaattataaaagactcaaatgccaatttttaaaaagttctttatgattgtgatggttaagcatcactttgaagttggtgagattcagagacgcctgaggggttagtaaagcacgatacttctgggtgtgtctgtgcagagattccctgagatagccaatgaaggctctaaggaatccatgcacttctctcctggtgccttcatctcttggcattattgagcagtgatgaaaaagtaggaaataggtccaagtttgaggaaggaagtcttagtggtcagtccttgaagatatcctttgtcctgagtccgtctagtactcttccttccctctgcattcctgacagcagagggatagaacctcctccaccacatgctgacaccagaggatcctcatccaagcaatggaaccaggaagacgtggactgaacctcagaaactgtgagccagagtaaccctccatcccttatgtttctctgttgggtattctaataacagcaccaaaggatggctagcacagtactttaaaatatcatgaaatttccttgtggaatttcagctttataaagcccagtctagggctggggaagatggtcaccaaacccaacagcctgaattcagtctccagcaagcaggtaaaaagctggatgcaatggcatgcatctgt

SEQ ID NO: 25193 - DNA, 1192 bp, Mus musculus
cagaagtgagacagcgcaaaggaccatgggaaaggtgcccctatgaccccggcggagaacagtgtctcttaccaaacgcgtagcagttttagttaacaggtgaggggaggaaggcagtgtttgaagaactacctaagaaccctttcgcccgccccaagtccgggcgagaacttgatttgttcccgaggtctctccctttctgtctatcgacccccgaccttctcgcttctggggctgtgtgaagatggtgaagagtggccgcctaagcgcgccagcctgcgaagctcacaggcacgcggcagttggccgtatgcgcttgcgcgcaggtctaggcagggcggggcggggcggggcgtctcccgccgcgcgctggaggcggggcctaggccggagcgctgcgcccgcgggctgacctcgttgaagtcgacccatgacgtcaccccgccgtgacgcgtacgcagtaggaaaactgtaagtttgcgaggatcatgcagctctgccttgcagggctcgcggggcctacgttctgctcgctctcgcagtcgctgtgttggccgcgggcaccgggaaacctcgggttacacgggagctgcggagcgtgacgcggggctggtagtcgccccaggtgggagcgcgccctccctgcagagctggcttatggaggcgaggctgttccttagcctggcccacacctttccctctggcctttgacagccaagagtgtgcgactaaggcctgggaatggggaactggcgaggccctccttaaaattgataaagagattagatcttcaagtaggacatgcttggtcagtccgggatggtcagtctgcgccctcaaggactagctgccctggtccgccttcccttgggatcctgcaagtgcccaggttgcttatgacaaattacgtgcagtgttgcctcaagccttcttctttctatagggctgcagcatcttgaaaccctgtgagttaacctaagctatgtaatcctacacaacagttaagacaacatttattattctagggaatgtggtaatctatctgtatgtaaggatctttctcagggcttggcctcccccacacacctaccccaacccatcggatcatgacttttgaacctgaaggtatctcagctatagtatcagttgatcaggaaccaagaaataactagtatcaatatcacagagattt

SEQ ID NO: 25194 - DNA, 1106 bp, Mus musculus
cccttcagagatttccagtgctgttcttggtcactaacaaaagtttgatttctctatttatcaatccttgcattatttgaatgccgtatgggggggggcagttattattgctgttaagtaggcagtagtcagagtaaagcagaagctgctgggttaaaatttaatcactcaatacattttacactttttaaaaaatttctgggattgaacatgggatattggacagcagccacttgactcctgagctacacccaattccaaaattctcacttcaatatgaaggagtgttgtacccagaaaactgatatttgagatccttggatggaaactacagagagcatgtaatttgaagtgtagtgccagacagaatcagtaatgcgtggctagcatgagtacgtgtcagactcagtgcttaagttaaccttgctcactggggaatgctagactggactgtgaaaatcaccatctctttggtgttttctcctttcttccttaaccccaaataagtgcactgttagaaatgtgtcctatgaggttttaactatgggaccatcacacacagccaacactcagttatgtcactgaaaatacagtcttgtggcaccatcactgaagggaaacttgtcgttgaacacatttatgtggcacaggactatattattattctccctccttaccattggttcacaatgcacccccaatgccccaatgttcacaatgctcccccaatgcccagtacttggttagagctgaacactgctgctgggtcacttttctaaattctctctatacccactgaggggtttttattttatgtgaatgaacaagggaggtggataaaaggaaaatcattccatatgagtagcaagttaggaaagttaaagtagtagtatagacttagagatagaaggatttgggaagattatcaaagcatttttcaaagagaaattgacaatagatgtggtggtttatgcctgtagtcctatcatttgggaggctgagacaggaagatagtgaatttgacactgtcagatactgagtgagacctcaagacagaggaaggaaagtgggaggcaagattaggaagggggatggagggagtgaag

SEQ ID NO: 25195 - DNA, 1101 bp, Mus musculus
ctgtctgcagattcctaatggcatggggagcatgaagaggtaataaacaggacagggtcctgaaaccctgcctgagaaagcttgggaagggtcctggttgtctcagtctgcagggaagtgtgtagtgaacctggaggtctgcttgtaaaaacagttaggcttgcttggggtggtatcagaatggggagaaggaagaaggcatgggcatgagtgacagcacctctggctcagtcctcagcctgtctattggtgaagtgctttttgaagaaaatgctgcagtttgtagggagcatgctgaatgttttgttgtaaatctgatgaccttccataacacccagtgaggaagtgtctgtgctcacatgctagagcaccatagattgaaaagattaaggaagtggtgcgtgatggagccagaatctgaccccagtctgtgggaaagaacctggctgtcttccacaggagtcctgtgggagacgccatgccttgtgctaaacagtttaagcattgactgataatcaaatatgcaaatacgctctactgaaggagctctacggagaggcttcttagatcccttgaaactctaatatctggtccttcaaatagccacactgctgagaaagacagggctcacctttcttcagcctcagggacttgaccctgcggcagcaggcagcaggcagcaggcagcaggcagcaggcagcaggcagcagcagtctcctttggtggtgcttttgtttagctcttgaaagaaaggaacacatcctgctgtaatactcactggagagatcagcacaatcacatgtcctaaggagccaccagtcttcaaaggtgtgacccacactgagtagatgtcagagatagtggctcgtcagactcagagaatcctaccttactggagctgataacctgtaaccataactgggttagaatcaaaattttaaaattaaacttgtgcaacaatatttcctttaaattttaaaaatatttcaaaagtttatcccaaagtctatctgatggccaaggaaaacaaacacctggtgtcctggttagtctagattgcatttcaagggaggccttttttgcaggggtgcctctggctt

SEQ ID NO: 25196 - DNA, 1207 bp, Mus musculus
accgctactcctactgcaagagaggagctgaagacagagatgctatggagcaggaagacgctgggcccgaagtcctgccggaagtcctggcgactgagcatgttggtgcccgggcgtctccctcacaggctgactcggacgagagagaaagtctgacaagggaagaagatgaagacagtgaaaaggaggaggaggaggaagataaagagatggaagaattacaggaaggaaaggaatgtgagaacccacagggggaggaggaggaggaggaggaggaggaagaggaggaagaagaggaggaagaggaggaagtggaagcggatgaagccgagcatgaggcagcagccaagactgatggtacagtggaggttggagctgcacagcaggcaggcagcttagagcagaaggccagcgagagcgagatggagagcgaaagcgagagtgagcagctgtctgaagagaagacaaatgaagcttaggagttcttctaaaaggaaattctacttggtaatgaaatttgctctatattacccacgcttttcatggaaacatggctccatggctcctgtgctatggttcctgctcactactgtgtaatgtcagaactgaaaaaaaaaaaattccgggtgtgcctgaacctcaaacctagtaatttttcatgcagttttcaaagttaggaacaaatttataacatgaagcagcttagaaaacattaatgactcagaaaacaaaggtttctcagcaggttacaggaggctggatgggcgtccggcatggctagcagtattatcactcttacgttggctcattcttaagctctacaatgggagaaattttataatttttttattggtaaacatatgctaaatccgcttcagtattttattatgttttttaaaatgtgagaacttctgcactacagaattcccttcacagagcagtagaaagcagttcaaaccgtgctggctacctgctgctacccagtcagtcaggagataggacctctgacgttagatgccgtgttgccatctaacatgtattgctagccttaaggaagcagccagagaagagctggagtttcttactcgtgtgatttttaaatggagttcaaaggttgtcgttgagtcctgactccagggacgaccagtgttgatgtggcaaggccggcagaggcggcagaatcagtgttcgtgattgtttgcgtacg

SEQ ID NO: 25197 - DNA, 1157 bp, Mus musculus
agcactggggcatctcacacttttgttcctcagtagtcatttcatgttgattgactctcagaagtctctacagaaataaaagggaaattctccaaactacttaatccatgtacttgcgtgtcaggcatggatacgctattggtttttggttcacagccgttttccaaatgttagttattacggacccaggtgatgaacaacagcagctgatttttacctaccagtattattttatttcttttagtttatagatctgtgcaacatttttgtactgtatgtctttaagcctggcagtattaatacccttcttactgacacgtacttttagttttagaaaacttttatatttatgtgtcttatttttatatttctttatttattacacagtgtagtgtataatactgtagtttgtattaatacaataatatattttagtatgaaattttggaaagttgctaagatttacagtagagatgcagttggttcccgtgcgttgagatttgatttaacagtgttctgttaacatttatacttgcctccgactgtagaccagcctttaaatgggaaggtattagttttacaactacaatcaagtcattctccctttccccagtttttaataggaaactcttacactttgacactcactgtgtgcgactcatagcatgccgctctgcagtcttctgttaagagttggcccagccataactcattcccttagcaagccaaattagaattgccttctgtaaacagtgttgggaacaatgtttaacatgtgccaatttgttcctgtatccatgtatgtaagctaccaatctgactcttccttttaagttccttgttacaccatggtcattttctagttttttaccagactccccagctcacaataaacgcatcaacaaacctgacctgctgtcgttctttggatcatcaaatttcctttggaaaattgtctatgaagtgggcattacatcctagagcttcattcatcttgagctgagtttgttgacacaaagtatttgagacacttagcacaaagaatgccttttcctgtgggggaaattccctgaggaagccctctgcacaggttgtcccttcttccaaaacccacagagcaagagccttcccctcagggaacatcagggctgtgcaag

SEQ ID NO: 25198 - DNA, 2579 bp, Mus musculus
tttatagtttgccaaaacaagcttcatgtagcagccagacagaagtctacatggctaaacgaggtgtgtgtcatctagcatgttgagcactctctttctaaatgcagactgttagctttgtaatacaattcaaagttttattgttttttaaataagtttgttttttccccctagggttatagaaaatggagaaaaaaaccgaatgacctatcagagcatagcgattgtttttggccccacccttctaaagccagaaagagagactggtaatatagcagttcatactgtgtaccagaaccagattgtagagctgattctcctggaattaagcactgtctttggacgttgactctcacaaaagacagcctgtggaatagatgctggattccaagatttcaaatcttatacgtggtgtgtttcattttggaccaagcagtgactctgattttgcacttttttgagagtgaaggcgacagctgggccctcatttgctgcttgttgtgagcaaacagcaagttatgactgtgtaaatttggattcattttatcctggatgcttgcatttcatcctctgactatcagtaaacatcaaaactcagaattctaaccagtcatatacactggataatttggtaaggacaactctgtgagtcccctgtggtattgtccttgctgactgcaaactggataatgtagattccttctcatggtccgtaagctctttacttggtacaatgatactcactgtcagttatttttaaaatgctcttgggcatttaagacaaatgaagttgatcatttgaaacctgtgtactgcatatttcagggtgtttgcatgagtggcagtcttaagtgccgaagctcataacccagatagaatcccttgggtgaaggcttgctgtctgattttactgtctcatggcattcttgctagataccttagttgtctgttggagcagcacactgacaggacttaaaacactgtgatatactggagttctggttagtataagtcaaatcagggtatttggtacctgtcttgctgtactgaattatagctaataatccttattatatttagtgccatattgagtttttggtatgacactgtggagacagacattgtttgatgtaagtatgggctaaggacctaatataatttaccttatgtatataaccgtgttgtataggctcagagtacatctaacccaatgtttctaatcatgacattggtaactgtttccatgactattaggcttcctgcagatagaggccatgatttgggaaagttaagctgtgcacttttaggtttcaattacacttagaagcagaccactgcaatgagaatggtactgggaaatactgagtagacctactaaatagtgaacacactacaggagcagctccttaggttatttaatgtgtacagcagacattagaatcatcattacagaatcctaacccagctcaaatagtggaaacatgtaaattggatgttggatagaaaatgacactgcgaaatttgagtatttcctttttacattactactgtagattgatttgtacaataagacagggtttggaaggttttgttacagggaggcatggtctgttgaagatttttaaatgtatttttctagattaactgctgtatatgaaatgtctaatctaataaaggaaactacaatatgcttagagtttttttccattggaaatgtgcgttttagttcttaattgtgttgttgttttgtttttatttactggcatacttttatacctcattttagaaaagtcaaccaaatccatatttcctgtggcagattgacttttctcacttcgtatgttttctgttcttcctataccaacatttccctagcaccacacacttccttatcatcagtgtttgaaaggaaatgatttctgaccatgattctttttcctaggattgcatttatagtttccagattgccttcctggggaacaatttgtgtgtgtgtgtgtatgatctgtccaaaacctttctcctaagtcctgtggctaatatcttgtgtgtgtcgttgtaatcttcttaaataggtaacaaactaagctgtttgacagctcacgcagattgctttgggtggggaaaaattctaaaccagaatgtgtaacctgaagatgccattaataacgcagtgtgctttagggctcttgtgtcttgactgtgtaccaggaaatcaattagactcaaatctgtgatatgtgctgttctttctcttggtgatcataaacatgtcaaaggtttaaaattgtcctgtgtttcttgtttcaaagtacatgtgtgtatgcaaagtctttaatgttgtattggtctaccactaataattgtattgtaatagtgtatgtacaatgagataagtgtcttgtgttttcatcctttgtgaattaaaaattattgattgtttttataataacaaaaccagtaatattttccttcctttcttttttttttttttttgtttgcttgtttgtttatttgtttgagacagggtttctctgtgtagcctagctgtcctggaactcactctgtagaccaccgct

SEQ ID NO: 25199 - DNA, 1531 bp, Mus musculus
atcgggaagaagctctatgagggtaaaacaaaagaagtctatgaattgttagataacccaggcagagtcctcctgcagtccaaggaccagatcacagcagggaatgcagctaggaagaaccactggaaggcaaagccaccgtctccaataagatcaccagccacatatctcagttgttgcaggaagctggtttaaaaactgctttcaccaagaaatgtggggagactgctgctttcattgcaccccagtgtgaaatgattcccattgaatgggtgtgccgaagaaagcaactggatctttcctcaaaaggaaccctggtgtacaggaggggtacaagttctatccacccaaagtggagatgttcttcaaggatgatgccaataatgatccacagtgttctgaggagcaactcattgctgcaaaagtttgttttgctggccttgttatagggcagactgaagtggacatcatgagtcatgccacacaagctatttttgaaattctggagaaatcctggctgccacagaactgtacgctggttgatatgaagattgaatttggcgttgatgttaaccaccaaagagattgttcttgctgatgtcattgataatgattcctggagactatggccatcgggagatcagagccagcagaaggacaaacagtcttaccatgatctcaaagaagtaactccggaaggactccagatggtaaagaaaaactttgagtgggttgcagactgagtggagttacttctcaagtcagacagtcagtgcagggtggtagtgccgatgggcttcacctctgaccttggtcactgtgaagaaattaagaaggcttgtggaaattttgggattccatgtgaacttagagtaacatccacgcataaaggaccagatgagactttgagaattaaagcagaatatgaaggggatggcatacctactgtatttgtcgctgtggcgggcagaagcaatggtctaggcccagttctgtctggtaatactgcatatccggctatcagctgtcccccgaccacaccagactggggcgctcaggatgtgtggtcatctcttcgactgcccagtggtcttggctgttcaactatactttctccagaaggatcagctcagtttgctgctcagatatttggattaaacaaccatttggtgtgggccaaacttcgagcgagcatattaaacacgtggatagctttaaagcaggctgatgaaaaaaatcagacaatgcaatttgtaaaaaagcaatttaatttttaggagaaaagttacgtagtcctagtttggatttaaagaaaaaaaatcaaacaaaatgatttcacataagagaaaacaattcagttactaatgaacaaatggtactcggtgtttatgagttggcacattgtcagtggatattactaatattttctagctctacatagtgatatgtccctgtaaccttagcactccagaggctgaggcagcagaacctcttaagttcagggccaccctgagctgtgtattgagagtct

SEQ ID NO: 25200 - DNA, 1177 bp, Mus musculus
ctctgtatgcatggcatctctgtcccctcatgacctgtttctctctggaatttagcccctttctcactttccttggtcaagttcagacctttggcattcttcagcatatcagttagaggtgcagctggttgccagccacgctgttgtctcttagtgcttctcttcttgccacttgtttaccttgcctcataattggtaggccctgtgatgttctttctgcctttctccttctgtctccatctggctactctgaggttagaggtcagctcctctaggaaactgctctgattctgttctctgtctttcaggttgaattcagttctcctgtccaggttgagataggagtccatttctcagagcacttaacatattgtgtaatgattgtttagggtactttctgtacatttgggtatagcaagttttgttcttttatattcagatgagagtgctcagtacttagagggccagtgcttccatcttactccctgtgggaatttggggaaagtactgactccttttgaacagtgcctgaataaatgcagcctcttgcatgtttctcgtttctggttttaaatcagttttatctgttgactctggtaaaaaaaaaaatctctgacttaagttctttctcattcctgtactcacactgtctgtcactactgctgtcccattcgttttcactctttattttgatacctgaatctccttcctgctgctgctgcttttatgctattccagctgtagctttaaaaacgtcccagagtctcacttctgacagttcacattaagtcacccatgcagagaagttaatgttgttattctcattcttgggaaaacttttatctgtatctgatgaaaggacagtaaattcagaaggctctcaggtagtaacttatacatacttaaaattgtgtcattggcacttttgttgaaaggcaatagggttcttatgaaaagtatcaaatgtgtatctgagagatcaaacacctatgctttataaaatgattgtattaaaattgtaactaagttatatccaagttttcagtctgccaacaataaataagagttaacaaattttcagttagagatgcaagcaaagtttcaaacattatcttctaaatattattgagaaggtagtcaatattatatttatatgctatataaaaagatttatatt

SEQ ID NO: 25201 - DNA, 1176 bp, Mus musculus
tggaaagctgtgtaagaaagaaggatgagcaagccatagggagcaagctcatgagcagtactgcctatgtccttttctttacttcagttcctgcccgccctccctccctccctccctccctccctccctccctccctccctccctctttccctccctcccttccttcatgtaccttcttccttcatgttacctggaaatctaagaaacaaaccacgtcctccccaagttgcttttggtcctggtgtttatcacagcaacagggaagttactaagaaactgtacagataccagtatttacccgcattatacagatgggaaaagtagttgagaagagttcagctacttatccaggggcagaaaacaggaaagtgatccatcagactcggaacttaggccacccgacttcagattctgtgcatcccatcttccatatgctatcctgcctgtaacactttactgaaggatgagcagtttactaaagctataaatttaatatgaaaatcaacattcagtgataagaaaaggttaatgggtctacagccataccaccctgaacgcgcctgatcttgtctgatcttggaagctaagcagggtcgggcctggttagtacttggatgggagaaaaggttaatggttataagctgtaagaacacaattaatagccgggcgtggtggcgcacgcctttaatcccagcactcgggaggcagaggtaggcggatttctgacttcgaggccagcctggtctacagagtgagttccaggatagccaggactacacagagaaaccctgtctcgaaaaacaacaacaaaaaagaacaccattaaaaattcttcagaaaatcatacagactagactataaaaagcataaatttttcagctaggaaataaaacaatcctcctgtttaagtatgcattatttgggggaaaaaataagcagttcaggtcttctgattttactagtggcatttttatattcattccctccttccctccttccttcctttactctcttatttgaaaaacatccattacaattctgcttaaatttacgaatgaagtaatagccacaaggtctgcccttgagaaactttgcaagcaaccaaagagctcttcccaaatttcacatggtaagttcccaagaaagaatttatcattctcagaaaatataaagcc

SEQ ID NO: 25202 - DNA, 1536 bp, Mus musculus
tgaagttagagtctttagctgcatatgtatcaaaagatggcctagtcggccatcactgcaaagagaggcccattggacttgcaaactttatatgccccagtacaggggaacgccagggccaaaaagggggagtgggtgggtaggggattgggggggggtatgggggacctttgggatagcattgaaaatgtaaatgaggaaaatacctaattaaaaaaaaaatcttctttaaaaaaaaaaaaaaagatttgaagttagccgggcagtggtggcacacgcctttaatcccagtacttggtaggcagaggcaggcagatttctgagttcaaggccagcagttccaggacagccagggctacacagagaaaccctgtctcaaaaaaacaaaaaacaaaaacaaaaacaaaacaaaacaaaaggtaatgatttttaaatggtatgtataatgtttatgagtatcaaatttagattacattaattttttctttattctttctctgcttaaataatagtgttatattaatgcatcgaggcacaaggcataatgtggcatgctatctgttttgagagtgagtattactgagtagaaatggccgagagaagtggaaagatcactgcaggacaagcgtatattgaggtggagtatgattatgagtatgacgcaaaggacagaaagattgtgatcagacaaggggagcgctacctcctggtgaagaagaccaatgatgactggtggcaagtcagacctgatgagaactcaaaagcattttatgtgccagcacagtatgtcaaggaggtcactcgcaaagctctgatgccacctgtgaagcaggcaacaggactgccaaataactctatgaagacaatacagagtatgcatctccagagatcgacagaaaatgtgaacaaaatgcctgagctttcaagttttggaaagccatcgtcatctgttcaaggaacaggtcttattcgtgatgccaatcagaatttcggatccaattataattcaggccagactctcaacctaagcctggacctgacccataataatggaaagtttaacagtgactcacattctcctaaagtttccagccagaataggacacgcttatttggtcattttcccgggccagagttcttggacatagagaaaactagcttctctcaggaacagtcatgtgactcagctggagaaggctccgaaagaatacagcaggattccgagtctggagatgaacttagcagcagctccactgagcagatgagggtaagagaaaaggccggtgaaatgcgagtttgcctaaataaaaatgatgttttaattaaaaccatagtgttataaatttggttgttttgctttatgtgttcggaacacacagagtcgatcctgatttaaagagcaggaaaaaatatgtaaaatagcttgtgacattcatagagaaaatccctatgtggtattcataattcttacatctatgtggggtgggagttattttgagcctgaaaacttttttttctccctactgatgtgcatta

SEQ ID NO: 25203 - DNA, 1950 bp, Mus musculus
ggactaagacattatagaattaaataattttcaaatgttaaataattgtattgactgataaatttatagcctctgaaaaatgagaaaaaaattgtgaacaggacagatgaagtataaatttaaaactacatggttaattttgctctgaaatcctataggtggttttcacctgttatactaaatcatacactataatttgtttagttagaaatagtaaactgtttgcaagtcactagtaattctcaaaaaaatattgttggccatagtgaataatttttaaattagaactaagtgtgtacctatttttggcacttatttttcaaataattaagctcaatcaagtatattttaaggatctataaaagtgacaggaagaccgggtgtggtggcgcacacctttaatcccagcacttgggaggcagaggcaggcggatttctgagttcgaggccagcctggtctacaaagtgagttccaagacagccagggctacacagagaaaccttgtctcgaaaaaccaaaaaaaaaaaaaaaaagtgacaggaagggtctcagcacctgcatcctcagtgcttggggcagctgtagccggaagcaaagacccacaggaaatgcagtgtctggggatctttgataagtagacaagcttttgaagttctgggttagaatctggctggcagaatctttggaaaagttttatatacagatatttgtattattaaatttggagccatagtcagaagactcagatcataattggcttatttttctatttccttaactattgtaatttccacttttataataattttgatttgaaaaataaatttatttatttttttaacagtcaaaatctttgctgttgtagtctgcagcctttaatgattgtgttgcttttatgattgaaagaagcactccacaaattgaagagagcgtgatgcagcgaggtgtaagtcgtggttagtgacgtgtatggctcctgtgctcatcgctgtctctgcgaggcatctggctgcatctaaaggacattcgttccaaatgaaaatttgcttttctggcagttttcataatggaaaaaaaattctcctttgtctgagtatagaagttttaagatgtatcatgggtatcggtgcttgtataacacacaatgaattgtaactagcatgttgttaagaaaacacattgttagttttttttaatcttaaatgtttcttttctatttataatttcaacctttcataaagtatactaagaatttcacaaatttcttttcagtgaactgaactcttttttgcaatgataggccattaaatatagcattcacacaaaatggacatttttaatcacctagaatattgaaaatattttaatttgcagtgtctttttttgtgactggatatattaatgttcctctgagtagtattgataattggttcagaagagaaactcaatgaaataagaatagtatttattcatggtgatcaattaaattatttgcctaatttaaggaaactaaatactatgcataactgaatttatttgcaattctcagtttgatttgaggtaacagaggagagtctaggtctacctgtggaatatgttgttttattttcagtgtttagggttacatttaaacatagttggtttgggaaaatgacatataattttaagttaacctgcatgctgtaaatgtgtttaaataaaggaaaatcttttttgaaatgtaatgacacatttgaaccttacttcatgacgtattagcttgattttatgtagctgaatggcctgccctgtgtgaattggggggggtggcgccgtgtatccctctgtgtatattttagcaagaagtagctgtcaagtggattggcttttttgtactttggcttgcatcttttagaattgttttagaaagttttaaccatctatcagaatagaataagtaaataacctct

SEQ ID NO: 25204 - DNA, 1221 bp, Mus musculus
agcaaccaggagctggagagatgtacattggaaagcacttgctcttttgcggaggaccggagtttgcttcctattatccacatagtgacttagagtgacccataactccagtttctagttccagggaattcctcttctgtactccatgggcaccaggcaatcatgtggtatgatgtcataccacatgtggtatgatgaacataaaatctaattaaaacattttttaaagaaattaaatcattcctatcttgttctttatttcaaacatgagttttataagaactaaaattttctctgcttttttcctatttcaggtgttgaaaagtaattgaagtttgaagaggacataaaatcagtctttcactaactaacctctattccttgggattgtagaaatttaattttttaatgtgtaaattactcctaccctgtacagctgtttcctacccactcttgtaaactctgctgcttcccaacactagagtgcaatgttgatgtcctagaagggaaacgacagtttacaactgcggccctgtttgttacacggtgtgtccttcgtgtcttcactgtgctgagtaactgtgttgagggactctgctccttgatttgcctttctgtgagtgtgtaatcttggtttacattacatagctgctattgcttttcattttcccttttctactaaaatgtcttttttttttaaaggaaatatggaacatttagattaaatgtcttaaattttactacttataacactacttgccacaaaatatatcaggtcagtcagtactgtattttaaaaatccctcaagcaaggtatggtggcacgcatctctactcccaggcagaggcagatggatggctgtcagcttgagttcagcctgctttccaggacagccagggctatatagggagaccctgtctcaaaaataaatcaaaaaataaaaaattaacttaaaaataaatttaaaaatcccttgatatgttgctggtatagtctctgaagcttgcctctgaaaacgttgagctttgagaccaggagttcgagactgaacaggctctttctattatatcattagctcatgagatgccttttgaatacaaatatcttacatatcaaaaatggatctcatgttaaatggatttggaagtactataccccttctttctacttctgcacttaaacatagcttaatgtgctctgctttgttctgttatatcttc

SEQ ID NO: 25205 - DNA, 1160 bp, Mus musculus
gagaacttgatgcagatctgaagtttttaaagaactattctaattggattttggattttgtacatagtacttacaagtctagaatgcctttggttttttgtttgtttttttttttaacttacatgactaaaattgtccatgaatatcatgcagaaagatctccctttttcgtggtaccaagcactctgctgtctcttttttgctactaaattatgccttgtgttgcccttactttcctgggcttcacgcttagatttgttcctttctatgtcccacacagtgtagccctgtgcctgctcgtaactgtttgatccatctgttacagcgtaaagtagcagcacctttcttagtgaaacttttcatttctgttgcttgcctaaatcatgaagcaaatgaatgtttccttgcaggtttgttaaaattctattttactctttcatctagcttctggcatcaaccagaagggatcaagataatatgcaagctgaactgaatcgcctccaagcagaaaatgatgcttctaaagaagaagtcaaagaagttttacaggccttagaggaactggctgttaattatgatcagaagtctcaggaagttgaagacaaaacaaaggaatatgaattgcttagtgatgaattgaatcaaaaatctgtaagataaattttgttttcttaatactcaagtataaataacgctaaatgatgttagttaattaagtcactactatgtaagcctaagatgtgggtaacataggttcttaagacacccaggtctcactttctcttgtctttatatacaaagcctaggtggtagagcaacagtgttataaatctggtttccaaaagtatattgatttgtaatcatctaaatgatttgcctatttctaatgttaggaaaaataatagcttgaaatagaagctacctcataattcattatgggtcaagaatctcaaaacaagaaataaatgactttgtaaggactgtaatgactaagtagtctatctgttctgttttcattctatcaggcaactttagcaagtattgatgctgagcttcagaagctgaaggaaatgaccaaccaccagaagaaacgagcagctgaaatgatggcatcattattaaaagaccttgcagaaataggaattgctgtggggaataac

SEQ ID NO: 25206 - DNA, 1175 bp, Mus musculus
tcctagtccttagtatctaaggattcttagcccttcccctttgtaattttaaactagtatttatttttggctatttggaaagttgagagaaaattatcttaaacttgtaagtttgttttattatgtaatcttacttataggttagtaagactggggctgaaggtgctgtgctggatgaagctaagaacatcaacaagtcactttctgcacttggaaatgtcatttctgctttggcagagggcagtgtgagtatacaatctgttagttccctgttttatgggtagtaatttatagaggatatacgtgtacacaaatgtaaaactgaatgtgtcttcttagtttagtgtttatataggtatcctagctcccttcttgaaatcaagtagattaaattaatgaaatacgccaggcccaggaaagcatatctgatcacaatgcttgaggcagaaacaggatgaccaagagttatacaacaactattattgtataaaaccccactggttttgttttgtttttgtttgtagacctatgttccttatcgagatagtaaaatgaccagaattcttcaagattcattaggtggcaactgtaggaccactattgtcatatgctgctctccatcatcatacaatgagtctgagacaaagtcaacactcctctttggtcaaaggtttgttgttgaaatacaaagtataaagacatggcattaaagttactaatgtcagctactgctcaaatccagatgtatttgtcagagaactagatctgtacttttgaatcaggacataggtcatataagttagagatgtattttagacttaacgagctttaacttttcatagacattaaaattgagaaatgtaattgtttaatttccttttgatgaaagtaaacatctgagtcagatgatgaagtaaaagcttttcagatatatgagcctatgtgaagctcactgatgcacttgaagtagcatacatgaaagagctacttaggaaaatcaataacagccttaccttagacccatagtgataggtaacggatgctactgcttcaggattgcaagtgagttgggaaaataactgcattttcttagttttgatttttttttttttttttaatgttaccaaagactgagtgctgacagaaatttatttgggttgtggatagatattttt

SEQ ID NO: 25207 - DNA, 1177 bp, Mus musculus
aggtaatagacagaagcctttctaggcgggtcttagagcaacgtgtgctgctcagttcactgtacagacaatcactgttgttttaaaacaaagagaaacattttcacagcaaggtaactgtgagtgtagatcagaaataggcaaagcagaaataaagttgggagagctagtgtttagtggttaacaagtagctgggttgggggaggggggagggccaggcctgtgctagaccaacatttaaacttttcagcagagagtgtcagggaagaacagctatgttgttgcttattggtagcctttactttgcacatctacaggtccctgtctacatttatcaggtcaataccaggaacgtattgttggtctgttcatggctggtcaggggattagttccgcttccccatcaccaatgatgactttaattgctgtagaactggacaaatatgaggacatttacagtagatgggacttctcatatccctgactctatttaaaagtaggaaacaaagccagtggacttttcaaaggatacctctagaacctagtgttctggctactagtcctgtgtctgtgtctcacttagtgacgtccattaggacctagatttaaagtcctgacatgttagattactgaggtagtcaagctttggggttggaaggagaaggtggctccgggtaaaggtgcttgccatcaagcctggcagcctgagattgaccactgtatccatgtggaggaagaagagaaccagaccctgcaagtagccctctgactatacaacgtaattgtgtaaaggctgaaaaagagttcaagcctgagaaaatgactcagtgcttgccagtacagcgtgagcacctgaattcatagcccacggttttaaagacgctccatgtagtgttgggtgcctgcagtgcttacactgttgggttacaggaaacagtggcacaggcagatcctcaactccatgaacttcaggttttctcaaaaacaaaggtgaagatggatagaagaaaggcacttgccgtccacctctggcctccatgtgcacacacacacacactcacatcccaaaacgatgataaaggttggggcctaccacgatggctccgtgagtaaaggcacttgccaccaagcccaacaagccaagtttgatcccagaacctgcgtggtggaagaaaag

SEQ ID NO: 25208 - DNA, 1167 bp, Mus musculus
tgcttaacagctaaagtgtaaaacagtacaaaaatggtggttaggaagagaggagggaatgattggggtggagtttttgtctttaagccatgtgccttacagttttattattgcttgaaatgcctctaatttatccagaatgttatatatcttctcagcccatttttctgttgaggatttaatttttgagactgaagagcttagaaaccactcacttgagtgagtaataggcagaggactttgaaggaccaacatcatttggagtttgaaaagttggaattcacctgcttagacaaaaagtgcttactgcaaagaaagacctgaagtcataactgtagccatgcagccatgtgggctgagactagatagactactggccttagagagactggaccagaaagataaatttaaaagataaataaacctctccattctaggcgttagatttccagagttagaaactaataacccaaaggaaagaagaaattgaagatttttactatcagaatatttcattttctttaatatcctgctccctctgtttttgtaagccactgaatgagttttgatgctgtagaatggtgttcttgcctgtgtgtgtaagtaccaagccacacatgtctgactgacacagtgacacaagtgtctcttgacttgaaccattggaactgtcactgttattggtaacagcttccttaatcttttagaaaaatagctaaatgatttataaaatagaacttcaataatctagacaaaaaacctacataaagagtgagtggggagtcctgtttgttgtttttatagtttttctctacattcaattcggtgtagaagacacagcactaagctttgagtctgtgtgaggcctgctgatcccttcattctttaggaagcccaggcttgctttatgtagccatctgtgtggacccacacggtgattgattgcttatgcttcctccaccagcttttagcttggacgctgaacagcctgattacgatctggattctgaagatgaagtatttgtgaataaactgaagaagaaaatggacatctgcccattgcagtttgaggagatgattgaccggctagaaaaaggcagcggtcagcaggtacaacttcatgtctttatgtctatgtgttacctataaactcctgtattatgtgga

SEQ ID NO: 25209 - DNA, 1157 bp, Mus musculus
actggacaaacaggaaaattgacctgaatgtggttaccccaggagttcaaaaactcccccaccctttttaatgaggctctacatcaaaatttagcctccttctgagctgaaaactcccaggtaactctgcttcaatatgttgctccttgctgcaaccacgaaaaagaatgctggcaggggaccaaaagattgctagcagaactgggtaagttgggttaccgggcctctgctaaaaaagcccagctatgtcaaataaaagtaatctacctaaaatataccctccaaaataaaaaacggtggctgacagaggctaaaaaaaggactgtaactcaaataccaactccggctactccaagacaggtaaaaaaattcttgggcaacgctgggttctgcagactttaaatacctgggtttgcaacactggccgccccctgtaccccctaaccaaaaaaagtaaaaaatttaaatggacatcagaacatcaaaaagcctttaaaaatattaaaaaggccctgctgactgcgccagcctcggcactgccagatctaaccaagcccttcatcctctatgttaatgagagggcaggggtggccagagaagttcttactcaggctctagggccgtgagagaggccggtggcatatttgtctaagaagctggacccagtggccagcggatggcccacacgtttaaaggccgttgctacagtagccctactcgttaaggatgctgacaaattaactctgggacagcaaataactgtggtagccccccactctcttaaaagcattatctgtcagcccccagaccaatggatgacaaatgcctgaatgactcactaccagaggctgctgctgactgaacgggtcgtgtttgctcctcctgctattctcaatactgcctgcaaagtaatctacgtgaccagccgtggccaggtgtaccaaactggtacacagacaaaagcagtttcctagtaaaagtttttgtaaataccttttcaaaatgggtgaaggcgtacccaacaaaaaaaaaactgccaatgttgtagttaaaaaaatcctaaaaaaaatttttcctcagtttaaaatacctaaggtaataaagtctaacaataaacccacctttgttgcccaggtaagtcagggactggccatcca

SEQ ID NO: 25210 - DNA, 1147 bp, Mus musculus
tgcagatctattcagatgtttaaaataatgcttaaattcaaagagttttgcttctggtgagctggtaattactagaaaattctgcctctaggtatggctaatgtaactttacattatgtaagaaaaatttttattgtttctgcttctatacaagaagccaagagttttaatctttcagtgtatattgtctcctaagtggaaagtattttattaactaatgcttttcaagggaagtttaccttaaatccttgctctcacccaaaaaattcagagacaatatacttttattacttagtgttttagtttactacaaaaaaataaagaaagcttttataattgttattaattggtaattaaatattagttgtgcccaagacaattctttggacagaaaaaacattattgtaaagtcatttttctcatcctcccagcctatcattggcccacgtgggcccaattagctgttatggggcggagtcttaagacacacagtttcccctgtttcagcacaaataatctagttgtatgctgtagatgttgttttaaaatgctgagcaatcaaaccttaatttgtatattaatagtcaatgccatatctctgagctcacaattgcttaaaattgttcatccctcagatactattaattctcaaatttgcaattgcttatgcatatttctagttaataaataaattatgcacatgtgactcttaataactttgcaagctttctagttacaaccgctccttaagaaaaatgattgaaagtgcaattagtcactgcccctttacagccaagtatttaaaatattttgtcaacaagttaattcaaaagattagatattgtaaaattttaaaactttaacttcttaaaagacaaaaaagagagaaattatatccccgtacatactatttagtgcattcccatgcacactatttaaatcatacctttattttcaaaatttgaaatttaaatgtcaaagaatttaataaatgctttatagtatcttaaaaggatctacttattggcttatagattgatcctaaaacatctaccttattaggaaaggaaaaaacaggttctctccacagaacgctgcagaagcatattaattcgtgtgatgagctggcaggtaagttgactcagtg

SEQ ID NO: 25211 - DNA, 1108 bp, Mus musculus
tggtactgagagcagcaagaaatatgccgaggctgtgggccgagctaagcggattgtttggaatggtcctgttggggtatttgaatgggaagcctttgccaggggaaccaagtcactcatggatgaggtggtgaaagccacttctaggggttgcatcactatcataggtggtggagacactgccacttgctgggccaaatagaacacagaggataaagtcagccatgtgagcactgggggcggtgccagtctagagctcctggaaggtaaagtccttcctggggtggatgctctcagcaatttttagtattttctttcctgcctttggttcctgtgcacagctcctaagtcaacctagtattttccacatctccatttggtgttagcgcaagattcagctagtggctgagatgtggcaccaggaacccttaaacagttgcacagcatctcagctcgtctttactgcatcaggatttgtctgtgttcttcaagagcccatttaaattccttagtgactaaaaccattgtgcattgtagagggtgtctatttatattctgcctgagaaaggaagtgagctgtaaaggctgagctctctctctgacttatgtagcctctggttagcttcgtcactcactgttcttgactcagcatggcaatctgatgaaatcccagctgtaagtctgcagaaattgatgatctattaaacaataaagatgtccactaaaatggaaaaaaaaaaaaaagaaacttaacccaaagtggtccagggtctgctgttgttccattatcttgtctttctgaggtcagtagttgcctcttgtctttctgttctgctcactacagcccaaaccaaactcctctacttatccttactccatggaagcaactgttattattctagcactgaaaataagcccagttaaaagtttagacaagggggctggtgagatggctcaggggttaagagcgccgactgttcttccaaaggtcctgagttcaaatcccagcaaccacatggtggctcacaaccatccataacgaaatcaaatgcctcttctggagtgtctaagacagctacagtgtactcacatataataaataaataaa

SEQ ID NO: 25212 - DNA, 2392 bp, Mus musculus
tctctgtggggagtggaggaaatttactaatttgtaattactaaatgtagcaaaaattcctggtttgattgtcagtatcttgtaggtttctatttatgccgtaatcagtagaaacacatgagattatgtgcaataaaaaaatatactatgatccttttccttgacttttagaggcaagtgcaaaaacctgtgatggtgtacagtgtgcctttgaggagcttgttgagaagatcattcagacacctggcctgtgggaaagtgagaaccagaacaaaggagtcaagctgtcacacagggaagagagccgcggaggaggcgcctgcggcggttactgctctgtgctataaactctgggaattccatctcttgcatatttgatcagatagtgacatctttctgtatataaactcttaactgctattagggaccttgcagtttgcacataagtgtttttatcatggcagtgagtatttgcaagaaactccctcattggctttcccaggtgaaatggtatggtaagcatgcagttttcagtctgtagagtttttttggggggaggggaggggattgctgttgttttgttttgggcttttttttttaatgtaacgtaaaatcgatgtcgcttcatggcacatgtgattttatggtttgcatttatcatgtcattttaaaacatcatctgtctgtatgtgttgctgcaagtctgcttttgttctcccttctgcttaattactgaattacttgttatgtagaactataaccatgggaaggtttcccttgaggaataacaaagcatgattcacagcttttctaggatgctttagactcttagtactaagtaaaattctcagttcagaatacagcccaggccaattcataattaaacctctatttgttctgatgatgcttccaaaatagaattgctaagttaaggaagtttggtatgttaatttacaccagtgatgaactcagctacgcagggcactaaccctatgttgcacacgctgggttcctgatcttggtgcgatgttttggttacatggcatctggcaggctttctgccatttgggtttcagaagaacatgaacagtatattattatagctcctttaattcttccacttttaaaaccaacatgttttttcacaagtgttggtagtgtttgtccgggtgcctcagttgtaacttgttgtataatgactgtctgtatcttaatggcttccataaatgactagttgctattcaaaacatatttttgtgatttgaagatggggaaggaaaacactaaatgacaatttgagaaaggtgtattgttccaaattctgactggaggggagaggctcttgcagtgagatcgttgataagttactgcaaaagtagccactagtttattaaaaaccaaactgtacagattaataaaccttttccacaatattcagttttctaactccttgttgccgtacagtgtatgttttcttactcatacattatttaatttctttaacctctgctatttatgctccacaagtaaaatgtacttagactggtcactgtattgtcccttattaagatgctgatattaatttttacagtttattatctatgtacaatggtaaatgataaacattttgtgtacctttgcaatatgtgtgttactgggtttacttcggattgatttctttctgaatagggtgtcttcatatggaaacctcacattacatcatttatatttggtggtctacatgtgattagagcttttatacattctgtatatttttattaaatgtaagacttttgcttctataatgttagaggaaggtagctcacacatgtatttataatttagtcacattacattaaattttagatttatgtacattttgtgtcttgtctgtcttaacaagacttctgcttgttcttgctgagtcatgctgtcgttattaccattagatcatcatcttgatttgagcagaacttgagtatatgagtcgcatgaatatagctttgaaaatttgattgttgtgtctagagaggtggttcattgggcaaagtacttgtttcagagtttgaagactggcatttgcatcccagaactcacctaaaatggcaggtgacatggcagtcaactctcactctccaaacagaagatagagatagaggctccagaatcaagcaggcaagctagagtagtcatgttggcaagctttgggctcagctgatactttgcttcaaagctacagtgaaaagcagtataagaagcctcagtgtcaactgtgggtctgtatacacatatggacatacatgtacacccccacatacttgagcacacacacacacacaaattaattttgacagatttattttagaaccttctatttgttatatctaggtgg

SEQ ID NO: 25213 - DNA, 1283 bp, Mus musculus
taaacataagaatcttactaacagaaaccaagaccactcaccatcatcagaacccaacactcccactttgctcagtccagggcaccccgacacacctgaaaagctagacccagaattaaaagcatatctcatgatgatggtagaggacatcaagaaggactttaataactcacttaaagaaatacgggagaacactgctaaacaggtagaagacattaaagaggaaacacaaaaatcccttaaagaattgcaggaaaacacaaccaaacaggtgatggaattgaataaaaccatccaagacctaaaaaggaaagtagacacaataaagaaagcccaaagtgaggcaacgctggagatagaaaccctaagaaggaaatctggaaccatagatgcgagcataagcaacagaatacaagagatggaagagagaatctcaggtgcagaagattccatagagaacatcggcacaaaaatcaaaaaaaaaaaaaaaaatagaaaatgcaaaaagatcctaactcaaaacatccagtacggggtgcggccagaaagggggctgccctctcgcctgtcacattgaacgcacattcctgtggaacctggcgctaaaccattcatagatgacctgcttctgtgtcggggtttcgtacatagtagagcagatccctcgctgcgatctattgaaagacagccctcgaaacaagggtttgaaataaaaaagaagaaactaaaaaaaagaagaagaagaagaagaagaagaagaagaagaagaagaagaagaagaagaagaagaagagaaatacaaacaaacaaacaaacaaaaaaaaaaaaccaggaaatccaggacacaatgagaagaccaaacctacggataataggagtagatgagaatgaagattttcaactcaaaggactggcaaatatcttcaacaaaattatagaagaaaacttcccaaacctaaagaaagatatgcccatgaacatacaagaagcctacagaactccaaatagaatggaccagaaaagaagttcctcccgacacatgataatcagaaaaacaaatgcactaaaaaaagacagaatattaaaaatcagtaagggaaaaaggtcaagtaacatataaaggtagacttattagaattacaccagacttctcaccagagactatgaaagacagaagagcctggacagatgttatagagacactaagagaacacaaatgccagcccaggctactatacccagccaaactctcaattaccatagatgaagaaaccaaaatattc

SEQ ID NO: 25214 - DNA, 1166 bp, Mus musculus
aaagatataatttaaaatagttttatgggccgggcgtggtggcacacgcctttaatcccagcacttgggaggcagagacaggtggatttctgagttcgaggccagcctggtctacagaatgagttccaggacagccagagctacacagagaaaccctgtctcgaaaaaaacaaaaacaaaaacaaataaacaaatatatatatatatatatatatagttttataagcaagatcaacattccatgtaaatattggaccttttggcagataggtccacacacatattacatgttcactgctgtttggtggtgtccgtggctagctttccttaagacaatgtcaaatttctgtgtgaagcagaaacaaaaacttttctagtgacctcattacatgttcaagcccaacagtcagatgattggactaatgaacacagttcatggaagttctgtgcttattaattaaagccatgcagctcaaacacagagagaaaggctactgaatttctactctgatatcactgctttgtgtggactgtctagaagcacaagtcttaaaaagttggtttggatggaatgtcctgtcccttgctcgatgtgtacacttctctaaaggaactttctagaccaagaatggtgagaagtgtgtccagcataggacattctgaaatagtttaggtatcccatgttcatacctcaggtatctttgctgattgtttttcttcatctggtgactgctctcttcagtttttattttgggttagtgcttgggaaatttggggtaggtagtgaaggtgatggaatgtcatgaaaatataaatgtctgcacctgttagaccacagctgagcatctttctttaaaaaataaataaacagaaataaagcagtttaagaaatcaggtggcatgtagccttacctgttctatttcttgatgcttataaagagatttaatttaaacataaaagccaggccaagataccaacagcatttggccttgctgtgctctctgacctcagcactcccaccaccaaggagaaaaatactttgctcctagctttcagcagcttgtttctggggtgcagtgccagccactattagaaaagcagggtttcattgtttatccatttaaagttgaacctggtatgaggtgctttttttctcctctatctc

SEQ ID NO: 25215 - DNA, 1195 bp, Mus musculus
gtattgttttttttgttttgttttgtttttttgttttttttttctgttactatcctttgaagggctggattcgtggagagataatgtgtgaatttggttttgtcgtggaatactttggtttctccatctatggtaattgagagtttggctgggtatagtagcctgggctggaatttgtgttctcttagtttctgtataatatctgtccaggctcttctggctttcatagtctctggtgaaaaatctggtgtaattctgataggcttgcctttttatgttacttgacctttttcccttactgcttttagtattctatctttatttagtgcatttgatgttctgattattatgtgtccggaggaatttcttttctggtccagtctatttggagttctgtaggcttcttgtatgttcatgggcatctctttctttagatttgggaagttttcttcaataattttgttgaagatatttgctggtcctttgagttgaaaatcttcattctcatccactcctattatccgtaggtttggtcttctccttgtgtcctggatttcctggatgttttgagttaggatctttttgcattttccattctctttgattgttgtgccgatggaatcttctgcacctgagattctctcttccatctcttgtattctgttgctgatgcttgcatctatggttccagatttctttcctagtgtttctatctccactgttgcctcactttgggttttctttattgtgtctacttccctttttaggtctagtatggttttgttcatttccatcacctgtttggatgtgttttcctgtttttctataaggacttctacctgtttggttgtgttttcctgtttttctttaaggacttgtaactctttagcagtgttctcctgtatttctttaagtgagttattaaattccttcttgatgtcctctaccatcatcatgagataagcttttaaatccaggtctaccttttcaggtgtgttaggatgccctggactgggcaaagtgggcgttctgggttctgatgatggtgagtggtcctggtttctgttagtaggattcttatgtttacctttcgacatctggcaatctctggatttagttgttatagttgtctttgtttagagattgttcctctggtgatttttttaccctctagcagcagacgtgggagactagc

SEQ ID NO: 25216 - DNA, 1177 bp, Mus musculus
aatttcataaattcattgtttttgatagctgagtagtactccattgtgtaaatgtaccacattttctgtatccattcctctgttgagggacatctgagttctttccaacttctaactcttataaataaggctactctgaacatggtggagcatatgttcttattaccagttgggacatcttctggatatatgcccaggagaggtattgctggatcttccggtagtactatgtccaattttctgaggaaccaccagattgatttccagagtggttgtacaagcttacaatctcaccaacaatggaggcatgttcctctttctccacatcctcgacagcatttgctgtcacatgaatttttgatgttagccattctggttagttcatattgttgttccacctatagggttgttttgatttgcatttccctgatgattaacgatgttgaacattttttcaggtgcttctcagccatttgatatttctcagttgagaattcttttttagctctgtgctccattttttaatgggattattttgttttctggagtccatcttcttgagttctttttatattggatattagtcccctgactgatttaggattggttaaaaaaaaaaaaaatcttcccaatctgttggtgggctttttgtcttattgacagctttgcaattttatgaggtcccatttgtcaattctcaaccttatagcacaagccattgctgttctattcaggaatttttcctctgtgcccttatctttgagccttttccacactttctcctctataagtttcagtgtgtctggttttatgtggagttccttcatccacttagacttgacttagtacaaggagataagaatggatctattcgcattcttctacatgataacccccagttgtgccagcaccattttttgaaaatactatcttttttccactggatgattttagctcccttgtcaaagatcaagtgaccattggtgtgagggttcatttctgggtcttcaattctattccattggtctacttgtctgtcgctataccaatacaatgtagtgtttattacaattgctctgtagtacagctttaggttagacatggtgatttcaccagagattcttttatcattgagaagaatttttgctatcctaggtttttttttttattccagatg

SEQ ID NO: 25217 - DNA, 1154 bp, Mus musculus
atgtaaattgattttgttaagtttttttgtatttggcatttaatataacgattagccagttggattttgatggaattttatagtgactttttcttacataaaaaatggtttgtttctaaaagcaaattattgaacccgagtcacttcaacagcactattacctctgaacaaataatttcccaaaatattcttcattacatatgagtgtaattttatataatttatgactttttcagattgtattaaaatcaagaaatttaatgttttccccccactttctgttttgtttattgagtagcctttaaagttgtttctgttctcctgccttgtgggcctaatagattgaactcagatcgtcaatctgctttccttgcagcagcatcttgtagcctttttatagattatttctctgtgtgtgtatgatgtatgcgtcttctccgtggggttggaacccagaagcgtgggtgtgggggttgaagggtaactgtctggcactgcttcctcccactgtggatcccagggtcagactcaggggttgggggtgcagcagcccgtttacctgttcctggcttttggacccagcctttccccactccctatagaactatttcacacattcttaagatgaggacaaccttaaaaatatttgaaacatttatattgtgaaactgtaatacctgaagttttttttaactgctttccattgtaaataattcaaggtagacatggttgattttctggtgcaaaaaaagtgtttgtggattagaacttcaaagctactggccaagaggagaaacatagaaacctacaattaagtttgttattaataactgtagtaaaagatgacttcccatgggaacttgaggctgttgttaattctctttttcagcccacacccctcttttgcataggatgttattaaatgaggcagtgaccaatcagagcctccccacccccaacctcaacatgactgtctcatgctgggtatgaggtcaagttttacagtttgcaagggaaaaacaagaattcctgtcagagttaagttttaatcaccaaattataaaactagaccatatagtcacttactaagaccaaatacaccataactacctccaagaccatatagtcacttactaagaccaagtacaccatgg

SEQ ID NO: 25218 - DNA, 1100 bp, Mus musculus
aaaatgtcattaatttgactggcttttgtaggtatagggaacttaattgtgctgattaaagttggatagggaatacgattcagaagagccattaaattaaccaagagttaataagaatgattagtagttaggagcagtgtcagtggagtgtcagaaagtgtcttttctttaagtgaatgaaagaacaaaagcattctatttctcttatatgaatataagaacagccccttttttttttagcttattcacatttgtttcatgtgtatgtgtgcgtgcgtgcgtgcgtgcacactattgcactcattgtctgtgaggtccctgagcctgggctggttggtatagatgtcccatttgggactgagcactcaacaatcatttgttagcactttgaccagttttacctttctgcatcaactgatgctcactgcagagagaagcatctttgtacaaggttgagaacagcagtacccccagaagcataaacataaatacttagaaggcagttttgtaacattatttagctaaatgacattagtagttagacttatctcctagaagctatgaggctccaggctgagggctttcaccaggcttatagtaatcaagcatgagttcctcttgtggaagcagtcaaatttagaagtagttgcttacctcatgatcttttcaagtccccgacaggcaacagtaatttttatttttatgttatcttttgttgtgcctagaaaaggaccgtaccctaccactgacctttacttctcaaccctctttgattatttatactgcactatttctttgatcataccattagtttgtgggaaggaaactctttgcttgtaagatttctttgaaatgtgttttcttgactggtttattttgtaaaccctttggtctccccatatgtacttcccatattcttgtacatttaaatgtatttgtatatatagggtttttttaaaaaaaattctttcgctgggcagtggtggcgcacgcctttagtcccagcacttggaaggcagaggcaggcggatttctgagttcgagaccagcctggtctacaaagtgagttccaggacagccagggctacacagagaaaccc

SEQ ID NO: 25219 - DNA, 1292 bp, Mus musculus
aatcttgcattttcaaaaatccagtgcaagcgccaggtgatctgtgtctgaggatacgattttgaaccttatgagcagtgtacaaatatcatgagacaactgatcagcacttgcacctgatcaagagcagtgctgctccatttgttttgcaaagatatgttttcatttcctgtatgttccattccctctgaagtcccttggcctgattttatccattttttttttttttttaaggtgccccctttcctttcttggggcactgttgctgtggcacttttctataaccttgtcattcctatgtacagtagctggaagtcgcagtgagcaagcataacccacgtttgtataaattattgaaatccattttcacctaagaatggacttaagaagtactgctgggcaagtgtgctgaaagtacattaactgctcaaatacaaggaagtggcccaatgaacatggttgtgggaggggaaaggagaaacaaagctagtcagatgtgaattgtatctgttgtaataaacatgtttaaacaaacacattttgttactttttttcccttcggccggtacatattagaatttgaactacatgaggattctttatcaaaactattcttgttgaatatttatatcttattacaagtaataattccttatagggaggttttgtttaaagtacattaacataattgtgtaaaggatatttaatgaaagtgaaattgaacaagaatgaagaagcacttcctcagtggcatcacttgttcagcttggttcagctgtcttgctgctctgacacttcattttgaaggatgtctgtgctgtactcaacttttcaagtctggtgctgactgttgttcctaacatcacaaaacagtttgtgtcattgagttacttgctgtacccagaaacatgggacatctcagctttgtatagtgtttcctaaagtatattaaaataaaaaaagaaacgattgctactataaagctaccttggcttttttttttttaacccgtttgcttaaaaattttagtcaacatgaccttaacatgacacttccagcattgtactaaatcctgtttttgtatgtatcaaaattgtaacatctgacttaagaattgcattgttggggcagatgttttcttctagatctacaatcaccaagagatgatttttattttacatcagaatcaatgttaactttctgaaacactgaaatcaaaactttctttgctttgactttatttaattatacttaagctacagaaggtaacattaagacttctgtaagtttaa

SEQ ID NO: 25220 - DNA, 1269 bp, Mus musculus
ccttcaccccttagctgagggtgtttaccaggcttcctcacggtggactcattagcatgcacattatttatgcatacgctttgatggagtagtctctgaggaccacatgaccacatacattatttggaattcttctgtatgggatatggtaccttctctaaattattattcacaattttttttgtttttgtttttcgagatagggtttctctgtatagtcctggttgtcctggaactctctctgtagacctggctggcatcgaactcagaaattcgcctgcttctgcctcccagctacaaagttttacatcagtgtttgttgcggtaaatctccacccaaatatgccctggcaatgaaaacacaactcagctaatatgaatacatgctgtgctctttctgttcccagcgcagccatggctccaggtcccaagaaacacctgaagcacgtatctgctccaaaacattggatgctggataaattgactggcgtgtttgctcctcgtccatccactggtcctcacaagctgagggaatgcctgcctcccatcattttcctaaggaacagacttaagtatgccctgactggagatgaagtaaaagagatttgcatgcagcgattcattaagattgatgggaaagtcaggaccgatataacctaccctgctgggtttatggatgtcatcagcattgacaagaccggagagaacttccgtctgatctatgacaccaagggtcgatttgctgttcatcgtattacacccgaggaggccaagtacaagttgtgcaaagtgagaaagatctttgtgggcacaaaaggaatcctgcatctggtgacccatatgatgctcgtactattcgataccctgttccctcatcaaggtgaatgacaccattcagattgatttggagacaggcaaaataactgacttcatcaagttcgacactgggaacctgtgtatggtgactggaggtgctaacttgggaagaattggtgtaatcaccaacagagagggacatccctgctcttttgatgtggttcatgtgaaagatgccaatggcaacagctttgccactcggctgtccaacatttttgttattgggaagggcagcaaaccatggatctctcttccccgaggcaaaggaatccgcctcaccattgctgaagagagagacaagaggctagcggccatacagagcagtgggtgaaatggtctctaggagacatgctggaaaagtgtttgtacaagcctttctaggcaacatacatg

SEQ ID NO: 25221 - DNA, 1451 bp, Mus musculus
aaactcttctattgagtgcagtaaaagggttagaggtagctatcaaagagagagtctgacatgaagtctaagagtctgagtcacacacaagtgctttgcttctgcccatcttaggttgcggtgaccgaggtttgtgaggttttccttgtttgagataaattctagcatttgctttatcatatactcctcctgtgtgagcgtggaaaagtttagaattgtatgctagttttgaatgccctaaaatcatatgcctgacccctctcaatagagcacactttgaagatggaaggaacaaaatatcaaaatcccaaaagtatgaagccacaaatgttagtaaagagtcagtgcagttcttgtgcagttttggatgcaatatgagcaaattctagcctaaacttgcaaagcaggaagtaaaaaattaactaccctcctgttgcctctttgatgatttgctctgagtgggaaaggggatcggcttctctccttacaaaccttaaacagaggtcgaaacatgtagaaagtgtcattttgtattccctcatctctataactctagaagggacctattttcttagccaaatatgaatgcctcttagatgaatccttcctctcatgtaaagtaccttatcttaccagcccatttcaggaaagaactgctggcttgatagcagaaatcttatttttattccttttatttgaatgggagatttggaaattgacttatgtaaatagttcaatgcacctgatactattttgtggagtttattaaactactttaaaagattgtacagtgtattcgttgtatgtgtgtacacacagtctggtacctgacattcaacagtgactctttatagcctggcttggttttattcagactgttgactattgttttcaagccttgtacactggactctacctctgaataggaaggttttctctttgcatcagtgagtgttaactgtattaattggttgtatttcttgcactaaggatttcagttgtactgtttagtctgaattactaggcatgtaagtataggctcatttaatttttctatacaataatgaaaacttatttttgttttctgggttgttctcaggttgccaaaataaaaaggagataaaaccaatctaatagtagtgttgataaatcatagtgactgtaacttgtttgcaaagtagttcggtgtccaacaggtaacgctggatgctgtttgggaatgctatctcagtgcagcctctggtaaagagctcgttgtcattgttgaaggatgaagaaagccacagttttttgactatagacttgatttaaacagcaaatataatttgttgaagaataaacacacattccggtaaattttgttttactttttcactgggaaaagaaaggagttaagctaaaatataatgagatcctaagcacctaagaggtgctttcatgccttaatgttc

SEQ ID NO: 25222 - DNA, 1349 bp, Mus musculus
gccatctctcgtctctgtgaggacaagtacaaggacctgaggaaacccatgaggaagcgttcagcaagtgctgacaacctgattctgccaaggtggtctccagccatcatctcctaactggggcactctcctgaggctgtgctgtccctcagtttctccttttgtttaaagaaaagatgaacttgggtggttttgtttggtttggttttcttttttccttctgtttttaacaatagcctcatcgaggctgccttcagcccgcctccacacttggtgggtgcacgcagagcggctttaagggacgtgaaatcagtattcaggaaacttggtgtcaagccttcccggccatcatgaaaagcacttctttcatggaggaaacagactctaatcctggagaaggaaatgaaggaaaaggaagttgtgttaagggatagattacttggtagctttgctgtttctgggtccttgtctggtcatagataccagatggagccagatgataggtagcagagttgaatgcatctccaaatcgggaatgccatgctatgcccttggaatctgtgtgctctgtaagaaagacttcctgcattccttcatgctgctctcgggattggggatggggatgtttgttcatttttattctggttgggttttgattcctcagagcagagagtatagtttgtaaccaccatggcacagacatccaaataaatagtactgattgtttatctctgctccattttctctagccttcttctgagctttcttcctcacaagtaagatgtgcttgttgtgtttctacacacctgttatatatgattctctttcaacaatagcaggattaacttgactgtagtactgaaccaaaactatccctctcctgcctagttccaagaacattctatctagattaatatgggtgcttgtgccttccagttttcttgcaattggttgttcttggttttggttttgtcacctcctctccatcccaggttctctttttctgctaacatgaaggtgtaattacaaaacgcactcagactttgtggctgaaggcaaaggtcctcagcacaagcatcttggatagagaagcatccggggagccaggtttccctgacctcatgaggagccatgtccatgtgctccctgcctggtcattcttctacttccatgtccattgttgtaagcaatattctccttgaattttatatgcttcctttaaatcaaatttagtctatttgtatacaatttttttaaaaatctaaaatttagaaaatggggagtgggtgggtgggtatccagtgggaagatcactaaaaggaaaaatgttactatttcctgaggtattt

SEQ ID NO: 25223 - DNA, 1129 bp, Mus musculus
gttcatccctcagatactattaattctcaaatttacaattgcttatgcatatttctagttaataaataaataaattatgcacatgtgactcttaataactttgcaagccttctagttacaactgctccttaagaaaattgattaaaagtgcaattagtcactgcccctttacagccaagtatttaaaatatttggtcaactagttattaattcaaaagtttaggtattgtaaaattttaaaactttaacttcttaaaagacaaaaaagagagaaattgtatctccgtgcatactatttagtgcattcccatgcacactattaaggtcttacctttattttcaaaatttaatattttaatgtcaaagagtttaataaatgctttatagtatcttaaagggatctacttattggcttatagattgatcctaaaacaactaccttattaaaaaaggaaaaaacaggttttctccacagaacgctgcagaagcatattagtaaattcgtgtgacgagctggtaggtaagttgactcatgtcctgattgaattaactaaaaaactaaattaaatttatgttttagatccatccttacttgtcatttttccagtttagactagcttctagccttttaactttatggcaatagtacatcagagactgtatattcagacttagtaaaattagtcatttaatagagtcataatgatttttctccttcattgtgaccagccattctaacgcaatcttagactagtctaatattcagtccaatgttagagattcctatattctaaattatctagcaaagttaattcagagcacatcccccacttcccctagatccctaacctcaaaaggatttctggccttacagctagtggaaaaagctattaaagagcaattggtcacttaatacattggtaaaatagaaggaccccctgactaacaaatggaagggtccagatccagttctaatttggggtaggggctcagtttgtgttttttcacgagatgaagatagagcgcggtgactgccagatgtcagatgaacacagattctaaatcttctaaagtatcaccttgaggactaaaattcttcttttgcttaaaagtcagcttgaggactcag

SEQ ID NO: 25224 - DNA, 1122 bp, Mus musculus
tggttttggtcgtctaggtagaagtggacgatggtgtttgtagacgatggggtgatggggttttctgaaatgcgcgcgtctgtatttgcagctgtcctcttgggccgtaaggaccggaggattgtggtcggcagacgtgctaagaggaccacaggctgtggccctgggggacgccctgggaggtagggagagtcagggacgcctggctgtctccggagatcggtcagagggaccgagttctgttgaagcggaagcttccccctccaacatcgtctaattcttttgcctgcttgtggaggacaagaaagggtcgagtgtgtctggatctgttggtttctgttttgtgtgtttttgtgtatgtgtttagagctatgtgaaaatctaaaaaaaaacaaaagcaaaggtaattctcataggtgctttatatcctgactagagatagtttacacctgagatgtgagagaatgggttttaagaaaagtagtactctccgactatctgggggtaatttggtaataaaataaaataaacagtattgattggtctttagagccctgcatctgtagttaggaatctagtgtggctggagaagccctgctaggcgctgattataaacgctgctcttatagggacgagcagcttctcaagttctatggtaagggaacagatggctgcttttcctacaaaaatctcagtgcttgtgattattggattcatcaggtgacaaggtgctcctctcttgaaattacagctagaaaaattaagaattttgtttggtttaaatgggcaaatgtatatggccatttcatttttgtttctaaatagtttcaaaagtataaatatgttttatatgtcttggttatagattagtggctcataagttattggttatgattaaaaatttgtaacattggtaacaaaaagttgacttaaaactggtaactctgggttagagtaatttagaactacaacatacagcatgagacaacccatgggaacaggtctctaaagatacgcctaaattgggtaatattctgtgtaattcttatcctagaaatctgatttataaaagataagatttagggtagtgtctttgagatatattggcggctacaccttctt

SEQ ID NO: 25225 - DNA, 1920 bp, Mus musculus
gaaccttcctctgtgttccttgaaaggcttatggaagccttcaggcggttcactccctttgatcttacctcgaaagcccaaaaggcctcagtggccatggcctttcataaggcagtcagctcccgatatcagaaagaaacttcagagattaaaaggtgtattacaagaaagagacagttatgcgatctagtaaaagaggcagagaaagtgtgtgtgtgtgagagagagaggcaggaggcaaaagaaagagaaaacaggagggatagtagacaagaaagaaatttgccacagtggtaagagaaaaagaaaagacaggatctagacaggaaacctgggcaactgaagaccgagcctcagctaaagaggctcagctgtgtcagactgaagtgacttatttgggatacacccttcgaggtggaaagcagtggctaaaagaagccagaaaaagactgtaactcagatccccaccccaactacaccaaggcaagtaagaaaattcttaggtactgctggtttctacagactctagatacctgggttggcgaccttagctgcccagttgtaccccctaaccaaggaaggtaggtgtttgtgtggaccccagatcaccaaaaagcctttaaagagattaaaaaggccctactgatggccagcctatgcctgacctaaccaagcctttcactctttatgtaaaagagagagcaggggtcaccagaagagtccttactcagactttgggactttgaaaaggccagtgacttacctatccaagaagttacaccctgttgccagcgggtggttttcttgcctaaaagctattgctgccataatctgcttgtcaaggatgctaataagctcactctgggacagcaaataactgtagtggcatcccacactcttgaaagcattaccaacgctcctgtgacacatcagagctttttgttgtctaaatgagtgatcttcgcttcattccacctgctgtcccactgcgtgagactgcacctactcatcactgtgctgacattctggcagaagaaatgatctgaaggatcagatcagccttggtctgaggacagtagcctcgaggttaaaggtaagcagaaggcggggacagcagtatggtggtgaacagaaagcaagtgatctaagccagcagccttcctgagggacgtcggcccagaaagctaaacttgtgactttaagacaagctctatgaatggcaaagaaaagtctacactgacaacaggtatgcttttgccactgtacggggcaatatacaaagagggctgttgacatctgcagaaaaagacctaagatgctgtggctaaaaaaaattcaggtggcagatctaaccgccaatcaggtggcccaaggagcagtgatcctgacagtcaaggagcctaaagattattatgcatcagagagaccagctttagatacgtcgctgagcactatcaagttatggacagtatttgacttggcctgggggccaagaaattcaaaggtgtggttaggtcctttgactactatgttacaggactctctgacttggcagaagaaatagtcaaaagcttcaaggcctgtgctataatgaggtagaatttctaaaagaaatcttcccaaggtaatggacctgcctttgttgcccaggtaaatcagagactggccaagatattagagatcggttaaaagttacattgtgcatgcaggccccaaagctcaggacaggtaaaaaaattaatagaaccattaagggatccttaccaaattgacagcggagactggcgctatgattagatagctctcctaccctttatgctcttcagggatagaaacacccctggacagtttagactgacccccctataaattactctacaggggggccccctccactggtaaaaatagcctctgtacatg

SEQ ID NO: 25226 - DNA, 1138 bp, Mus musculus
taaaataactttgtataagatattttcattcctgtttgtatgactgcttaatttcatagaacttgtctttattgttaacaaattagtgcaaattcttgcttctaaataaacttgtttctctgttggtagataaatcattccgcatgtgagaacgttttagctattatttctcttgctattgggggagtgaccgaaagtaagtatctttctgtttctcctaaaagttgttttagatctgacctgttttatttaagactctcgacatacctcttcctctgtctggttttgttcatcttttatgtgtgttgctagagaccaaatatagggcctcatgcatgctgtgctaccactgacccacactcacagcccctgctcattgtttgactccttcctttgccaagaagatgttcctacttactgctcatcacgattatgtcatgtacattacagtttgtttgttttcaagtgttttaatcatatatcagtacttagtgagcatttattgtatgcatgtactaagttaggattgggaggttcagtgtaagagtctactgggtaatgcagggcagacgtgtgtgagtgtgtgagtgctgtaagcgctatggttagagtttgttgatgaattttaaaaagtaagatgagcttggatctgtgacaaatacctattatcccacacttgtaaggctgaatcaggacagtcagaaattggagtcaaaataaaacaaaatgaaaaaaagaagatctggtctacaaatagaaataaagtttgccagaaatagagaagaagatagatataggaaggccacgttcagcatagctagaaaattatatgagatgagaatggcaaaggaactaagatttgtgggttagtttaaaggccagtgtatctcgtactgagaagactaagtacattggggtagactgctagcagaaaaactaggcagaaattaaaaaaaaaaaacagcactggggcactggaagatggctcattggctaagattacttgatgctcttacagaggacctatgttcagttccaacatctatgacaggcagctcataactaactacctttaactccagctccataggatatgaaggcctcttctggcctttgcaggcacctgcacacatggagc

SEQ ID NO: 25227 - DNA, 3040 bp, Mus musculus
taatggtgtgtatcttcttaatttagatgaatggatcaaatttgatgatgataaggtcagcattgtaaccccagaagatattctgcggctgtctggtggtggagactggcacattgcttatgttctactttatgggcctcgaagagttgaaataatggaagaagaaagtgaacagtaatcttcaatttagctatttatgcttaggtgtgaatgtttttgttgttgttgttgaacatttctataatcttgagctctaaagaaaatgagaacagaaccaagccacttgtgcatcttcaatcttaagactacgggaaattacgtttgggtcctaccttgtatagaggtagcttcaagacattctttaaaaatctcattttttgcattaatccttagaaattcttggctgaaatccattttatcccttgccttttcagcccaagctttagcagtgatgtttattgcacacctatctgttgttcttgcatggttactatcaccttcagtagctgcccgtcctctgccttatctaaccaatatttttctaggaaggtggaaaagtgttgctctcttcgtgtaactcagtgctgctgtccacatcccatcaactgggtgcaatcaagtattgtccagactgactgttgctggcctttcatgactttacaataaattgtgatcaataagaacacacttgattatacacttattattgtgtctctaatgtactgtggtttatatgttaaactttgcattggtttttgtagtaatcataatgtgtaaacaagctctggttgcttggaaaccaaggatatttaataataaaaataaggaaaaagagggattaacaacttttgacatttctttttagtattagagcttggcttaagagtcaaatgaattcagtactatacagtttctgcaaatggctaataatgctaagcagtcaaggatctatttaaaatacaagaaactttagcttgtccagtgttattacaaaagaaatacaaagtagtaaaggtgatgagttcctttggacagtgaattctgtgatcagtttcattccctcacacgtttgttgtttctattttctttcccaaagtctttgtgcccatcttgaaagttactgatttttaagattaaggtatacattaccaagagtattgtttattaatctattgactacccagtgagtaagtccttagatgtttcaggaactttagcaatctaaggaaaggatgaagtgttgaatattcgtgatctggtctgatttgagttgactaggaatgtcaggaatatcatgacatcttccacctcatgttttaatgctctgtaaagtacccaagattcctataggataataaatctgtaatagtgtgggtaagtcagcattttaggtttgtaaatagtttgctaacttaaacattattagcagttaagacgccttacaatggggagtgaaacatggaatgaaacagtgctgtgtgtactgtaatagtttgtgtcatgacccctgggattcagtgttatttgctagaacagttgtagaacgaaggaatttggcacctgtgttttcctactaaaccaggtgaggtagatttagaacaaatatgccaaaactatgtttagaatgcattaagaaaactattatacaaaaagtgtggtgatagtttatttgacctaaaaaggcattccaaaaataattctttaaagtagaaattggacttccatcattttgttttaaataaggtgttaagtgttttagaatgaggtaaaaaaacattctcctccctttcaatccctgaacttgccttaatttgcttaatgcagaagacatctggaggccagggttgtgcttagtcactgcttccccagctagtagagtgcagttcaagcaagaacacttaacagtggtctgcccagtcgcccttcactagtatactaaacacccacaggaaatgctgtatgggactagaacacgaacatcttaaccgtcagccagtaccacacatgctctgctacatatagggtattttcacatctcaagtgaactgacaggaatccctgggtgtttaaagacttaaggaggtcaagtaatctttgtaaagctaaaggagtagttgggtcttagactccacttcatataaacttagagctagcaaacaaacattttctgttttggacaaacagctaatgatttggtttttgcaggcccctggctatcagtttgaactctttgctattgtagtgtcagcatgtcagagtgccaggaaaacacttaaaactatccatggtttgctgatcctcttctctccagtcctaaggtttcagaagtgtcatcttgtaatttcagaataaaattttataaccgatagcatgcaggaaactaatttgggacagtactgttagtagtactcatttaacttcactgtagaaatacttaacaaaaattggtgtgatcttgaggtccttttactttgttttcccaccctgttctccactccaatgcctgttctgtatgtggtttttggagcaccagccaactgtacaatagctgttataaaagtgtttattgtttaccaaaaccagtgaaccttttatcaaatgctgcttggtaacaaaatcttatcactgtttaataaaaaagaaaagaaaggaagaaagctaactgtttgtttcagtgtcattagttagactttctgcaaggtcacttaatccagacttgtttagtgcactaatcaggttatcagttgttgcatgaactccttcttgatcttgccaggcaacaaggagctgcttggctctcatcttcatgtcttcactgtcacactcaatctgcctaatatcagagtctttaatttccaggtaaggagccaaaatcttccactgctcaccaagtttgttggcaaatgactctatctgctcccctgttataggtttatctcgccgaacatctggacctagaaaatatagagatgtgcaattaaagtatctgaaataactgcaaagctgaaatgaccactgggttactagtcccctaaaactt

SEQ ID NO: 25228 - DNA, 1197 bp, Mus musculus
tcaggaagaaattactaaacagtctccaacactgcagagaaatgctttgtacatcaaatctgtaagttatatatttccttttgagattgagttccattccattgaaagggttcaaggggaaggaggtggctcattaggaaacctgcttgctgtgcaagcctgagaactggagtttggagcctcagaactcatgaagaaactggggaggcatgacttcctgtctctaatcccagggtgctggaggtggagctggctggttggagcagtgactccacatgcacagtcagtcacacatgtgctcttgcacatatacactgtaaacatgcatgtaagtacacatgcatgtaaatacacatgcatgtaagtacacatgcagatgctcaccctcactacacacagaaaagcaaagagactgtgtgccagttaatcttgtctaatctttatttttatgtgctcctgtcaaaaaccaacaaaccaacaaaacaaaacaaaacaaaaaaccaacaacaacagaaaacccttatatggcatagattaaacgaatttttctcatttctctccttagtctaagatcagccggctacctgcttacttaactattcaaatggttcgatttttttataaagagaaagaatctgtgaacgccaaagttcttaaggttagtaatgaattttagtctgtatattaaatataatcctgaaggcaattcctaacctgtaatagatgtatttatcttattagggatagctttgcgatgcttagaggtgattacattagacagtgattcttagcccacaatttataaggattatgtattatccattttgttttacacatgcctggcttctttctccagtctcaaacagctaagcctttgacccacctttttatatttttcaaaagactcacagataatcattaattcttatactcctcagaaatcctgcctgagattagattggaaatgaggacagctgcagtaagcacattgcaattgcatttaagccccacagagcttcaactgtgtagcttagctgtatgtatacagtcttcctttggaagaggtgtatgaatctagcctctggagctgaaattcataacattttctggtagttacaggtgaaggttaaataaagcttggtctttattttttatttattgtaattattttaatattgctctttaactgtttcagtg

SEQ ID NO: 25229 - DNA, 1208 bp, Mus musculus
aatctagtgttctgttgcagtaggagcaatattttaaaaaattgtttctcaatgtttatggctagtgtataaaatataattgattttcaattttattcttattctgtgatcttaattcacataatattccagtaatgtttttggagattgcattgtctttgcatcttcaaataatgaatttgctcttccccttttagttattgtgacttttattgagatataattgctaaaccaaataacttctgttttgtttttttttccttgaattcttagtagaatttctagtatactactgaatagaaaatagagagtggagattttctcttgaatcactaacatttaaaattatgaacaactgttaaatgtcgttaagtcctttttctgttacttgttaaaatgatcatctgattttattttatttttatactttgttcagtgtcattgttacctgtcaccatcctctgtccttggtactggggatggaactttgggtctagtgcatgctaggcaagctctttaacactgagaaggtacacaccaagtgtgctctcactgattctcaacccatccctaacacctgatactttgctatgttgtttaggctggttctgaactcctgggctcaggcagtcttgcttcagcctcaaaaaatgaaaaatgtgtatctggtgggtatggttggtatacttgccttgaatcccagcactctggaggcagagataagtagatctctgggaggtccaggtcagccagggatacttaataagactccatgtcaaagaaaaaaaatgcaactaaccccaaaggggatcttgtatgtggactttacccattgatatttatcatatggagatattaaaactgagatatttagggggctggagagatggctcagcggttaagagcaccgactgctcttccaaaggtcctgagttcaaatcccagcaaccacatggtggctcacaaccatccataacaagatctgacgccctcttctggagtgtctgaagacagctacagtgtaacttatatataataaatacatctttaaaaaaaactgagatatttaaaaatattattcattgatttaaaataattacaaagaaagttggcaattgactttgtgggtaagggtgcttgcagctaagcctggggtcctgagttcaatccctgaaacccatagggtagaaggagagacctggcctctg

SEQ ID NO: 25230 - DNA, 1175 bp, Mus musculus
cagctttcacagctggctgcaccagaccactgatatctcaaaatgaaagcacttttttctgttaacaagagacgggatgccggggacaggggaatgagaagctgccagggaacctgcggtgcaggctcctgggagcagcaaacactggcagggacgggggaaggcgtcagaggcagcgactcaaccacttgacggacgcctggtgctcgctgcactgtctgcccgcctggcttgcccttggaggcggcggtggtggcagcgagggagggagcagccaggcgggcacaagggacgtgcgggcaagcacccatgtgcagactctgaggggcagcggctgtagtcagcccctcctcagctgtggcaggcattgtggctgctctagggagctaggcgggaccagtgcgggccacggcgggccttgcccctcttcttctctctctctctctctttttttttttttttttttttttttttttttttttttgcccgcctgcgggcagcgaagtatgtggcggtggtgggcatcccggggaaacctctgtgttggtgttccccccgccccgggcctcaatttttttccgcggcgcctcgcctcggccgcccacactcgccattagcgtctcacaactcgctcgcagggcacagatggcctctgttgccgctgagcctgcagaacccagaaccgcagcaccactgctgctgccaaggtcctaactgctccgccaaagccagaagttcttagtccggctctgcggctgcatcccagaactcttctgagcagcccggggctcatgcaggggagcaggtccgtccacgggaaaacagcgctgagttgttttttcttaactatcactgacaaattctgtcccaacgttagtccaagtctacagtcagagacaaagggttgacacacacacagtctgtcccatgacaaaaaccacaacagaaacaagacagcaacagtggaaaaaaaaaagacaccagtatatctaagcacactcgtccgcatctggacatatacaaccagccaaacgctatttcctgacggggtcggattccacatcgactccctttctgacggggtaggattccacatccactcccgctctggcagagagaacactctcttccttcactctgccaggcaacagccaggtcctcttgactgttccata

SEQ ID NO: 25231 - DNA, 2030 bp, Mus musculus
tgtgttggaatcatgtgggatgctacctgataaaccgagctgtttaaccatgtggaacagacaggctgtttcttttgacacaaataccacaggcttttcagggttaagattgctgttattctgtccttgttttggcacaaaaagcacactgaggattgtcttttttttctgttgtttttttttttttttttccttgcgggtttgcctacaggtagattagattaattattactatgtaatgcaagtacagttggggaaagctttgctagatattttttttaaggtgctgccttttaaatttattagaaaatgcctgtcagtcatgatagaaccgttttcctcgtatgaacaagaggaaggaactttcactttcagtggaatggccatcactatcaagatcagatcgtggaaggagtaaagaaaatatctcaaaatgagacaagtttttctgttttgttttgtttttttaataactaagttttttgtgctcttgcaaaactattcagaactgttttaagaacacagtgatgtcactttaagctcagtgtccttactgtagaattaaaagccttactgtcgattgcccacagtgggctctgtggagaaattaaatatcttacattatgctttacaaaatattgtatatgtttcagcaactttgtagattgggaactgggagaagaggaaagaattacatttaatctatgcatttttgccaagccatattgagttattttactactagagacataactaactgtacaagagaaccaagtttaaaagcattttgtgggatacatcatttctgtaattatataatgtatttctttgtggttttaagtgaaaagacattaagttaacaaacatataaaaatgtatgcactgtttgaaatgtaaattattcttagaatattttcagtggaagttgcattaccctattagtgccttaatttgagagaatttttttactgccataaatacagacttttcagaaaacagattttacaaaaaattatgtgtttttttcattggtaattggtttaatttaaaatatagaggtttgtcagatttttataaattgagtacaacctttgtaccaaactacctgctacaataatgaaactatctgcaaaaacatatacagttacaccagtagtaaagaattatgaaatatatccatgatgttttccagttaacataggaattaccatataaatactgttcaactctcctctggtaacaagagttgatgtgtatgggcagtgtgatttattgtttatttttttaaccaaatacctcctcagtaatttataatggctttgcagtaatgtgtatcaaataagcactggaaaaccgatcttctctagggtgatatgcatgtttcaagtggtattgaaagccgcactgatggatatgtagtaataaacatatctgttattaatatgctaatgactctgtgctcatttaatgagaaataaaataatttatggatagatacttttaatattgactactatagtattttctcatggctggaatgaatagatggcatactaaaaattattcagtgattgtatacaaatgtttgctaaattttgtgaatagattaaaattattttttaaagataaaacttgacttgggctctaaaacaagaggtactattgttcaagtaaaagatagctaatctttgttggaaaacaattccccatgggtctgttgcaggtctgtacatcttgtgagcagaggctgtgataatttacatttgggccatcacagatacaacacaaccacccacagccttaaaagataaaatgtgtcccttcagaggtccctttactgccagtgtctctctgcatggttaaagtcaggcagtttgcttaagcttatttaaaaattcagattccagtgctgaagagatgattggttgaaaccacatttgcctttcttccaacaggacccagttcagttctcagcattcaatgtctcaacaactaactccaagggatctaagaccctcttctggtctctt

SEQ ID NO: 25232 - DNA, 1274 bp, Mus musculus
gacttcacatacttaacctagtctcaaatctgatatgagttatagatagatagataactactaattctccttttttcagtcaagagaacacaggatcaaaaaggttatgtcatttgtcttctctattgagaagtacaagtgtataagtgtatttttctttggaatgtaattgtttgatttttttttagcttaaaaaaattgtgacctatttgaaattcatcactttattagtattatccaaagtctttgttccctgtagtactagtcattacatacactacataaacagaaagagcaatactttgtaatgaagacattttaggattacctgactctgttttctgctatatcatatagcaagatacagtctcagtataaactttcccttggttgtatggattactacaccatcacattgcccaacacttgcttacatatctaaatgtctagttttgaaaactaaaaaccttctatttgtctttagctgtttgttgtcctagaaagtgtgttaagaaagtagccctgtatacttacctggcaggggagataccatgatcacgaaggtggttttcccagggcgaggcttatccattgcactccggatgtgctgacccctgcgatttccccaaatgcgggaaactcgactgcataatttgtggtagtgggggactgcgttcccgctctcccctggaaaaaaaaaaaaaaaaaaaaaagaaaaaagaaagtagccctgtgaacacctagtatgtttttataattaactatgtatacagcttgcatatgtgattatgtgtgatttagtttaaactttatgcttcattaaatattatttagcgccaggcggtggtggtgcacgcctttaatcccagcacttgggaggcagaggcaggcagatttctaaattcgaggccagcctggtctataaagtgagttccaggcagggctacacagagaaaccctgtctcgaaaaacaaaacaaaagtattatttagctgttatactgtaaaacacttatagtcacaaatgtaggattttgctgaacacctgaggaatgaagataaatttagaagtaagggtaagtggaatgtaaaatattatatccttgtaaagtgagtatatgaatcataatcacatgaaatcagcctggtaattttcctgctccacaggaagatttagaaagttaaaaaaatgcatatatgaaataaaaatcatagaactttgctcttccctattatttatgtaatcttgtaaagggtattaaatgaacacaagat

SEQ ID NO: 25233 - DNA, 1224 bp, Mus musculus
ctgtttagctttgttgcctgtagttctttaaggactaatacctgtttagcagtgttctcctgtaattccttgagggatttttgtgtttcctctttaaaggcttctacttgtttagcagtattctcctgtaataccttgagggattttcgtgcttcctctttaagggcttctacctctttagcactgttctcctgtatttctttaagtgagttattaatgcccttctttaaatcttctaccaccatcatgagataggattttaaatccgggtcttgcttttcgggtgtgctggggtgtccaggactcgttgtggtgggcgtactgggttatgatgatgcccagtgttcttggtttctgttagtaagattcttaagtttgcctttcgccatcaggaaatcactggtgttaatgatcaagctgtctccggttggagcttgatcctcctgtgattctcttagtttctgtcagcactcctgggagtcaaactctcaccaaagttccagtggtcagaacactctctgcaggcaagctctcctcttgcagggcaagtgtccagcagtctggagctctgatccacgtcctgagttctggggtcagaaccctccctgtaggccgagtctcctctggcaaggaaggtgcccaggggtctgggtctcagctctgcagcctggctgaggatgaagacctgaggggaccctgaccaagaaggtctattacttctatcccctacgtgctctcaggtgatcaggaggtactgggtgtgctaggggtcctgtggtgtggagagtcctttggtgccctagatgcccttggctgggctcacgcagaagatggctgggctggccctgacctgaatggatcccagactctggtcgggcggggttcctttgtccctgctactgtgggcacaagaccctccgccattctttggagctgatgttgtgttccactcacccatgatcccaaggtctcgtgatcccgaggtaatccggaggtcctgcagagtgaagagcactctcatcattctttttatatgttattggtctacatttgtgaatactttatagtcatatccatgaaatatactggtttgtagctttctgcttcatctgactttgatatcaggttattactggttacacaaaatgagttaaacgtactcttcttcctgttttctagaagagattgtgtaaaattggtgttaattcttagaaggttttgtag

SEQ ID NO: 25234 - DNA, 1132 bp, Mus musculus
atttttatgtgcattaatgttttgcctgcgtgtatttcggtgagggtaccagatactctggaagacagttgtgagatgccatgtgtatgctgtaaattgaacctgggttctatggaagagcagccagtgctcttaaccactaagccatctctccagctcaaaatagggtttaaaagaagagactctggagttttgacgagcagcctgtaaaaaatgttgaagcactgaactctaaactcttaacatagggatgaaggtgaaacaatggatgtgcactggaaagacaagtaaagcgttgtttctaactgccgaggtgcatcgtggcaaagagttgggggtaagcaggagtttctctttgcctttcagcagacaagttgaaagctaagagtgaaaatcaggatatggattgggagggtttggtggggaaaggcaggctcagttttggccgaggtttaaggtggttacagacttccaagtgaaattaccaccttcacagttgtgtatgtggagctagagtttgagagaggtttgtgctgttacttgatgggttagatgagatcatccgaggcagtaaagggaaaacgagatctgtgaggaacaccagcgtctgggagtacttgcaatggcataaacaaggaaaagagatttctagaagagtgatggaaaccaaagaaacagcctcagaaacaaagagggatcccatcaccactgtcaaagcacagttgagaagggcgtctccatggtgctagaaaaagcagcacctgttagaggcagtgaccatagtcagacttcagaagagatttgtataatagctgcttagataaatttctgttactggccctcagttgtctgtcctttctgaaagtatcaagcataggaaccatgagttttgatccataccttgcctgtgtggatgatttctcaagcaagaattgaagatcacacttgataatctgtgggtgtgaactcagtgcatttaccaagagcttggacataaattcagacctactgtgaaatttattggttcttgtttgcctggcctggctgcccagttatgtggaaacacagcttcaatttactgagagttaagattgctgagtcaattactgcagtagtgatggacacatatatt

SEQ ID NO: 25235 - DNA, 1142 bp, Mus musculus
tttttacaaatgaactcaggactggcaacaaccatatggttgttccattttcataaaattggaaacaatgcagtaatagcttattattgttttgtttttttaaagaagatattttattatcttttacagaaatttatgattgtattttatctatagttatttagacatgtttacatgcagcagataattgttcatagtggactgaagattaatgcaaggactatggtctcattgataagtatattttgaagttcttaatatggaaatataccagtgtagcttggtactgtatttttttatattgatctgctgataccagttataggtttaaagattgtattttcaaaatgaaaaccagtgcttttgagttactattcaaagagggtacagtattacacacttaagaatttgaagttactaaagtgtactcttaagtataccccacagaaaaggagagctccaagtgaaaggacttgtataatagcaagtgtctccattgcttatgtttctgagactgatggtggaaaggtctctcctgtggggagccataaatgactagagtcacaaagaactacagaatagttgtaaactaaatgtggacggcttggtatctgcgttgttattcctcagaaatactgcactgagtatacgccctcattactggacttcatcttgatacttgtctgtccttcatagtgccctctacttttaaagggttatatgtcgaaaaactgctgtggccttttatgacctgtatataatgtagaataaaataataaaatacttgatagctttttctaagtgataaatgtacttgatacaatgttatattgaatgtttgtaccctttcagggagtttctttggtttgggactgaaataagattaaaacacaggcttcttaaaggtagttctcactagcttgcaatttttttgaatattttaatattaatttaaaagaaccacagtacaagagtgaagcgccactgtggtttcagttagatcatctttatgggctgaaatgatcatatctccactgaaaacctattagaatttatgattagcagtcgggtgtacattttaccccagcccgtagatttgttcttttattatttatggagtggtgtcacactgtactccttcg

SEQ ID NO: 25236 - DNA, 2162 bp, Mus musculus
taatttttcagaaatggcagcacaaaaggaaatctatattaatagagtactttactaagcgaaggagattaaatagaagccacaaaccaacaaacttggcaagcaaggaaagaaacctgttagccataagacatgttacaaattcatcaacatccagtagctgtagacttcagaagaaaaaacttttcagaaattttgtcaaagcagacaggtcagtgataaataactcctctagtaatagggttaggccggaaactaatcataattaaaacaaattggatctgaatgaagtttattttcattaaaaaaataaaaacttctgaaaacattaaattagaattttctgcagattttcatttccctatccagcagaaagcaagtatctttcaacattcatgccagcttttctcatgtcttagaaattgccaagagcaaaattacttgaaacaacctggtatttttgttggaaatgtacatcagtataagttaaagttgatttttaagatctactccttagtgacaatactaagtacttagcatctgtacctacctggacacagtcctcaaaaactcctcagaaagaaagacattactcaggaataatgtccattcaggagaaatcaaaagaaaattcctccatagttactaaagaaagtgaagatgagaatttagaagaagaagttgaaagttctcagaacagtccaacaaagaagtcaggctccaaggaagctgtaaagacaccagttagattttccaacaaaagtaaaacaaatgagtctgaatttggaatgcgaatgagtacaaggtcagcatcatgttcagctgataaaactgctactaactcctttaataaaaatacagtaactttgaagggacaatcacaagaatcttcaaaaacgaagaaattatgtcaggaaaaattatcacttggaatcttgaaagggaatgaacagcttcaccgcagatcacaaagactacagcagttaacagagtgtacaaccaggtctttgcgcagtagagagattcatggtcaaattcaaacagttaaacagaatcagcaatcagcaagaagagaacaatgtaacagtactcaaagtaaatgtaataaggttaaggtaaatcaaaagcatgtgaaaagaaaagtgcttgaaatcaagtctgattgtaaggaggacaggcattcagttacaaatgaagtaataaattctcccaaaggaaagaagcgcaaagtacagcatcagacaacttctacttgtagttctcagtgcaaccaagggtctgaaaaatgtctccagaagactagtagaaaagaagaaataaaacctgtgcctgtaactgctgatattagaaaattaaaagcagctacttcagtggtctctaaaaagaatgaactgaggaaatcagctcatacacaagtgagtactagcacaaaacgcccccaaatcccactgccactagtgcctgaacacagtgatgaccaggaattggagcaagctggaaagagcaaaagaggtagcattctccaactctgtgaagaaattgctggtgaaattgaatcagatactgtagaggtaaaaaaggaatcatcatgtgtggaaagtgtaaaggaggagaagcctgcagaggtaaaactgcaagggaccgatgctgaaagacaaatactccatcataaagaagccaaccaggatgtgcgctctaatcggttctttcccagtaggaaaacaaagcctgtgaaatgcgtactaaatggaataaatagctcaactaagaagaactccaactggactaaaattaagctttcaaaatttaactctgtgcagcaacataaattggactctcaagtgtctcctaagttgaacttattacaaactggtttgtcaacatcagttttagaaatgcctcatccagtgtcccaaagtacatttttagagatgaaagcgcatggtaatgtaacttgccaacgggataaaatgaaaggaattaaatctgaagaagttaaaattaataatattgcaattgaaattaataaagccacaaaaagggatcctggaaattgtaatttggataaccatattaaaccctctcctgactcatcattggataatcagatgaaactttcttgtgagtcagcaccagatcaggtaatcatccttatcacgtgt

SEQ ID NO: 25237 - DNA, 1138 bp, Mus musculus
tttttgagacagggtttctctgtgtagccctggctgtcctggaactcactctgtagaccaggctggccttgaactcagaaatccacctgcctctgcctcctaagtgctgggattaaaggcgtgtgccaccactgcccagctttgctttcttacagaacccaggaccaccagcccagggatgaatcaacccacaatgggccataacccccatccctcattggtcactgattgacaaagtgcctaacttacagctggatctcatggaggcattttcctcaactgagggaccttctctgacacctctagctagtgtcaagttgatatataaaaccatctagtataacctaactagcaaggtagtgattgcacaagcatgaatgcagttgcatactgcagtaactgccttttttcatccattaattgtgtttgaaattacaggtgagcagaatggcaacaggaatcctggtggattgcagattggtgacctggtaaatatagaccttgatctagaaattgtccagtctttacagcacggtcatggaggatggaccgatggcatgtttgagactttaactacaactggaaccgtctgtggcattgatgaagatcatgacattgtagtacagtatccaagtggcaataggttggtactgtttcctgggttttgatgacaaagttaacacacagagataagagccttaaagaaagcaagtactatgctgaaactcagagtttattgaatttagttcttagacgcttgataacaaattcagagcatgtgggtaaagcagtgagggacgtgtatgtgtgtgatcacatatttataataaaacctttttatatttaaaatgtggcacggtagcttacacttataatctcagcactgaggatattgaaataggaggattattgcaatttcaaagccagtgtggtggtttgaatgagaaatgtcctccataggctcagaatttgaacatttggtccccatttggtggtgatgttaggaggtagcaccttgctggcagaagcacttgagtggtggcaggctttgagagttcatagctccctacttccagcttgctctgcttcctttgtgtggttgaagttgagatctctcagcttcctgttgcagctgcct

SEQ ID NO: 25238 - DNA, 1183 bp, Mus musculus
taacgttattttgttactatttcataactgattttgctactattatgaatcataatacaaatatcagatatacaggatatctgatatgcaactctcaaaggggttgtgacccataggttgagaatccctgaattataattgatagggagtttggctaggatagaatgataaatatatacgtgtgatcaggaaactttcttaaactgctctgaagtaaccaactctgtgtgcagtgaggtacatacagtgatgttctttatgtatgctatgtactggtaaacatcaaaagttaataaaaaaaattcagaatgtaatttcatagggttgctttattattttgaagtagtacagagtttttctcccagcagtgtttaaagatatattgagtgaattcacttgttctgagcctgagttctgtttttgtagatggactttcaatcctgctgttctcactaaggcaaacattgtccgaagtggggatgctgcacagggtgcagaaggaggcacctcacagtttcaagtgggtgatcttgtgcaagtttgttatgatctggaaagaattaaacttctccaaagaggacatggtgaatgggctgaagcaatgcttccagtaagtatatgtaaatagtttggaaaaaaatactatactgtgcttgtaaaattaattagctaattaattaaagcaaattaattttagaaacaattggaattgaaagttacataaaaaaaaatcactcagaatgtaattgcaaagaaagactgtgcacagaaaactgacaaaagctaaagtcaagcaattgaaaatcagctaaaataaattaaggatatgccaagacacagaagaataaaagaacaggaatgaggtgttagaacataagaaagaattcaaaagaagaaaaaggtcatttaaaatattatgattggctgaggagatggctcagttgtaaagtacctaccaggcaagcaggaggactgattccttcaccccgaaccatgtaaaagccatgtatctgtaactccagcattggagaggggagctgcaggtcagtggagcttgctggcctgccaggccaacaaatgggtaaatgccagggtccacaagttggtggggggagggagggagggagggagggagggagggagggagggaaggagagaaagagaccttgcccctctctgagat

SEQ ID NO: 25239 - DNA, 1162 bp, Mus musculus
tgcttgtttgtggattaggtgtacccatgaatgtaaaggtcttagaacagtgtttgtcatctggtgagaactcaggttgctactgatatctgtgcacagctcaccttcctactagatttaatatacatgttatttcttaaaaagcagtttctttacacttttattttagagtaactaatactttatgtttatcagtgtttgcctatatacatgtgtgtatcccacatgtgttctggtgcttggagaggtcagatgaaggtgtttgataccttggagctagatttagtgttggttgtgagccacctgtgggtgctaggaacagaacccagatcacctgcaagagcaggtgctcttaatggttaagctatctctccagccccattattcagatatttcaaaaaggatactattaagtttgtgactaataatctatttgagtattgttacctcaaaattttaaaattagtaactaagtaaaatcaacactttaaaatacataaggtgatgattgcatttaatattacatttttcttttttaagactttaggtaaagttggccgagtacaacagatttattcggacagtgacttaaaggtggaagtctgtggaacatcttggacgtataaccctgcagcagtttccaaggtggcccctgcaggatcagccattagcaatgcatctggtggtaggtttgtcttgtttccctaaagatgatacccagatctcagactggacatggtagcacacacttttaatcccagcactcaggtagatctctgagttcaaatctagcttgatttatagtgctagttccaggccagccagggatacacagaaaaacccttatttgaaaaacagacaaacaaacaaaaagaagttctcatgcccagatggtcatgtctgtgcacttccagatagcatggactcacttggacattgagtacttactttgtaaaccttttttttatttgtttctatggctttgtttttctaggcagggtttctctgtgtagccatgtctatcctagaactcagagattcatctgtctctgcttcctgagtgctgggaataaaggcttgtgacaccactgtccagctacttttaaactttttctttttctctttttttacactttaccctttcctctatgctccttcccta

SEQ ID NO: 25240 - DNA, 1199 bp, Mus musculus
ccacacacattcagtgtgggtctgtcttcctctgttaaacctctagaaacttcctcaaagacacacccacccagaggtgtgtgtcctaggtagcttcaaatctagacaacttgactgcaaaaattaaccacaagtttgaaagataagtcttagaattatattttatatagctttttagaacaaaaaaagagacaaaacaagacaaaaagttaagactgtacagagattaggctctgtagatgctgttgtttagagctctttgatatttgtatagaggattaggaagattgttgaaacaccgtaaagatgatctaaagtgaacttaaaatttactgtgcaaggcacacgatgaaataatcagtaactcaattttccaagtgatttggttttagcaaacagtgtttacatttattgttatttaaaatttcaaataggtccagaatgctcactgctgataggctgcagtttcttataggtgtggacactatccaaatgaggcatctttctctcagcttttggtccgtgcaggtgctaagctagacattcaggataaggatggagatactcctctgcatgaagctttgagacatcatactttgtctcaactacgtcagctacaagacatgcaagatgtgggcaaggtagacgctgcctgggaaccttcaaaaaacacagtaagtaaagataatgtcctctcactactagtggaagcaagttttatatttcttctgcatctgatttgcattggacaaaacattttatcggtgatagacttgggtttatcaaactttaatactactactggttcctatgaagtgcatttgttctgcatcttatcaaaagttgtttggttctttaaaaattcagcagtacaaatggggtgcagtgagtatgtattatggttttaatttgaaatccctagtgcctgttcattctgacctgctttttatttgaccaattccacatgtattttaagagctctgctcaaatctttttcattagaatcttagtattccttgttttcttgtggttttatgttttgaggtgttggcagggattgagtcctaggcctcatgcatgctaggcaagcactctcccactttccaggtcgtttgttttcttctaattatcaagaattgtttatatcatacaaaaacaagtccataccaaggatgtgatgcctacttttgctgtgtggc

SEQ ID NO: 25241 - DNA, 1209 bp, Mus musculus
ggataaatatatgtaaagacagatatgctaactcatgattgtaatccctcacttaggctaaggcaggatttgtaaccaaattgtgctaaaatagtgagttcttggcccacctaggctggagtgagaccctgtctcaaacaaaatcacaaaagcatctctgtacacaattacatttcctatggtttccagacactggaagtatactgtatcctccaagtgtagagaagaatcggaagtgtaggtatgccagttgtgtgtataatggctggtgtgatgtctgcacctcctgccttcctgaggagagaaggtccagaatggatagttggtcctttttgccttcccaaaaaactttttattcttataaagctgtaagagatggggctccatttgatctagtgtttaccctcaagatgtttctctaaattcagatgagcctacaagtctaaaatcactctgttgatgttctccttgtcggtagtgccctgggatggcaggaagtgagttgtgctgtacattcatgcttctttcccttatgactgtggtgttttgtgatgaggcctcagtctaccccagttatcctcaaactcttgttccttctgccttgacctttgcatggctgggatcatggtgtaagccaccatgcccgatttttgacaatgttcttagaagagcagaatgtcttaatgttgaaaaaatgtaattagttttctcttctactatgtatgccttatgtcctaagaaatctttggcaagatggtcattcaggctccttctatagatgcttatgaagctgagctgttgcatttaagttccagtgaagttttatatagtggatgttataggttgccgttcatttatcattgattggtggccaactgtcgctataccatttgttgagtagcatctttttctgcttgagtgcctgcttcctttatccaagatcaggaagctgtttatctggaggtttcctcttcatacagggattgcaggagcatcttgttcttttcgtccatgttcttttttggctgtgggattccccctcaagtgtcttagagctttgtgattcaacatttgtttatattgaaatctggaaagggaagtcctccaaatttattttaaataattgactattttaagccttctcactttcaaatgaattttattatcattttaaagagtataattgaatctgaggcccgaatgtttgtg

SEQ ID NO: 25242 - DNA, 4785 bp, Mus musculus
tgaacattctttaaactgccaacatatactaagatacaataaatagcttaatgtcagatacttagaaaaggatgctggggcatttgtggaaaagcatggaaaacacatgttgacttggttagggggctaagcattttgtctccttaaatgagtaatctttgtatctagcctaaatgtatgcacattgtttcaagattcttcactgctagattgttaaaaacaaaaacaaaaacccacctatcagttatttacaatagtgtccactgtgcgctgtgtataagcatgcactcttaaggatagtgttctttgaggatagtttcccctgcatttgaatctggctagcttgtgtctgtttttttgctatagcaacttaaagtgggagagcagtgtccagcctgctgtgctgtgctgtgctgtgctgtgctgtgctgtgctgctgctggttacttgcggcccagtgagctgagctgctcgttgtcagcaggctcagcagtcccatgtctgtgttgagctgagtaactgctttgtttctctttcgtgtttttgagatagagtctcactatgtattctaagctgacatggaacctactgtgtagctcaggctagcctcaaccttatgatcttcctgcctctgccttccaattgtggggttgtaggatggcgatcccacatatttaacaactttaaattattttggagggtacaatccttattagtttcaaattaggaatgttctattgtaaggaagcaatgaggctatttttttctaagtataatttgaagagtttttttgtttttttaaagatacatctgatgatacgatgtttacataaagagacaaactatcttcttgcagacttggaaagagtagaaatgaggatcttttcttccttgccataggctgcccacctctttctacttgtcatcaggcaaggaggggtggctgctatacagtctgccagcccgagaacctgtgtgccacagctgtatcccacttcactcctttctctgtctcccaggctgcagtgccaagtcttatcctgtaaagattctatctgttaagggatagacctcctgacagcttcatcatctccacgcagagcagagcacactagcttaggagagagaagccgtcaagtctctgtagtgctggggacttacagctttctctttgtcactgggccatttatgttatgtatagtatggacagctgcacttctcttcaggtcttcaggcatctaaaattattgtaaatttgttttgggcttacaggagatggtaagaccaggaactgaatcatgccagtgacttcctcctgcactctgaaactacctcttagtctctttacaacacttggccctttggggatctttccttctagttacccaaacctctctttcctgtgcctcagaagaattcttacttttccttagaattattattacaatgacatgcattcgtttgtttttttttaaagtattggacttgggctaagtggggggcaggaaagaaggtcagtgtcttgtgtctgtggacaacaggatagggtcctgaggcatgttagcattcctcactggtgtttcaggagagctgtcgggagcaatattagattccctctctatgcccctcggcccaccacattttctcctttattcacgaagaccgtcggctttctcactgagcacagacataacttatcaggcgctgctgccacagctgctcttgttcacatagtttaacatccttacctgtgctgtacacatgcagaattttattgggagtggggttttcaagagaatataattttatattagtgtaagaatattatactaggcaaatgtttagttatctgaattacgcttaaggtattgtaatttaataatggcaggttaaccagaagtctactgaaacgtaaaattaactggaaataattccttaaattttatatttttgaagactttagcctgaaacaaccttttactttagaatgttgaaaatgcatgctgcttaagatttgtctagttcaaaattcaaaccttgctgggtcatttttacacagggaacatcctggtagccatgtattgcctggtggatgttttttgtttattttgaattctggacacttttgggataaagaatagttaaacttgccacctaggacaaagctggatgtagcagagctggtttgggggtttggggttgcaacaaatagaaaacaaaaacagtgagctcagaggaatggagcatcatgtaggatttgccacggtattggtggggagggcgtatttaactaaaacatagaagggggtctataaggtcacttcttcatatggcttgtcagttgttttgtaaattacagactttaacacgacttgctcttttaagcccaaaaggaaaaacatttatcctttcagagtgtctggaatgtttatagtaataatttctataaaaacactcatggatacatttttggtgtttttttttttttaaattgcagtgagaaccacatatcataaggtttgtcgtcctgactgcttctaaacatgcagttcagaagggtcacttcctctccgtttgttgggaaacacgcatagaactttatcctgcacctatcaaaggcttccttcttccttccatctgggcaacagggttctgactacttagaacaccagcactcagattgctgactagagtcatttgtgtttgcaagacccaaacctgggtcaacatcaggctcctgagatttgaggaagggcacctctcccctgccataactgctattttttttacatgtatgttaattgaaagagtttattatttcgttatgagccagaggggggaagcacattttaaatatgggaaataagttagctttggttttgtactgtattgggaaggtaatagatttttcacaagtgatttgtgccttgttataaatgtcaattgtcattgagtctacttgtcaaagtcacagaatacatttttctttcaaaatggcaacctgatttagcttgtttgaatattacaataggaatgcttactgatactacttgataatcatgtatatccttttgacttacacacacaaacacacatgagacaacaggattgataattgcagttgtatgtctttaaacactaaacgtaggaagctttttaatgttgccttgtgtgtgtgtgttgctttactgcagtgagggagaaatcctttgcaccaagcttcagtggctgataagtggctagcagtgggtaaaattacaatgtaaaaataggggtggatagttaataacgttaagttgctaccttggcattttctacctccttttctacgagaatactgcttttctttcacccatctagcatcttgtcttatttgtgggagaaaaggaaacaacctgaagataaagttagattttctttttttttttttttgagaatttaagcaatagatacaggaaaagtggcctgtcacattaatttggtgcctaaatgtaaaggtttgaactgataaataaaactgtctaagaaggagagtagtgctgagtatttggactgtcctgtatagttctcttgattttatttcataaacatgacttctttcttcaaaagcaaagtggttttctaattttttatgaaataagcaaatatgccattttgtctgagtacagtttcaggaagctattgaaagttctggctcagggctttttaacagttaaagcaattgttaatatattttggaaactccatctgcataactcttcagtgccttgattaacttggcaacacttaaaaaaactttgtactaggtaaccttcagtgcaccagtcatgatatgcacgttctgatcatactgctaagcatgtgcaagaacacctctacgtgtgggtttgcataattctataagggaagtgttctacatttgcacttgatactttttttttattattattactctgtttttttacaaactgattattcaaggccatggcactgttaccagaaaaatggtgtttgctgtctatatgcaagtctatttagctgctggggagaggacagagctcacactttgtatctaatacaaaaagaagatcaatacaaaaaaaaaagatcatcttcctctcaagtggaaaccaaaccaagccaaaccctttgtttaagtggctcagttaaatgattaattgaaaggaaatcatgaattgcatgtcattcttcatgctgatctgtagactaaaagcatgtttttctgtctccttcaggatgtgtctgccattctaagtacagtatattcaaatggtagaaaaaaaagctgactcaaaggttttacgctttgtaatttttccagttctttttagctttcaatgttggaataaatttaagtcttgtttatggctaaagtttctgtatggaaaaatgattcttgcttattagcttttgtttaagaaaaaaagcttagtaaaaactaagcttttaaaaataaatgcaaacatttaccattaataaaatctgtggtgtaatatgtttttctctgactttttggaggctattctttataataacataaatgaatttttatttttaaggcatttgaaaacaaatctcaatacatccaaaaaatcctattattggaaagaaaattaccatatctttgagaaacaaggacatctctccaactcaatgtaagaagtaagcgtccacatctagaaggttcttgttgtgagtgctcacatgtcaggcaggagcctgtctaagggtcagaggagcttgaatgctttagtgcctaatctt

SEQ ID NO: 25243 - DNA, 1113 bp, Mus musculus
ctgcgctctgctccattccgctcgcctcctgctttcccttgcgtctttgggtggatgttgctgttttaaattagcccttcctagctgtttgaccgtgagcgtggagaccccagtgggtactagaaatgggcacttggcctcagtggatggtggaaatggacataagcattttattggtacaccgtagatgtgtggaattctacatttccgtctcatagccaggagaggtgacaggtttctgaaagataaatataaaaggatttcttaactacattttaaaacttaactttcaggttttcttcattaggttaaatggttggttatttacatttataatgagaatacaaagtatctggaagggcagaaggtaagaatgggatctgctacattttaagaaggcagtgaaacatttccgtttacgtttccccaaattgttcacatattgattgctaatcatttggagagaactagaacaaagtaagtggagctgttcagtaagtggaagacacagcctgaacagctcaagtactgaattgaccggctaactcggctgtgggcctctgccagcgtcacactggctggactcggcctgagaaggtgagccttgttctgaagaccagtgcttgcttgctctcacctcattaccccagttccgggagttacattggatccactaaccagcttcactttctgtctggttataaagagtaaatgtaatttatagttgaaaaattttaacattattttaaattgccaaatatgttctttctcgactatttatttttgtttctgttctactgctttaattgcatttcagaggagtgaatttaggtggctcatcccacttatgtttgctgctccacacaaagatttaaatgatgagaaattattggctggacacaaattgcagaaaagtcattagaaacaatcatttaaaactttgtttgctttcttcacatattctttctcaaaccattgcttggagtgtgctatgaacttgcctttcaagaaattaaaaatgaagagatcattttagaattggttcattgtgtggttaattctttgtccttattttaatgtcctggcaccaagacaccctttctatagcaaagt

SEQ ID NO: 25244 - DNA, 1129 bp, Mus musculus
gaggaagaagggggtcttgtaatgtcagttgcaaaaggagctacaggcagcccactgatccccagtaaagtccagtgttctggctactggtgttagacaaatccttatgaactagacgccaaccacacagccccagatcctctcccagggcaataccgctcacttaaccatagtgtggatcctgttgctccccacagtagcccacgcagggaccccacttacataccttgttttccacgaatggtgacagcacctgtgtgtacacatcagactggtctaccactgcttgggttcgcactggccttttgagaggtgggttgctccggctctgccctgcttctactgcctaaagtggaacaacttgtgaccttggtcatcttccacagacatggtactcactacagttaacccaagacttaaatttctagacacaagccagacacgtgacaagcgagacaaaactcttcccatggcagacctgtgctctggcaaacactccagggtttgtgggagacctcaagtaaataaccaagccagtcacgctctttccaacctctgaagacgtataactgacctcagcttttctcactcttgaccagctgcactgtcgttcatgaagctaccagacagtaaaggagcgcagcgtgcactggatccatgttggcattttaaaattcatttttgtagcctttgaaatggatccagggcctcaccaatctctacattccgaccatcaagtcacagcctctggtcagtgtaatgggaattatttgacagtaagccagagttccccaaagatgacagagctgtgagctacaccagctgtgtgatctctaaagagcaggcacagcttcagtgcggacagcctgaccatgacatcagtctgacaaagcccagggtctgccactgggctcaaacccgctgactccacagcccaggacaccaccagaaggaccaagaggaggaaggagacagaacaaggacagaggtgatgtaagcagcctggccttcagtggcccatcagactaacttcaaagagccaagcaaagtgggttctcagcttgtttaaaacgatgtccactgttgctaagcatatccttgaagtaatttctcccactgatcccaagtt

SEQ ID NO: 25245 - DNA, 1234 bp, Mus musculus
cactgacctgacaaatccatttggggttttaggcctgttttgttttgttttgttttgttttgttttgttttaaagatattgatggggggggagggaggaggaggaggaggaggtggtggtatcagataccatgaagctggcctacaggtcggtgctgggaactggggtcctctgagcgaaggaacctctctctcttaaccaccgaaccattgctccagccccatggcctgggtgccacccttcgtttgttttcaagacagggttcactgggtagttcagactggtcttaactgtgtagcccagactggccttgaactcatgctttttctgtctcagcctcacatgtgtgggattgctgacataagacctccccatgtcaggcttgttccatcattattaatatttcttgacatgtttagcaagaacttttgttacttcatttgctaggaagcatgaaaggtctgttgattgagcatttattcatttatttatttatttatttagctaaaatctgttttccatgattccgtaggtgttttcgcaatcctgtgtttggtatggagagtgtggaattgcgactggagataagaggtacaactgtaaatattctggcccaccaaaacccctcccaaaggacggctatgacttagtgcaggtaagcgtgctgttttgagagcacccaggcacatcttatagaatcttatgaatcattatagactctataatgggaccaaggatgctggaggtgagactagagggctgaaatctgtaaagacgtttgtgtgtgtgtgtatgtatgtgagccttcacatgcaggaggtcagttggatctcctgtgaacctccacgtgggccaggaactgccatgatttccccacacgctcagtcatcactgctgagctgttgctccggcttaaatcttaacctagactccagcctgtaccccacaacacagagctgataagaggtttaaccctccaggcgctgactctgcgtctcctggcgtttcctagtgggagttactgtttagagatgaccttggtacccacatgttaagttagctttcttgttgttgctcctagatttcaacacttgctttttcttaggctttgtcactaaaaggctggcttctcaccacctcttagtgatttcgctgttccctgtaagcccgtgagttctggctacctcccagacattgctttttgttagtgtggttcttagggctgtttgggaaa

SEQ ID NO: 25246 - DNA, 1444 bp, Mus musculus
gttccatcaaggtcctaacccctacagtggagcacaggactggatttattctggcagctactgggacagaaactacttcaatttgcctgatatttattaaagtacagagaagtcaaggtgtttgctaatctaaataagtcttaagcttaagatttttaaatgtttttccttggtttctactcctctataatttgcgtttcacccaatagggcaaggcatctggtacagtggggatgacctgaaagagaagaggcagtgctgtgccacagctgcccccttggagccctgctcatggccagtgagaagctgttggctgcagctcctatccccacactgtaatactcagctctatggaattctatagtgatccaaaaatcaagttattttgaatatttttatgctataatgcttaaatattttaggtgtagctttgaaatgtttagaattcttctgtacaatgttacgtgttcaaatgtagagattatcattttacaaaaactaaattggtaagatggccttttagggaaattaatcctctcaacctcactttccttcctcctagagagggggcagaattcctgatctgaaaattctaaactggaacaggtatttattatcttagtgctcggaatttacgttcacatcttgttattagactttacagggttaacttgtaacaaaaatgccctaaaaatagattttaatcaatattatctaatgacacaccttttagcctcaacttccagtggcaaatgccacagagaaattaagctgcactcatgtattgcaaggtactggagacctactgtacagtagctttccccattcattggggcaatctcatagtatttatccaaccaaaccagactgagatacttgccctaaagagccttaggtagcttccagtaagttatgttgtcttgaagttaacaagtgttatgatgctaaataaaggctttagaatatcaaataaaaaagtgtgaatgctttcagaatttcagttgatattgtaacctagtactatccttaattatcaaaggtattcccagggccagagagagagtggcatgaagtggtcagttagcactctaacttgcttatgtatgacagtgttaaggaagtttgtatacctgctaagttactaaaacagcaatgcagttttatgcttgcaggaagtttattgatacagttcacatggtgacaaactccaccttgaatgctgaatcaaacagcatcagcatctgttaatgaagagacatgagatcgtttaaaaatcggtggtactaatcaaaaatatcctagtatttcctgctgaggccacctcttaacaacacaaggttgctgtgattaaaatcatgaccatgcaattgaaatattgcctccctctcagccccccaagatcacagtagctgaaagccacatgcctggctggcaagcgcttcat

SEQ ID NO: 25247 - DNA, 1132 bp, Mus musculus
cttaggatcaggactgtatggagagatacctgccctcttcgggctctttatcttttgctctctctgttaaggcaaatgacagagcagcccagtgcgtatgtggtagcttcagagatgtgtgcaccctgatctttgatatgtgtgaatgtttggattcgaagttgtgcatggaactgagattgctactcggctgcctgaaaggtgggctttgcaatcccaggagtccttagaactctgagagggagggagggagggagggagaagaggagtcgattcagcgttgtccatgctgtgcttctggcttgcaaactgtaggcagcagccatgaacccaggaatgttgatgacatttagaagctagaacagctggggaacaaattcccctacagagcttctggaacattcctgtccttcactgctttgacttcaagtgagctgcatttcagaactaataaagtgtggaactataggattcatttcagtgttttaaaactccaggtttgtgctagctaaagcaataatagaaagctaattatttgttggggaagcagcctcgtgctgtaagttctgtgggtttatttcctacagaggctgctcttttacttacagtgctttctgtatctgtttacgatgctgtgggtctgtgggtccctagtggataccaggaccatgacctggttggttcatgtgggtagtttgtccagtgaggtcggtctcttttcatgataaccattccccgagcttttagtgtcctagcagccaggagtcacctcatcccaagttttcataattctctgtattataaaggaagtgacctggcagtctgtgcttcctgtgggcatataactgtttccgggctttcgtcacttagagaacatgtcacatggctccacagttccatccttgtcatggtgttttgtgtcaatcaccagccaccccctgtatgtggggcattctcaatgaatcccttcttgcctgttccatcagaagttgatacttgtaaaccagatttgaaaccttaactccatgcagctgaggcagatgcctctttttaacacagctcctgtgatccttgctgagacttaggtgtgacttcgtgtgatttctcttcatggctctggacttctcatctt

SEQ ID NO: 25248 - DNA, 1155 bp, Mus musculus
cggctcggctcggctcggctcggctcggctcggctcggctcggctcggctcggctcggctgagttgtcacatgagcaagccctgttcatctactgcatcatatgagcaggctcggctgggctcggctcggctctgctctgctcgcctgagttgtcacatgggcaagccctgctcggctgctgcgtcacacgagcaggctcggctctgctcggctccgctgagttgtcacatgagctagccctgggctcagctcggcattgtgacttgcacaggtccgatgagaccgagatttcgcagacacagcagcatggttatgggcgtggcacagatgggtagggttagcgtacctcgagtgtgtgttcgagctgcttgcactggtgcttctagagtagacactcctaagatgcatttttgtttttttcggattgactgtgttaattgttaattctataaaaggtagcatgaacaggttgaatgtttatttgttgacttttaaaatcaactttcagagtgaagaaatcgaagcaatggcagccatttatggcgaggagtggtgtgtcattgatgaaaatgccaaaatattttgtattagagtcactgacttcatggatgaccccaaatggacactttgtttacaggtaacttatatatatatatagaataaatatattagaatatatatatatatatgcagctattttccagacattagaacttaatatattaaaattgatttcattgtctatttatgattccagtatgaattggtttttggattgcctttgttgattattgtcgtgattatgcaaacgtgggtatttgattagttacagatcaccctcaaatcatgcttttgttgatggttgcaatccttcttgccataattcttctaattattaaacatgtgttttgtttacagtcttgagtcacctctttttgttactctaaacaataaaagaaggtttagacctggaaaggtggggaaattaagatgaggaaattatgactgaaaattcatagagcagatacttgtttctttagagattcagttgtgtttagaataaataagatacatgaaaagattagttatggctttctgtcttattagttgtggcatattccatgactggtatattttcaaataaaggatgctaa

SEQ ID NO: 25249 - DNA, 1150 bp, Mus musculus
gtggtcacttgcagctcatctttttaaaaaaatcttcccatgcttgtttccatcatgctagcacactttgcgcttgcccaaggcagtgccatgactgcagtggctctcacgttcctgtacatgagtccagagccctgtgcaccaagggagcttctcacaggacaaagcttgcctcttctacctcacacggaggttttgttttaaacagattgctctaaagataagagagagtccatcatgcttattgaaaatgcttgaatagaaattacagtctaatgacagtgttttcatattgataaacatcaatgtgaatggattttttttagagttttatgtgacaacttttaatgattttatatcctagtcatgggcattaagtgcaaaatattactaaccttaaaatatcaaatacaaatctgtcaatatagtttttaatatttatattttcataatatagtactgttgtatatatttagtataattttaaatggtaaattgaatatttgtttattatataagaagataaactatggttagtgggcacttaggtaagaaagcatgaatcttttggaaaacattttttatattctatatacttttttttgctaggaatctgagatttaaaaataaagatgaagagctaggtgtgatgttatacacctttgacccaccacttggaaggcagaggtgtataaagctttgtgtgttcaaggttagtccagtctacatatcaaggactgcatagtaagactgcctcaaagcaaatgaagatggagcgttgcaggatctagttcagtgtgagcactcttgcctcaagcgggtgggtactgggtttaatctccagctgtatacacagacatacaaatcaagatgaatgaggtactaagtgtggtcaccagcaacacatacatatgcacacatatagcacgacacacacaggaacacacacatatacacgtgtgcacacacacaaccttaactgtgtacttataaaatattagtagcctgtccgaagcttagttaggctgcattaaggctgttttggtcaggcttctgaaatcagcttttgaatagtatgactttcttgtgtttattttcatcacagtagaataaggatagtatctttgtgaggattaaataacatcatata

SEQ ID NO: 25250 - DNA, 2829 bp, Mus musculus
ggtcttgtacatggctgtggtgcttcattgaatgctttctcttccaggacgagtcaactaagaatttggggaaaaagaaggtgaagaaagacaagaagaagaatgatcattaagacgtgaacctgtgtgagaggttaacttcccagccactgtggacacgttcccagtggtcatgagtacattaagatagcacactgacagctcaagtcagccagttcatcatggttccaccagcattgtgtttcctcctctggttccaccatttgccagaactagagaatctagaacatattcacatgtgtttcacatttatttggaagaacagctgtgagcttacttaccatttcatataatactaggaagtgacacatgcacagtgttttcctgagctaaatgtcaatttcagtattgtcgcgtgcctttgttaggcagggaagacgtgtctccagaggaatagaaaggccacatgtcttgcgatagaaattgccatgctgttaagtgagcattgctttttcagctcccagttgctttcagagtgggggcgcatggaagacggaggtcttggggagtctttctcttgtgatttcacaagtgagtcacgcttccttccatagtattcatcatggagtgatagtttacgtgaaaacccgagtattcatctgtgatcatgtgccaaagtgatagtttacacatttgctagtccaagtgttactcctcagttgtttcaaattggtgattgtggaatttcaaaaagttactatttcttagttgttgccttttgttgtttgattcctgtagtgacacacagtgaccattcagtctcagtagtccttcccagtagtccttccgtcccatcccttacgtgtgttgaggtaacattccggtgtctctgaacgacctggaagcacttccctgtgctcttccctgtgctctggtcaactcacttgcagaacgagatagaggcagcaggacaccagaggagcaggctgcccactgcaccagtttgatatacatttgccatttgaactctggccagattttttttttttttagttctgtgattttttttttttttttttttttgaggagagatagagggacaaatcttttgattagattaaaaaaaaaacctctttccctgcggaagtttttgtctaatctccttttttaaacacgtgtttaatttattttttacatgcatattacttgtaagaaataagacaaaaattccctttgtgtaggtaagctgtacctgttatctttcagaaataatgccaacaatgactaaattgatcaacggatcgcagactagtttgattcccctcccgaggaagaggcagccttgggagagtgctggagcacacatagacagcgtctgaggttgtgcaggttttttctcttagtttgtaagcttgaaagatccacatcctcacttggtattttaaataggaatccagtagccagctttacactagagtgggttctgagacagaagtcttattttcaacattatttaatgttgtaaattatcaagagttataggatgacctatatgtgtgtttggaacacttacctctgtttccatgaaatgctaagtatatcctatgtattaattgttacagagcttagacagtatttgctaaagataatgatataatcttgacatttcagacctgtgaaaagagattaaaacactaagaattttatgctgcagaaaaaaggagcataaaatattttcctagcacactggattagaatttctttcctggagttttgtctaaaatgtattagtgtttacagaagaaaagacaattttttatatctctgatctcattttccttcacttaaaaattacgtttccccattttacaagattgctaacctcattttgtgggttgagctccttaaccttcgctgcaggtgggaggggagaccccagttcctcacttctaactcctgaaattgcgtatttcacatgccattagtgcaaagtaatgatagcatagttttctctattgaagtagagaaaatcatatgtagagaattttctagttctcccaattataactttgtaaagccaggcgtctgctgtggccttctctatattttattagttgacatgttctccacatgccagtatctatgagcaaatggcatccacgtagacgggcagagcagaagctgctagtgaggtgtctgtcagagacaggctgttggaaggaagcactgatacaggacagataaagcagatactgtttacagggcaggtgagtgatactgtaatcacttcagtgaattgtaatcacatccagtccactaaagagatgaccataaatggtgtatacagtttttattttttattatgcatgattttgtatatatggctatttttctttccgtaaaaatggtattaaaccgtatatactgttttgtatcctacatatttcatatagaagtatattgttaacattttcccatatcaataaatattcttctatggcttaacttcttatggctacattgcattctgtcttctgggtacattgtaacaaacccattcctccagtatttttcagcaaggctttttcaggtttttaagtttttgtttgttgtttgttttgtttttttgagacaaggtttctctatgtaccctgggctgtcctggaacttgctctgtaaaccaggtgggccttgaacttagagatcttcctgcctctactaactgagtgctgcgagtaagccagagttttaactcttagaagcaaatgtaaagtgttgtttcattgcataaaggttttcatatgtctctctgactgtaaggaaaacata

SEQ ID NO: 25251 - DNA, 1195 bp, Mus musculus
tgtagttcttcctgtactttcacctcagagttccttaatcccctactggaggacattctcacccactgcctttgggttgtttttttgtttgtttgttttgttttcgggtggggtgatgttgttggttggttggttggttggttggttattgttggttggttagctggttgttggttggttgtttggttttgttggtttgaggcctctgtctcaccaaatggtacaggctgcacttgaacttgcaattcctctgccttgtccaagtgctggaattacaggtacaaactgcgttcccagctcagcaatcatttcttaaagcccagcttggatttcaattatttgaacatagcttgtttgtttcctttactttcttcttgcttacatctatggacttgtgctacttgctaagtctgtgacagttcacccattatcttaagaactcgttcataaacttatccatttgcttaaaagaatgctctgtaaaccaggctggcctgcagctgaaagcagtgcatcaccacgcctggtagggcgattattcttaagccttgctccactgcgacatgagcatacactggtactgccccttgctctactgcgacatgggcatacactggtactgccccccatgcgtccctcaagtgctgttcacttgtttttcccatgtgaattacttaccttgatctgtgtttatgtccattgtccgttgactctgtcatatgtgtcacgctgctaagcccacacagtgcttcattatcatttcttcagcaccctttgtggtgctgctttccctctgttgagatttctgagctcccatttacaagacgtgtcctgcctttcctgtcaatcagcacagtcttgatgcttgctttaaaatcacgggatgcaaatccatttgaattattgccctgaaaatgaatcacattttccattttcctactttgtcccataattttatattgtatcttggacgtaatgaatgagtgttctggattttgttaatttccttcaaagagaactgatatttttaatttaacagcttggctttactcaggctggaaacagtctctaagattgcaatttgaatgttgcgataccatataaaatctttcctgagtgcaatcagttctgcactcaggggtcagacagggttgtgggggaagtttatatgcagtttactgtttaccacaccact

SEQ ID NO: 25252 - DNA, 1198 bp, Mus musculus
tgtgccttctgcctaattgtatttattttgttcctaaaatgcccctgccctggtggatggtgctgcctttcaaatcagtatatttacatgccctcaaagacccaatctctgattgcagagtatttttaagtgaaaatgtatttagggttttttttttgttttgttctgttctgttctgtttaattctgtgaccttctagctgactaggaagcaaacacatcacaggagaacatgagggaaatcgtagagaatgagggcacaaatctctggaaagcagaactgtgtttattagcagccttccaggtggactgtcctgaagtcacattggttgtcatttgatgatcctttgcttcctttggagaaactgaggaccaatttcggtgaaggaggtggccttgtgctgatggagaacaggtgacttgatttctctcacacactaggagcttgcaccaggctcagcttaagttaccagaaaaggggtcatgagggatgcagagcagaccagcttcttatagttaacaaaatagggaaaatgcaatcattagtcgaacaagcccgcctctgttaacccttatgaaacacccatcctattagtcaactaatatcttcaaacaaatactaatatataggttaaatcaataggcctgtattataaagtagaaggtacggttgatttcataaattcatgccgtattcacttgattgttgtagtgctcgtgcttaaaagcagggcctcctgcatgtcaggcacaggcgtggtcactgagtcccagctgcagcttcagtgataatctttgaatatatggggctgtctttgcaacaagaacctaattccactgatcacctggttacattttcctgtcgtagtagctaaaggagatgtggagcatttcaaagctgttatcgagagatcgcaggcagaggaatctttgtgtctatgtggggaaaagattttaactgtattttgtattaaacctataccagaaacaaaaagaagaaaacagatgcacatcacagcagagtgctcttctgagactttggtgggtgatacattcatgtggcactacctctctctttacaaaaataacgattttcagtgtttttatgcatggccatggtgatatagtctaagacactgctgatgttaaatttgtatcaaaaatcttatttggaaaaatccaattaacttcaacatata

SEQ ID NO: 25253 - DNA, 1808 bp, Mus musculus
acacaaatgtcaagtcaacacagggtgaacattgaagacaaccactgagaaacttcaacaatagaaatctcaccctttataaagccaagcaagcacatcttttttccttcatttttgaagggaaaaattaattgttctcaaataagatttattagcatcacaggacaaagaattagctcaacaggtaaagatgcttactggcaaacctattgtcttaggtttctattgctatgataaacaccatgatcaaaaccagtttcgggctctccagctccgcgtcccgaaggtgggtcccacgcggggtcaacatgaggatcgaaaagtgttatttctgctccgggccgatctacccggggcacggaatgatgttcgtccgcaacgattgcaaggtgttccgattctgcaaatccaagtgtcataaaaactttaagaagaagagaaacccacgcaaggtcaggtggactaaagccttccggaaagcagctggcaaggagctcacggtggacaactcatttgaatttgaaaaacgtagaaatgaacctgtgaaataccagcgtgagctgtggaataaaactattgatgccatgaagagagttgaagagatcaaacagaagcgccaggccaaatttataatgaacaggttgaagaagaacaaagagctccagaaggtgcaggacatcaaggaggtcaagcagaacatccatctcatccgggctcctctcgccggcaaaggaaagcagctggaggaaaaaatggtccagcagttacaggaggatgtggacatggaggaagcttcctaacggtgctccccgcaaccagccctgagcacgctggagtggagtggagactttcggcccctaagttattcattggttccataaggtccttcagacaagggtgattcaatgtgcttcccccttcaacgttgcagcctgtaaaagcatccccttgtgggtgttaggtctcagctcagcactctgcttcactgtgttatgcgcacgcaaacagcaaagtttgtgtgtagatgaagacatgaactgtgggcataaaatggttgagccagttgtcttcctgtgtgaaatccgaatgatgtactattttccgtgcgttgggatagtctgtttattagggttattgagatggaggtcacgcaaggaactgactgttctcatgtctacctgactcttttttgttttggtctagtatgtttagtaatttctgacagttgcataatggcagcacacagcacagctgagttttgttgggccgtctgacctgcttcagccattcagcctgcagctgtgatgttggaggtgggctgggttgttaaactttgcctgaatgtccaggttgtgacatctgtccggaaagattctcctttccttcccgcccagcattgatctagaagcagaagaagaatcttggtgcctttcaaagattagggtgtggttttgttttctctccctcttcttctccctctcttcctttttttctttttctttttctttttctttttctttttcttttttccttttccttttcctcttttcttttctttcttttcttttcttttcttttcttttcttttttcttttggagacatgatctctttgtgtagttctggctgtcctgaaactcactctgtaggtcagtctgcttggcactcacaaagatcccttgcctcctgagttacgggattaaaggcgtgcaccatcgtatccagtattttttctaaaaccttaaaaagacaaccaaaaagaaactcttgcttttggaaagtagaatttatggatagaatgctaactgtt

SEQ ID NO: 25254 - DNA, 2398 bp, Mus musculus
gcttttgagatgtacctactctccctgccagcccagcccaatccaagactttcacgtgtgtgctaccgggtccagctttaaagtactaatcgtctggtgatgtgggctgtacaaaccatttgcatttgagtataatgtcaggaaaattagagtgatcgtgcataaacacttgtattttttggatggatagtcacttttctgagatgatgatatgcaaattatatttgtaattttctgtgttaaactaacttaggttaagctgttagctaattctgtttttcgaatttatctttcagggacagtatggaaattaccagcagtgaaaatgtccttacattccaatagccagtacctattagcaggcacgttgtcacagcactgcaccatggacacccccctgggaagactccttccattccagctaggtttttgggaaaacctttggctaagtggctgcttcgtcagcaagtagctgttatggtttagtttgtaaaggcttcgtagctaccgatgcacctgatttcacgtttctactctagatggcaacattggacagaaaatgcattgacgtgaggagtttgcagcggtttcagaactgtgctgcaaatggactgtcacagcctgaaaggtgtgagcagctgggtgtgtgttcgcggagcttcagggggtttcatacttttccaccgattattttgtaaggggaagggggaaatgtacactttttacagcagcaatattttgtctattatgtttatttcatgtgataaatatgcaaagcggtacactacacactgggcagaatcagaacccctgttaatgtggagtgtggtagatgctcggtgctgtggtgctctgaagacaggcgaggggaggcagaagcccaccacaggcccgctgttagttcttagaggaaactcctctctctcttatctaccagattagcaagggcgctgtgatacagttttttgagtacaaagacattttttaaaaagccttccagttttgtgcattaaaacctttttgtaaatatggtttataatactgttttcaaacgcaaggcaataattatgttgcatctgtgaactttggcaggtttgtgtaaaaggagggaagcctctcttaaaacagcaataacagaaaaggaggaagcgggatgtttttaccttgtcttgtaatcagggagctctcaccacgtcagagaggaggcagcattggtctcaccttactgttttttacattaccatgattggttcatggagcagggaggagtccacgagacttcacacgcttgtgctttaactttcttaactgggcacaagcaaagggcgccttcgtgttcctctcttcatcttagttaatgcgcgaggaaaatgctttgatggccatttctcattcgcactgaaagccgagaggtgacattttacggtttcttgtttttaagcacgacatacttaatcattatttgagactgattattttagctaaatttggggatatgccatggggcaagaaaacatgtactgagagatttctaaacacatctatttaagcatactttaaaaatatctagcccaaaggtaagttgctgtatcctcacagttgtctgcatccagggaatatgactgaatataacatatctttgtaattgaattagtttttgccacttctaactgaaaacagaacagaaggagtgccataaatgcaaagaagcaaagtgtactgttgtcaacatactgtaatcagaggaggggtttcaatgtgtctggatgagagtgtgtgtgtttaaggtcagagtatagggtgttcttcaacttggacagtagaaaataggcatcaagtgtgaaccggtgaggcgtggacagccttcttgtgactgagatgcttgtaagttctgtgccaggttctccaccactgtgtactttattgctatttaaaactgtatcaactctaacgaaagaataaattatttgtgattttaattttctcatttgtttctttaaattagatctctttgactcttactgttttgtctggagactgcactctgggtttctagtccggtacgagtagacggtatttgcattctaggacttgatcaatattctcttgccatgcccacgttaattagaattaactgttcagtaatcagcgtgttgtgtaggatgtttgttgcagaattctttctctgaaaatgaagtccgtgaagctataatcaagatgactgaattagataaatgagttgaagagacaaaattgtgctgatcccaacctggtggagatacgttatctcatttgaaatgagctcaactgacattaagaaataatttgtcttgccaacccatcttctgttgtcttattctcctttaatggaaactaaaattgcaattttaataagcag

SEQ ID NO: 25255 - DNA, 1110 bp, Mus musculus
tgatgttttcttttctcagatgtttagtgccaaagaaattgaactggaggtgagtgaaatagaaagggaaaaggacgaagcagagaagacaaagtcaaagaagtcaacctaatgccagcgtcactgggcgctgagagttccctcctgaggttttagaagaaatcaatgggttggaaccaaccattgagcttttctacgttcatcttcaagaatgtccgttgttttcaaacataagttaatgggaagattttctgtaaaattcctcagttccacgtaactctaatcgtatactgtagagcttgaatagaatagtactgttgcttttcttcatacaagcaaattctagggggaaagaagatgatttttaaagttagtaatgttttgaagtttgtctcttctctgttagttaaggagctagtcatctcagagtaaacagaaccctgagcggcatttcttggtgaatggtaaggacatcaatgtgttggtgaggtgtcaacaatttgataaaatctgtatgtgctgactccataggctaaagcagaaggattgtaagttaggcattgtgatagatgctaaaaaaaatatagggacaaaaataagctcagattattggtttttcttttttaacataggatctcatgtagcccgcactggccttgaaaaccctctgtagccagaggatgaccttgaactcctgatttttttatcttcacttttcaatgggtaactcgtctgtccccccatgcccagctagacttagcttttgtccttattactatatagcaggaagatggacattaagttacaatcattttcatttgggattaatgtagtgaaattctttatgtctgccttctattctaatttagaggctccaatagagctttaaggctgggttccagatcatactcatctttgttcttgcagcttgcctatggtgtgacttaataaatgtttataaagttggtaacttatagagtgtctccttcaaagggcagatcattgggtagagtaagggtagagtaattgtctagctacttgtgaagaactcaatttgttcatctctttggcacatgatggaagaccacacagttagtgaaaaaaatatag

SEQ ID NO: 25256 - DNA, 1099 bp, Mus musculus
ctgctaggagtattggggaaattgtagacactctctgaaatggaacctagtgtaggaattctgccactgaggatgggtccttgcacgtaccttgtctctttctttccacttgtcgtttgtgtctgatgacaggggaacaggtctccacacagccttttgccagcatgatgttctgcctcacagcagtcttaggaatgtggagtcaagtcatcatctatagatgaactccctgaagctgtgagtcaaaacaaaccgttttcccttaaattcctcctgctgggctctgtcacagtggcaagtacccaatatgcagcccatgctcacgacttccacgttgctgcacattttcaccttatgcatggggttagcacgtgtaagagagtacttgcattccccccaacctaatactacccaactaatgtgtttgtaaaatatgtttgaataggcttgctgactgactactgcccactagaattgtaacctttgtgtcattgtatttgctggtattaaggccagtgcctggaatagtgccccgtacataggagatatttagtaaacctcagtgaatactataaatccattcatgtaaagcttgaacatccaaaatcagataccagttctttccagtcttattaattaaaaagtaatgtagctgggtgtaggtgagtctctcagagtttaaagtcatcttggtgtacaagatcggtgcctgcacaatcatagctgcattgtgaggcacactgtctcaaaacaaacaacaacaaaaatataagtacttgctaagatttgtttcctcattatacctcaaaactgaatctgttaaaaatgagaagaacagtggaaagaagtttttgttttttaataagttctccaagtgagtgatagatgtgatggttaagcttgattgccatcttaactggatcaggaaataactattaagcagttttctcggagtatctttggaagtgtacagagacagttccataggagctgaaggggcctttgttcctgtgagtggcacatccaccagactgtgaacttgcatagagccacatgtggaagaaggcagggcctgcaaagagccacacatggaagacgg

SEQ ID NO: 25257 - DNA, 1197 bp, Mus musculus
ggcaggagcctattcagaggccatggaggggtgcttcttactcgcttgcttcccatgacttgctcagcctgcttcctcataggacccaggaccaccagcccagggatagaaccacccacaacaggccaggcctcccccattggttattaataacaaaaatgtcttccagctatatcttaagaagtcatttcctcaactaaggctccttcttctctgatgactacctccagtagagaaggatatgcggataatagtgtactccaggagcactgactaggcagaatggctaaaagggaacatcttaggagctcggagtctagcctgcttcaacttgatctaatggcaagtcttctgtccagcctttacctccaccacctcatctttttctttcctctcctcccacctagccctccagaccaaagtagccatttgccatctccccagttctccaggggaacagatgtcatttgcatcctgatttgcaaacactgggttaatacttaaacattcattgggggctctttgtgtactttctcattattctgcattttcttgtctgtactgatagttttacttttcaaggtcatcctgaagtcttgttatctcggccagctctctgcagaatgtaatgtcccatctcatgaaacaaggaaaacatgtataaaaaactctcctagaaatccaaatggtagcagtgtcatcccaagatctggtgctttgctctggataaactgatgattttgcttgtttcattttatcataaatgtagtttggactagaatattggtaaatgtgtgtgtatatatttatataaataaatataaattgtgtatgtgtgatcttttgactgtatcttcattgcagaaaatttgaaatacttatttttagttacatggttgtctgtgcctctgcatgagcatgcacatgggaatgcatgagctcccgaggcaccagaccccctggagtgggtgtcacaaatgactgggcgccatcagagaacgaggctggaggcagaacttggatcctctagaagagcagtaggcaattataaacaccaaaccttctctccagctctagaaattttttatatgaaacaatgttaacagcatatcagaagtaatgtgtcagggtttaagacatattggtatgctatgacatgcaattgataggaaactcagtgctcttttggtaagttta

SEQ ID NO: 25258 - DNA, 1131 bp, Mus musculus
attttagaaatagaatggtagtaaaaatggatattcataattattctttttaagccaaggagatggcttaataggtaactaactatacctgcagtcaaacctgatgcccttagtttaattccctggattcgcatgatgggaggggagaacctactcctgcagtttgtcctctcatttccacaggagcactagagcatacccctcctctaatgaatgaatgagcaaacaaatataatttttaaaatcgcatggcttaatactgacaagttgactcaaaaggaaaaggtctgataggtacagtgagtggtgacaagaacagagcaaggttttccgatttcttgaaaggtgagcatctaaatcttctaacacttagcttttgtttttgaatcagcgctggaattgtgctctggccttttctaacttttaacttaaagaactatgacatggatacagacaaatggtaaaagtattgtgtccctgttagcagtttaccataggtgcttatggttaaactggaaattagtatggtctagaaaaaaatgcagaaacgtctgtatggggtggtctgtgagcttgtcagaatactgtctgctcttgagtgcttcattgttagtgctcttatgctacattaagtgtttagggtaaggttctcctcagggctcatggtgtttatatgtagcatttaagaacttgacattgtagttttttctttaaaaatgtattcattaaagttagcttaatggtaaacttatgctgacagagttgcttgctttaaattacatagttttaaatgattttttgtgaactatttggatcccagaagcatttcttgaaatcctgtgtttatctttctttctttctttcttttttttttttttttttttttttttggttttttttttggttttttgagacagggtttctctgtgtagccctggctgtcctggaactcactctgtagaccaggctggcctcgaactcagaaatccgcctgcccggcttgtctatttttttttttttccagaaagtaaaattcactttatttttaagaggtaatgtaatttaataataatgtcaaaaagtcaactaacattaatgccgtaaggttaaaatggaatgtctaataaaaca

SEQ ID NO: 25259 - DNA, 1245 bp, Mus musculus
gaggaagaaagaaggaggagaaggaagaagaggaagagaggaggagaaagagaaaactgaggaaagaatatgcagcattttacaaatgtttgcagttgctaactaaatgtggaaattattatatattgacaattatcttggtattatccatactttaaaattttacaacaaaagttcagcattgaggctaaaagaggcctttacagcccatatagagagaatatcttctgtgttgcatgggtgcatcacctgtcaattaaaaagcctatggcatacagcttaggtaggaaatagagttggggcatccagaaagcaaaaaaggattctgagagagcgtgaggctggagatttgctaaagagatgtgatgagacagatgcatagcagctgagcacaggtaactatattacctgagcaaaagtaatgggataggtgttgaaaagaaaaatggggatagtttggtttaaatgggcaaatgtattgggccatttcatttttgtttctaaatagtttcaaaaggtatagatatgttttatatgtcttggttatagattagtggctcataagttattggttatgattaaaaatttgtaacattggtaacaaaaagttggcttaaaactggtaactctgggttagagtaatttagaactacaacatgcagcatgagacaatccatggaaacaggtctctaaagatatgcctaaattgggtaattttctatgtaattcttatcctagaaacccgatttataaaagataagatttagggtagtgtctttttgaaatattggcggctataccttcttgagtttgtgtgcaggaacaggcagccaaactttgtagcaagtaatgtttttgaagttcattaaaaaaaaaaaaagattgttttcactgttaaaattgggttttgcttctcaaaattgtggttgtactctcatgttacaagataaattgaaggcttctcccaaatcacagccaccagctaaatcggctcctccaaaatctataaagcctcctgagtggcctagtccactacctcccccttatccacagcctcaaccccagctgccaagggaaccctaaacccctcggggtgtcgagaggtggacagctgtggatacatggagccacagagcacagagtccgggtggagtctggacccgcccaaactttaaacccttcagtactggtcattttcctctgctgatctttataactggaaaactaaccaccccctttctcagg

SEQ ID NO: 25260 - DNA, 1111 bp, Mus musculus
agttggtgtgtatgcatatcattgttggttttcttaagctcaatataatagcaacattattgttttggattttttggtaattattgcttcatttttgtccttagtaaagaacttttaattttcccagtgaaactatgggactctttcataatctttttgaagcaatgttcttcgtgacagaagcaatagtgtatttagaagtaggttgtggcaatctaatatagaatagcatagttacaatttccatctttaattcagggaccctggaagtgggaagtagtgatagagtttagactaagcatctcagcataataatctcaaacaatctctaggataatgccttctccagtgttttagatgatatggctagttataattgcattgttgtaaaattagttttagaagcagtttgtaattatagttattttatgaaatataggaaatgggccaagcaatttaaaattttttagaaatttacacacaagtaaacttcataccacaggacacactcccttcaatcagtgagctcagcacttaacctagatggatggatattctaggttggataattggtgcaatatagatatgtgtgattgttcactgtgtgtctgtcttgaatttatcaagttggcttacaacaattgttttcagaacaaacattgggaaaaaatgtaaacatgaactatgtatgcagtgaggtcattattacttagtgaaaaatatttctcagagttatttttaataaattatatataaaatggtcgtgtgcaggtggtgaagataatatgaactaagctactttacgcaactggtgtgggttggttacttgggtctgatgtgggtaaaagtggttttaatggggagaaccagcttgctcttcccagctactgttcagggattgtggattatctggatccacagacagacatgcagcattattaccggtacactggggattattcctgtgttgtgggcattggcgattttgcattttctctacttttatcatcttaaggtagaatataactttagcattcttatcctatatgtttaaaagacacttgaattaaaaaaaaataatgtgtgtggttgtgtcttagttagggttact

SEQ ID NO: 25261 - DNA, 1211 bp, Mus musculus
aaacagtagtatagaaagagaaggtattgtcacaaaataaaagaccaagataaaaataagacgggcttatcctgaaaagtatcaaaactgagggtgacatcagacagtttctgctatatttaaaaactactttgataacttcttttttaataattggtaacacaaatgtcatggaatgaacatgttatccacagaaatgtcatctcgtgtatcatcgaatgcccactgactggagtgtgcagtggttgttcctagcatttgatagaccacacacattagataatcaaatcaccgtgaaagctgtgtccaaccccgaccatcttctagctaatcttttgaagtctgtggacacatttttggtgagcacagaaaatggatgccaggaggagctggggagaaaaagcgtccacctgaggccacattaagacctgtctctcctctcaacagccacccattttcatcctcttgtgtctcctgtccggcaggtaccagtgtgctgctgcagcagagcgagcggaaacgcgggagaagtgagattcccttcctcatttccgacagccagggcttcagctgccccgaaaggcaggtccttcagctcactgtatgcgagtgtctgaagggcggtggctgtgtggctgcacagtatgacaactacgtcgggttgggccctgccgccatcgctctcatgattctagcactcctgctcctgctccgtaagtcttcagagcctgtgttcctagtgccttgatcggtgtcaataggtcttcagaaaggacttgccacactcatgtgccgtgtagatagaaggttattttttcataaacagtttattccaatccaagtgtgctttgcactcttctccgcccccactcttggctgctcgccttacctctggccagcacttgcggcagtcaaccctttccaaagcaccgcaatgtgccctcacaatgacaagctgtgcccagccagttctgtctgccctcctttatttctaccaaagacctggcatcccctgcagttgcactgggcacttgggcagagtaccacctccaagaccgccttggccgtctccatggaaagaggagaagcctattaaagatatttatagatgtctagttaagtgcacagaacccaacagtttacaatggacctctagcccgtcagctctgtttggttgtgactgacgtgtcttacttatagtggagacgggt

SEQ ID NO: 25262 - DNA, 2570 bp, Mus musculus
atgtgtgtgtccatgcccctaatgttataacagccacacaagacttgcacattggaaaaacttattgacatgccaaacaaagacaccatgtctcaggtagggttgtatttcagcaatgctctgtgattattgggggatggagttaagatgctagttcctcagtgccttttagagtactgtgcaagcaatactcgcaaacaggacatgtaaaattgagttccaagaacttacaaaactaaagcagggtatctaattcatcaggtccaggaggctgggtctctgcacaatgcattgatattcagcagggacagttccaccccttatattacagagccacacaggttataggtaccaaatagctcatccacccagagacacatctccactctttcatctccactggaaccctgagtacaccagagggaagaaagaaagaaagaaagagagagagagagagagagagagagagagagagagagaacactggagccctttttaactgtctaaagttgacagactttagaacactgtcaggataagaatacatagtgtgtatttctctgcacataccatgtcctgtgagctgaaaaaaaaaatgacttcatatttttcctcacttaccaaaggtcctaaaaatattgagcatttcaaattagttttataatctaactaatcatgatagccaggtgtggtggtgcaggcctttagtccagaactcaagaagcaggcaaatctctccgggttcgaggccaatctggtgtatataaagggttccaggacacccagggctacatagaaaaaccctgtctcaaaaaagcaagcaaaacaaacaacaacaaatactagtaatccaggataaaattcctagttaacttttctgcaatgtgatggcagtctatgaaggaaacgtcttcatagatctgtttcctatctacaagttcatgcacttaggggctgcacaaatgaccgagtggctaagagcacattactgactgctcttgcagagaaccctacttcagtttctgacaactacatactatggctcacaaccacctctaattccaactcaagggatctgatgctctctaatggactccaaagacattgcactcacagttgagtggttagtgagcagccgagttccactcttgcatcctcagtgcctctcacagccgccatatccccctcttgccattgaccgacttccatcctcagtgcctctcacagaaccccagccattatctatggcacaagataagttccacaaaccactcttttacaattagtcaaatatcaagaagactcagtagttcagtaattctgaattatgaactttaccatcttgatatctgacataattggctggtcatgagttgatatgcatgaagtaaatactttatcataaaaacccttgagtaactggcccaatttcattcaacttccttgccttgattctttcaagaagttgtttggattctacagaacatcaatggaaaatattacataacaaaaatttgcttctaaaaaataatgtttcaaaacctatgtatatatcagtcataatttatatccatgtatctcacccaaaaaatgttaagagccatcaaatttctggatattttgctaggaaaatgaaattctacacttattttttgtagactttttttaaatgctgtttacatgaattgtattttggaaaaaatattatactgtgcaccctgtgatgcatgaagtgattttatgtatggtctgctatgtgggcagaggtcaccttattcctatgatctggaattgtttactttctacaaagtaagctttgtggggattttgctttcattttctttgtagctgatgttattttaccaggtgtgcagcaggaattacaccactgtgtggaattataaatacatcccatgtgcaaaaaaaaacaaaaaaaacaaaaaaaaaaaaacctacaactcagtcttgcgcgccccctgggtggctttgaggctccactgctcttttgtgcagagtaccatcttccttgtttccccaaagggtgatttgcattcgtttttacatttgttccttgggaggtttgcatttgtgtgtgtatccatgtaaaatattttaataaaaaggccaccttctttcagagtaacctctctccatgtcttcctactgatattttacaaggaatgttactgtgtggtaaaaaagagcctcctggaagcagacgtttcttgggctttgttatttagtatgatctgctttgctggcccagccagcctctttcttttttttttttttcttttttgaagtgacttgaagggcagaggcggggtttctcatgccggatccgcttgcttctttcattcattcatgtattcaattcagcagaacctttttttttaaggatttattatttattatatgtaagtacactgtagctgtcttcagacactccagaagagggagtcggatctccttacggatggttgtgagccaccatgtggttgctgggatttgaacccagaaccttcagaagagcagtttggtactcttaccagctgagccatctcaccagc

SEQ ID NO: 25263 - DNA, 2095 bp, Mus musculus
acagtcattaattgactgtgtggatattgtgacttctgctcaccctccacacacgggtgaggttttcaatgaccagacaacaacaaagcccaaatagtgttcttactttgaaaatgattgattataaaaattcttgaaaaatagcctatattcacatgtaagatcttatctcccatctttaaacaaatttagaacaacatcgtctgtcaagtaaaccctaagagtgagaattctggatgtgagaaagtttgctccccttgtctaatgttgagagcttagctttcagttgtcattgtctgtcatagttttggtaatgctgatgaccacaagtcaaaccctacagtgataactaaaattcttgcaccggagaagacagatgccctgttgtgacagcaatctctccgtgtttattcttagaattgcttctaaaatatttacctcccaacctttttagctactcaaaaaagagtgaaaaaaaaatctcaacttctggagatgaagatttttgtatgttctcagtttatgttctgtctcctgtggctaatgaagtgtttaatttgaccgaatgacagcagaatgtaatgttaatgttaaggcgggtgagacagggctctttggcccctccttacagtgctgtgggaagctgtgccatgtggaattttattggaggacacacacttcataatgtggcgggctgtccacagtggggtgccttttgcattgatacttagttcacagttttaggaaaattcagaactggtcatctgccttactttcttaggttaagtctagtattaatatggcttccggaattggatgtaagtaattttgctatatcttcgtgttgcatctggaatgtcagcttgtgagaaccaccttttctaattcagacctggaattcttttcagtaatgaatagtgacctgggtatgtttccatggatgacagttttgcctagttaccatgaccacgtgacaataaatctctttcttacatattagcacaagcaggcagtctgatagaatcaaatctatttggtggctttgcactgggtgtctgtctcccatccgctgactggctaactgtggtatttaaaggcaggttttgtttttttgttttgttttttcctaaacaacttaaatcaagaaagttgaaacttatctgaaattagaaagaacaccctctgggaacttatctgttagatgtcttagtctcaaatctagtgtggtcccagctgctgggaggtccttgtgacattggggaaatgatatggtgcctttgaactaaagaaatcgtggctgatggggagaaagttcctacattcattgatttcccacattctatctgattttcaataaagttgtcatttaattatttgccaaaactagggttttaatgaggtggcttccacagccccctttttatatttattttcagttgtaggcccttgagatggctcagggtgtaaaggtgcctgcaccaagcctgacaacctgcatttgatccctgggacccacactgtagaagtagagacctccccttacacagtattctcagacttccatatgtgtaagcacacacatgtacacacacacacagcaaattaaaaagtaaaagttaaatttctgtttgtgtcttatagaaaggtgttcactaagaaaatattcatgaaatttaagtacaaaattatctattaaaaattcctatcggttagtcgtggtggcacacacctttaatcccagcactcgggaggcagaggcaggcggatctctgagttcgaggccagcctggtctacagagttagttccaggacagccaaggctacacagagaaaccctgtctcaaaaaccaaaaaaaaaaaaaaaaaaaaaaaaaagaaaaaaaaagaaaactaaaattcctatcccagctctccagatgcagaggcaggttctctgagttcaaggccagcctggtctacagaatgaattccaagacagttggggctacacagagaaaccctgtttaaaaaacacaccaaaaactcctattccaattgatactgataacccttgtaaaaggaaatggaagcattatcaatacaatattgtcccttt

SEQ ID NO: 25264 - DNA, 1097 bp, Mus musculus
ggtggtctgtgtatctttgtgtctgtgtggcatgtgtgtatgtgtgtgtatatagaggaagagacagatgtacacaatcatgcctatgttcataactagttaacttcttatttttagaatgtttcccttcttaaaatataatctaacttgtgacagtataaaattctctctctttaaggtaacctgtttttgactagtctaatttaaaataatggcttagagagtttaaagcatgcctttattataagaatgcctcagaatatattttcctcttttgaacacatttcccactgttttcccttaggtataaattacttcggtattccaaggagcggcagtacatcgatggactgaacaatttattatacacacccaaaatactggttgataggctgtatacaaatatatctgtaaacctcatgccagaattagctccaattgaagactattaaaagaagtcattctcatggtggggtagaccacagtgctggatcatgaacttggcttggagtgccctcaccgtggaagttagagattggggtgtatctcagtgtcccggtctgtaaaaagagccagcaatccttaatgtttacagcgcgggctccatccgtcacactctcccactctccccctgctgggagcgtccccccatggcaagcactgtagagataagaacccattgcttgggactggaagtgaagaaaactccctacacagagaagatttttatactgaaatctataatttaattcaagagaatgcttttatttccgttcaaacatattttgtacatatgtgatgtaaattaaatgtgttcaaattgttggaaaacaagatgtcacaattttgcatgtaattggttatgccttcattggacttttatagacatttttttatttgcatggggaaaaatgtaaatttatgtcgccaaacaaaggttaagccttgtgtcaaatgaagggactgtcagcgacagacaaagataatatagtaaccgttctgtactattggtgttcagctttagaccttcagcctcatggcaggaggcacggtcctctgagggcttcgaaggaaggaaggactcgcataacttttct

SEQ ID NO: 25265 - DNA, 1220 bp, Mus musculus
agggtgttctttggtataatatttttattattttatctttaggtttggtcacacatagtctatgatctggcatattttaagaaaagcagaaatatgagttgacttgttcatataatgtacattgtatcagtattagtaacctctacctacttttcctctttgccaccaaacatgtcatacataaatgtaaacagtatgcagtcatgtgccccatagcaacatcaccggcaagtggcatcattcatataaaatggtggtacccaaagtgtgtcacccaacgatacggcaggcatagtttgtgtatgtaactctggaatgtctgtacgttaatcagtctctgacctctcagaatgtaccctccactgggaagtggtgcctggctgtgttccatatgcttctgacctgtttctttcactaacgggacataattaccccttgaccatgataccacaaattaagaagtgataggaaagcagcacatgaccaagtctgagttcatttctggttttctctgctctgtggagaccggcacacaaccattcaatcgtgcgatgctctttaatgtgggtttcaaagaggccatgaaagacagagcctgggactgtgtgatcttccatgatgtggatcatctgcctgaaaatgatcggaactactacggatgtggagagatgccgcggcactttgcagcgaagctggacaagtacatgtacatgtgagtagctgggcccctcttgatgctgtacagtgtgggcttgcagcagcatgctgggcctccatctcagcctgctcaacagactgaggagcatcgtcccctgctccaacatgtcctagggagccaggacaaggactggtttgtccatttgagattatatgggggttgactcggggaagagactggctcccatagcaagcacatagatttgaatctgggttttcacccttgggccttgcttagtcactcgctcctctcaaggttgctttccttttccttggcagtagagcccatctgtgggatggctttcttggatcctgatcctaccatgtgctagctgtgtgacccatgcaagctcttcctgactccccgccccttagggtccagggtccagactgcccttccgcagatcgcctgctctttaattatgtgaagcaaatgtcccctgccgtgtgtgtgtgtgtgtgtgtgtgtgtgtgtgtgtgtgtgtgtgtgtgtgtgctatcaa

SEQ ID NO: 25266 - DNA, 1201 bp, Mus musculus
attctctttgtgctttgtgaccaattctcttgagtttatgcctgatgttgagggtttctcttacatttgacttgccttcctctcttaagtttgtaggccccattctgttttacatacataaatctgacctttttaagatcagctactttgcatatcttgtctcttgaaaggagggtgggtatttgtttataaatttgtcagtagaacaggcaggcgttagaagatagattttcctcttggttcactctggcaagcataggcatttacatctacaaatatggctctgtagcgtgcgtgcatccgtgtgtgtgggagtgcatgagcactgtgtgcagcctctgccaggcctgcttcatcagatgaggtgggacgtgaggggagaccatgtctagacttgagcatacagactagaggaggaaggggaggggacacctggagaggagggaccaagtgattcccatgtgcagctgtagctgcaagattctctgaagactcagtaacaacacggccagttggtttaaccttatgagatgaggaagttaaaagaaagacttgactggagggcattagactggtttttttttttttttaacctattttggactttagcaggtgtcaggttagtaaaccgctagaagatgacatgtgattctatgttcctggctttcactgaggtcaggaggacagcatgtctttgagggacattagtgagggatgttagcgagctcttggttcaggattcgactagattaagagtgattcattctcgttgcagagctagagttgggagtgttctgttgcagagttggtgcttgttagaccaagaacatcttggaaatccttagcttttcagttttgtataatcaggggcctgatgcatggcaggcactcggaataaatatgccggcttgtatatacgaattctttcctaacaactgttggtggtagggggctaaaagataggttagcagtaatattatcactcttcctttgaacccaagtttggttcccagtaccttcttaaggtaaccacagcaggggaatctgtgaggcgtgtacactcacatgcaattttataaaagacagatgtatcaggggtcggttatgatggtgcatgcctgtaagcctgtacaggaagttgaagcaggagatttgagagttcaaggccagaactgcacctggagatttgggtctgaatccc

SEQ ID NO: 25267 - DNA, 1213 bp, Mus musculus
gtgacttggtccactacctgagttgtatctggtggctggagcctgtctttgatctctgtgatttggtggagggccttgactcctggggtgtcactgccctgtggacacaggggaagggattgcctaaatgtgggggacaagggacttgtaaatctagaccacaacccagaattggctttggagggtggggcttagggtatggacacccaaagttgaaaagtgtcctgtgagaaacccccaagatgggagacgccaacaggaggcccatctgtgttaggggccaaccatttcttctatgctacctaggtgtgtgaaacattgggaaacacatactggagactatttcgggagtagttaaagattcaatatccagcttcctatagagtgagaagtcatctacccctacataagacatgtaagcagagaattcaggttagagtcaccgatgttgtatttggaatgttaatttttttcttttagttgaacatttgaaccatttgtttaaaaaaatactcttaaaagaatatactttcaaggttttacatgtgtcttagggttcctattgctgtaaagagacaccatgaccaaggcaactcttataaaggatagcatttaattagggctagcttattggttctgaagttcagtccattatcaatggccagggtaagagaagggttagccaaacaagagagagagagagaacagagtcagggctagtttgagtcttagtttaactcctcttttttttttttttttttttttgttgttgttttggttttggtttttttgagacagggtttctctgtgtagccctggctgtcttggaacttactttgtagacctggctggtcttgaactcagaaatccacctgcctctgcctcccaagtgctaggattaaaggcatgtgccaccactgcccagctaactcctcctcttgattaaccaccctcatatccatcttgttaggccccctaattgtttttctgctattgtcactgtcactgttagtgataagatcccagtaacaaccagttaacacagacaggcctataaagagtccaagattgacctctagagtcaccaaaagaaagggggaatgttgtaaccctcgaattactgatactagagagatttcagtgttgtgcagtttgcctctgtgtctccgccagaggctctcatactccctccccacaaccccctggcaagcag

SEQ ID NO: 25268 - DNA, 1543 bp, Mus musculus
ctctgtcttgttattgttcttagaaaatagcaataacttctagcacatggttaattgttacagaaataatattattgttactaatttcataaataattcctagaaataaaaggatttgatgaaagaaagatgtaaaatttgagagaaaaaaacataaagggaaaggtttacaacttaccatttccttcctcctgtagtcctgaggcactggaaactcacggatcattcacgtggcttggacagacacagtataagctccagctgaaaagccaagagatgcacagtttgcagctgaaggcatgctttgttcatacaggcgtttataaccttggaactccaagagtattcgccaagttatcggaccacgttacagtatttgaaacaagtcagcagaactccatgcctgctctgattatcatcaataacgcgtgacaactcagagtcacagactcagtttgactttgtggaattggttttacagcagcatttgaaatacccaacttgttaaggaagttctctgatcactgcaaaatacagggacttggcacttagttgacacagtactctgggctgagaatgtgtagactgcatttttttttttccttttaaacctggttataatttatattcttataatacagaattcaacgtatccataaaccttattaagccgtgtcttaaaaaaaagtccaagtctgctgttgcaacttatcggacggttgactcctagaaggtgattttgaggaatgaaaagccttgctggcaatactcctgttaagccattagtctaaagatcctacctttactgtgaaattctatagagtgttaaatacaaattttcctggcttgccccaaacagttctgtaagaccagttttgaacgctggttatagacactcacatttcagtgtggtgtccctatggcttatacataactgtaaaaacaaaaagcttttctgatgctttgaacatagttttggaaggaggtcaactttattcctttgctcatctcttactgtcacactatttcacaataagatttttgtcattaaatcatattctttattataataactttaacaattaagttgatctgtttaaaatataaatctattcaagttaaaaataagcttttcaaaaatgtattatatttataacaaatttactgtaaatagaataaagacatactattcactgtataaatttattagatgccttttttaaaacctggctttgtgaggacttaatatattctttatttaaaataaatgtcaaacatgtacagtaggcactagcctagtttcctgtgaaagcttcattgccattattcaaaaatgaagcatggtctttgttcttgaagagcagatgaagtttttctttgcacacgtcctgtctgatgctgtgtgcaggtctgcatggtctgtctttaccctgctgggaagggcagcagcacttccaaagctgccatcacagctacacgggctctggtgctgggtatacagacttcctgtggcttcccacaggtacagctgagctgaacaggc

SEQ ID NO: 25269 - DNA, 1209 bp, Mus musculus
gcacagttggagctaggagcagtccagatggaacataagttatcgataggaaatggattttaacaacgtggagggtaggcagctgcccagctactatgctgcttaagacttacttaaaatatataggctgtgaatgtgtctttcatccatgaactcaatgatcaaggcaggggtagaagccccgggctgggattttttttttttttttttttctgaggcagggtttctctgtataaccctggctgtcctggaactcactttgtagaccaggctggcctcgaactcagaaatccacctgcctctgcctcctgagtgctgggattaaaggcgtgcgccaccacacccggctctgggaatttttagtaattttttgttactatagattagaaaattagaaatcctgcaagagtgcatcctctatagttatttggctatgtctggatcttctttgaaatgtgttttatgtgaggcagaagttcatgtgtatttaaatgtgaagtttgttttcttttcctttttgttttaaggtgaaaagcaagcggctactcatataagtcttgatcaagaatatgactctgagtcatcccagcagtggcgggaacttgaggaacatgttgtggctgtggctaataaaggagtaattccatccagtttctatcctacacagtattgtctgaacagttactccgataactccaggtttccacttgcagttgtagaaggtgatgtaattgaacttaaaaattatgtatatgaatgttgtgcttgcatgtatgtgcaccatatgcaagccttgttccctggaaggcagaaaaggatggtggatatcctgaaattggatttagagatgggtgggagctgccctgtgggctctctataagaccagccagtgactttaccattgagccatccctccagcccaatacttgaatacttgtggctttttgttttacttaaagcaaattcaagataacttatgaaatgccatattactggaggccctgggcatgaacacaacttactatgtactgagctgcatttagaagcaaatagtggggatctaatatctgtctatgtaacactgtaacatggtgctgaagtaccaagagaatgacattaggacatctaagtgactcccaaaactgagttctgtatgtgacaaaagacagtctaggcaaaccataaaaacccacagaaggtatgttgaga

SEQ ID NO: 25270 - DNA, 1200 bp, Mus musculus
tgagttccaaaagttgccggaaagcagctgtatgtttgaagtcgctctttggaataggcagtctcctatatggcacgtggaaggctcctagatggtctgtgctgtaaagaaactaactttgctttctgtagttcccccaaactaatttggccttcagactgtcttgaaggtagtttaattatcatgagtttttgtttacatgtttatactctctacattttctgttttgccttttttggggggtattcctggattacttgaaatgtctgttgtttgggctggattgatgctcagggttaagactaccaccaaccacccttgcagatgactcagagtcatgtcccaggacctacatggaagcttgtaactgccaataattcagctccaagggatctgataccttcttctagcctccttgggttcttgcatgcaggtagggcatatcaaatctatgcaggctcgcgcatgtgcgcacgcgcacacacacattaaaaaaaaaaaaaactaaatgaaatctaatgtttggcctcactggacattgcagtgggtaaagtttcttgctgttaaggatgatgacctgagctgagtctccacaacccatgaggtagagggaaaaacccagctcctgagtgttgtcctctgatgcgcacacatgcagtgtggtgtatgtccttgccctccccacataaatagaaatgtaaaagtaatgaagacaagtgacacatctaaggtctgctaagttctgtctgaactttgtgtaaggttattacaaagttgtttttttttcccatttctttagggctgaatcaatttatgaagaaatgaaacagaaatatggaactcagggttgctatttacttaaaatcaattctcgagcaccaaatcgagcatcagatgaacagataccagatccgtggagtcagtatctccagaaaaatagtattcaaaaccaggtacatctaaaaaccgaaccaaaccacaaaaattgtatttaaattttcaaaaagatatgactgtagatttttctcttttgaggggtgggtggagacaaggtctttatacctggctgtccttgaactcattatgtagatcaagctgaccttaaactcacaaagatcatctgtctcagcctgttgaatgctaggatcaaaggtgtgtgcccctaggccatgaaattgctaggtaacccagcctgtctat

SEQ ID NO: 25271 - DNA, 1199 bp, Mus musculus
atatgcgcgaccctgttttaacagcacttgaggaaggcttgacaaactcgggcaaccgaaccgggaggccctggtacccacagggagccagggaggagaatgtgcggcccacacagtatttaaatcaagagtgctctgggcgctactttgtggatattctcaggacttgttttcttcagctttgtacttcagggcatatatatatatatatatatatatatatatatatatatatatttttttttttttttaacgccttttccagttagtgatggtgtttcctagctgtctctacatagctctttgacataccatccaaaggccagggtaacagggtgagagccaaagttctgttgtgtaatgttatgaaatatatcaattaggtcagaacaacagcctaaagataattacacttttaaaaaactgttttcttttgggtggtttggggtgagtttgggtctcatgtaaagtaagtagtctagcctcaaattcactacatagctttacagtccaatcaacgatgaacaacagcaagttttgaaaatcccttccactgctctgaaggagcaacttggctaggtagtcctctgattccacattgtttgcaggggctggattttgaacactttaatttatttgtttctactaaaggagaatataaacttgcaaaatgttacatttctttctgtttaatctttttcctttgttaaagtgaataggaaactggccactggaaaaaagagtcataaaatatcctaacagggactggacaaattgccttccctcccttaaccgttctttgttttgacaaatctatgtccattgttcaggctgtgggcagaatttccatgttcttgcatttagccaacttgggcgccttccactttataaatgttaaccagagtccttttgcactggagactgttgttaacagcaattgtacattctaaatgaatgactctttcctgccaagcttaagttggaaaatgagaaaattgccagtgaagccctgtttttatcatcccatagcaaggttagattgcaaactgggctgtttttgttgattttagtttataaacaaataaatgacaacagttctggatgaatgtatagggaaacctttacacacagtgtgacatagtgtgcaaagacgtgactgcaagctgggtttgggattcagccttcttcttttttttttt

SEQ ID NO: 25272 - DNA, 4333 bp, Mus musculus
gatggagaaacatgtactacagtattacctgcttgtctttgttatgttgcattcaaaaaccgtgttcattctggcttagatctgcccttacattcttgagtctattagacatttaaccacgagacacagcctctcagccattaacagatggaagagacacgacacaggctggctatgtgatggagcagcttcctgtgtccattagtgatgtgtgtataacgctacatattcccaactgtcatcatggttaggcgagaaagccaatctctgttccatgctaaaagacggagaaaggaacaaaatatggacattaaaggaaatctgaaatgtattcaaattctcatgctctaatctccaataaggaacgtgaataatcttatgaaaaggaggaaagggaagaatttgaagtcaccaaaatccaatttagccaaattatagtacataatataatactgcaacaacttctgcgtttgaagtgtattcttagccaggcatggaggagcatgcctgtaattcaggaggtgagtatagaaggggcaggagtacgaggccagccgtggctaatgaggtggctaataagaccataaaaaaaaaaaattaagctgggtgtggtggcgcacgcctttaataccagcactcgggaggcagaggcaggtggatttctgagtttgaggccagcctggtctacaaagtgagttccaggacagccagggctatacagagaaaccctgtctcaaaaaaccaaaaaaaaaaaaaaaattttttttttgatagaagatgtttcaaatattcttagcttattgcttggaagtattttataatgtaggtgatttctaggacccctctgtggatatttatggtagttttcacattgggaaatcccgagctttgttttttcattttaacatcttaaaaaagtataaaatgaagtacatgtactaaaagccagatacaaaatgcatagcttaacatgttataagaaacattgttaatggatggttatgcctgtatgcctaggaggctgagcaggattctagttcaaagccagcctggactacatagttagttgcaggcctgcctgggctatagggtaagaccctgtttcaaagctgaacaaaagcattatgaactcatgtattcagtcatgtatgaacagacttccatccattacaagtgtcactttattgaggttcaacttcaattctctttccattccttgaaggttggctgagttcttaacactctgttactctccttgctgtctcttacagcaagcttccatgttgaatttatttcctgctatgaaccagagatcagcaactctctaagagttatgcctgcaaagaggatctgttgttcaaggtctccctcagctacaatgcaaggtcaaagacaacctaggctacacaggactctgtctcaacctgcccccattttcattccagaaaaaaacttctaaggtcagtgtctgctattgaggctgccattgtttgaaggagagagccaggaaacagctctatgcttgttgtaaagataaaaatggccaggcagggtagccatggtagtccaggatgactggtgactagagaccctcttgcttcagcctcctgtgtgtaagggcacaggtatgtgttgccatgcctgcaattccctattttcaaaaacagttggatggtgccaacgtttttatgctctaccctctcccttttatcctccagttcttcaagtaatgtgcatttattattgctgtcacttttcacatgtgattctttaatgttacattcaggtcacttactaggatttccatcttggaattaagaaaaagtaacaaagactagagacatcaactcctgagggtaaagtgttatttgacttaaaaataccttttggaaagggctggcaatatggctcagtaggtaaaggcacttcctgccaagcctgagagtcagagtttgatccctgtgaccacattcgtgaaggagaactaactcccacaagtgcaagcataatgtgtactccctcctcacacacacacataagcacaatacagcttatattgtaattgtttataagcatcatctgttgcacatcaacattgtcataatcatggtgccatgatttcttccctctttttgagacaggttctcatatgtatgcctggctggtctagaactcagtgtgtaaagcagactggcctggaacttcaagtgatctccctgcttctacctcctcgccctgggacttagatgtgggcactggcttctaaagttttcctagtgaattatccgtaactgctttgatattgctactgttttctcctcaggacaaggttactatatataacaccggggagggacagggcttccgggcagcccttgcattccctggattaacttaggtgtttggtcagacccaggaactgtggtcgctaaggccagtgctggaccacatccttgctttcccttctgacttcaaagtcgctcttcatggctgctaacaagtgacagacttttgcaacctctctgcctccagtctgggtggatgatacaatatatgaaataagttgtattaagaagtgatcatcagcccataaaatacagtatagttctgattattggtaactactgccctgtcagtcaatctaggttaacttagggcaatatgaaagtcatgagtaagtttagaaacctactgggggctggagcaatggctcaacacctaagagtactggctgctcttacagaggacccaggttcacacctgccagtagctccagttccagggaatctgacaccccccacacaagacacacgcaggcaaaacaccagtacacagaaaataaacactgacaagaccaaaaaaccaaaaccaaaaaaacaacaaaaaacaaacaaacatattctggataaatggaatggctcagtagataaaaataccctttgagtaaggctggcacctaagtctgtctgaacccccctcccccccccccgaactgaaccataaagtttgtcctttcagatctgcacatgcactgtggcatgctcttgtctgaattcacacaaaaagaattgggggggtggggtggagagacatgataagtcagcagttagggtccttgctactcactaggattgaggtctcagtcccatgtaggacagcttgctgcagcagccctcatctggctcccactggtacttggaacacaggcacatgctcacaaatatttaaaaatcataaaaataattaagaaacccaacaactgcgtaaatggggcaaggtgactaaagcctctaataccagcaattgggaggtagagacacaatgatcaggagcagcttaaggccagcctcagctacatagcaagtttggggctggcctggggttggttacatgtgattctgtgttctgagtagtaggttcaagtgaatgaacagactgggaatccgacccacagcttttttctttgtctgttttaattttgccacctagaggataagttaggtgctggccacctgagttattttgtattctgaattgctttgttttgaaaatgagacgaagatataatttcactgtgcgtttatcttctttttttaaaaaaaaaaaaagaatttaattcattgctttaaaaagtaaaaaccagtactcaaagttgttgatcatcagtaagaaactttcatgtgctttttgtaaatactgcctaatgaaacaactggaccaggggggaagatgatgctgttattttaaaacttaagttctcctatactgttggtagaaaacgggttgattgtggatcagtggtaaagagttggagctcctaagaacccctgactctggtaatgtcagttcctgctgtcactggggactaggcgtgctccatttcgaagtgagcctactctagtttttgaatgtttctcatgataatttgtatgcttacacattgaaggtatttttttgaagtactaacattcattctttggttcaaatgtaaaaagaacttgtgatcagaatttaaagtgtataattcttcttcttttgaaaactgtattatgagaaataaagagtggcaggaccattgctttcattaaaatgttcactgtgtctatttggggttttgttttggtggtactgggtctcgaacctaagacctcacacatgctgatcaagaattctagggccaagctgcatccctagtctgcttcctttttaacagatctaaattagttgcctaggctgcccttgaactcaagtagctgggactgcttacaggcatgagtcaccacacacagtttttgttgtcttgagacaggacagggtttcaccacatagcttt

SEQ ID NO: 25273 - DNA, 1120 bp, Mus musculus
tggcaggggagcagcatggtgaggtttcttttagaaagtttatattagtgtcaaatttcaggttgtcagttgagactagtaatgttgacatgtcaaggaagaaaatgattagaatcttaaactaatagtgatgatgcagagaagagatcactgacattttaagggttttgtataagatatgatgacaaatatccagtagttaagtgtatatactgcatatagatctggaataaatggtggtaaagtagttttgtgtgtgtattcatcaaggtaagtatgtaactgaaagcaagaagaggtcttagacccaagcgctggcaaatacttacataactagaagtagagagagctgtactctgagaaggagtagacagggtaggaagaaaaacaggcaagaaaaaaacaagcaaagcaacaaaaaatacaaaccacagcagtgaccttaagagaagtcagatataatgcttttaaaaataagtaaaaacaaagtgagggatgaggtaagtgctaaagtgcttacgtagcatgcacaggggtctgggttcaatcccgagcactgaaaaacaaagtaggccttgggtggtacaggcctgcatctggaaagacaaaaaggatagttggaattttaaggctaggctattgcaactgagatctgcctcaaaccaccaaaatgaactggggatatatagcccagcattaacatggttatctagcttatgtgagttctgttaaatcctctcctccaagattattgaagttgggtcaggcatagtggcatgtctataaaaacagcacttggaaggttaggtaagagaactgccatgatttgaaatgagcataggccacatagcaatactgtttcttaaaaggtcacaaagtatgtgtatatttgaagcaagtatccaaaaaacattttaggagaaaatagagtgggtattgataaggttatttctctcactttactttgtaatcttaaaatttttagtttttttttatttttgttgttttgattatattttgaaaaaaagcaacagggaaaaaaggggtttatttgatttacaattacagtctcttattttggagacatcaaggcaggaactcaaagcattgcatccacagt

SEQ ID NO: 25274 - DNA, 1146 bp, Mus musculus
ctggctctctgaacgcacagagatccttctgcctcatccttctttctgagtgctgggattaaaggcgtgtactgccctaccaagcctgtctttgtttcatagttttcaaacacaaatgtagctgggtgtggtgacacatacctgtggttcccagtactcaggaagttaaagtaggattgttttgcttgagcctaaacttgagtctcagagtaagatcctttctttaaaaaaaaattgtaaaatggacatgtgtagtttcattttgttactgtctaatccagtcttattgccagagaaaacatacataacttttaaaactgaggtgtacatcttgactaggtatccataatcacttgtttgtggttcactgttttttgttttttgttttttgtttttttttttcttcctgtaattaacctgtcacaaatgtttggcttagtttctgtagaaaatgtttcctgactgcaatgagagaaagtggaatacattgtcccctatgtcgtggaagtgtgactagaagagaaagagcatgtccggaacgggccttagatcttgaaaatatcatgaggaggttttctggtagctgcagatgctgttcaaaaaaggtagggttatattatgtaattgttttaattttcctggtgaacatggctttgagaagaaagacatttcccgggtgttatgttaaacacctataatctctgctcagaagggttgcaagttcacagcttgcttgggctacaaattgagagcctcaaaaacaaaataaacaagatatgttatttcagttgagaattatatagaaaagaccagaaagtttcatatatcaaaaaccttgttgaatttagagttttatctttaagataaaaattttatttttttcaataagctgacagccttttaagatctatatacaaaactttttttttttaaaaaagttctacctaagtttcaaatgttaataatttagtcaaatagatttatgtactgaaatccctggctgcccacttaagtatttaagaaatcatgaaatacttctcagaagactggtttaaattttttaagcacatgggataatcaggtgttgataacattgtctaatttggaatttattctacttgaagaaagctaaatgggtgaggagtg

SEQ ID NO: 25275 - DNA, 2061 bp, Mus musculus
ttactaggctcaaggtatcctcctgcctcaggttcctgagtggctgagagtatgacacataccatggtgttcaatcttgcattttaaggcatactgtccataaactccttgtatgcaaatgtatatgaagatttgtaatgcattagataaaactgaatagttgataactttcttgttgacacattacttttttttttttttaagaatcttcagctagatgaggaaacccaatatcaaactgctgtggaagagtcttttcaagtaaacatgtgacatgtatagacatctctgcctccttgcaacctacaagtgccatctttaaggagaagacatgaagtcaccattttcagtaatttgctgtgcatattaataaaaataataattcagtctactgtattaggtttttaattgaaaataaaggtgggccaccctaataccattctctagacagttactttaacagcatggaaagggttgtatttcacttgtgtggtgaaaagagaatctctgttgtctttttcttccttgtattacatattctcaatgtttcattaagttgtttttggtatttgatatagttccttctgtttagtacagagataacagcaaattctgaacgatgtgattcttaaaaagctaataaacctgagccatttgtcagagctgtagaatggaaacttgaagtgtgaagtgggataatccaaagggatttttttttaaagtatagattctagctgaggaattcaacaataagaaagttgtatttatgtaatgtttagtatttttgaagactagtgagatttctttaataatttttactttgaaagcatattgtacaaatgtttcttcttttgctattagaagaacatcaagagaagtttcctttggtggttagtttgttatttcaatctaggttgaataatttgtaagcctaaatgttatataccacagttctttgtagtcagtatttctcactgggtgatgaaacttttcagccagtgaatgatacattcaattagttttttaaaaatccaaagttgcagatgtatgtggatatgtacatagacttttgcatgtatatatacacatatatatctttgcctagagtttgtcaggttatgtatagaatttctattaaaaagttttaataatggacaagcaatataggattgaagtatttatctcctttgtttaaaattttgtatgttaccaagtttttaaaacagtaagccaaatactatgtggtacagttggctgttattacacctgaaaaatgttaaatggtgctcacttgttacgtttgaaaatgatgcataactgacgtgtggtgagagattttaccagctactgtttcactacattttagtcaaaacaaagtttgttcttaatctttggtataaagtgttgtagagaaggccaagtcacaaagtaaagggtgaagggggaattctgacattccacactaacataacactgttatgctttctttaaaataactaaccgcaaaagaaaatctctgaagtagtttgctgctaatatatacatatattgtaaaaaaaaaaggtatattttgattttcttaatacccttgttgacttttctacaatgaacatttttaaacttgatttaataaaaatgttaattttggatgtgcagttttgtaaaaaacctttttcagttaaacggtaatgactttatttatgttcagtaatatagactcacaagaagccatacatcttaatgcctttttttctgttgtttcttgagcgtgatgtttactgtgttctctagcactttgagttgacatacaagagtaattctaggaacatctatatgatgaaccctttaaaaggagacttctgtccacagtcctctagtttaaagcaataacttggatacttttaaagttttatttagccagtgtgctcctaaatcatcctgggatgtacaaacttaaagggaaacttgtactagagagggttcctgttttgaagtcttgtggatgagttatattaatagattaatagctttttcatgagaattatctttttttttgcatta

SEQ ID NO: 25276 - DNA, 2440 bp, Mus musculus
taacctatcctgagaaaattaacttcccttgagaataaagacagcttgcaatggagacacttcaggtccccactggaaaccctttctttatccatccttcagcacccagcccttggccatgattttcaagctcggaagcaagccctaagtttggtttgtgtttgctgtgaaggttgccccatgtaaacaactgactcctttggtctttgcaagaaccttacacaaaacaagagtttcagtcttcttttagtttatttgctttggtcctggcatacttatgccatatctgttttgattgggatcctggaacctcccttaaatcaaggattggccttggggtcatacattcattgtatattcagtaagcaccctctgtgtgccagacccgaggctgagaaaagtcctaacccctgtcctcttagaacttagatgtttcaaaatcacagttgctggcggtgtatatgtgtgcgagagactatgaacatttcctggaagctggatgcttagagtcccatatttaaggagcccacagatggaagcaatggcaggtgcctctaagacaaacaataaatgccccagacgttggtgaacaccccctgacacttggaatatattaaagaagaaatgcatctgtctccccctgctcctattttctttcactgacctggaatttttaatgataatcagtactggcatttctaaaagccacaaataagtataattgccacttctgagctgagcacctgtctgaggaggatcctgactagacaaggaattcataagccagagagaatcagacaggctacacagcagaaagcagaaacaccccttgccttccacaccctacagtggaacctcttccaaaagcagccaaatcaagacaatacctccattagcggcagattccctacgtccagtgagggacaatggtacttgtggagaagtgctatctttgggggaatccttaaactcatggctaaatcatcttcctgcccctcccctgtcggaagagaccgtgtcagcaagaagccgggccaagcagctaaaatgtaaaatacgaagtcaattcagagagaaaactcaagtgttcacccaccgcttccttcacagaatcttccagacgcctgcaagttctgtctaagttgaactgctcaagtttatggactgtgaaatgtccacatctactctctctcagcccacatagaccattcaaatttatgaagttgtatcaaactgcccattcagctaaattgcagtgtttattcctgtcctgcagaaatgccacaaccttatgggaactgtgacagcccattccagctgatcagattcatacataaacaacctccgttcacactgcagagccacctgcacagcatccgtccacatgctcccttgtgaagttcaggggcttgaaatggatggatggagaacccatcgttttcctagtgctttgtgtaataaatctagtctcgtgcctatcttccgtaagtatataccctgaatgacaagctgggaaacacaaagatttccaaggagcccaggaaatttgagttgcagtctaccaggaaaagttccatctattggtggacacacgaggctttgagaaacatgcccattgtgtgaattcccaatgctcttctcgaaacctgaaagctgctaaggcaaaagaatcaaagtcccagaggacaaatcgtggaaccagaactttccttatcctgtaggtttgtaatgtaggactctgtggctgtaccacgtcgggtcacatttctaggttttcaggaagtcttgttttatattttgactcattgtgatagccagaaacacgtgagtgtgagtgtgcttcaagcagctaggtgcaagtgtcgtctgcggttgtctccctctgcccacctccgaggctgcgcatctctgtactagagcttagcagagggtgagctcctttggtttacaatctcctgtaggatagggcttccataattccctagccataaacctgtcccctgttttcatatgttccatttgaaatagtgtttcagctaaaactagaaaggaaggatggaaggaagggagggagggagggaggaaggaaggaaggaaggaaggaaggaaggaaggaaggaaggaaggaccccaagaacttggggcattttccttcacttaaatggaaattgtattttctaagaatttggaagtctctgtacagtttctgggctgggagaacagtgggttgctagccacacatcagcagttcattgtgttgcattatttaatgggcccaatgtgtacctcaagataaatgcagtatattatgtctaaaaaagaaaaatccgttgtctgttgatttaaatggttctgaaatgtctataaataaagaaaatctcaaggttgctcttgaagtctttcctgagtgagtcagacctactactgacttttcaaaggc

SEQ ID NO: 25277 - DNA, 1182 bp, Mus musculus
aggcatggtatttattacaaaacagccaaagctgaaacacataaacacttgtgagcagttcgcttcctggggagtcaacggtggacagtccattgtattctgcagctcgctttgcttcctgccagctgttttcctcctgtgcctggtgatgtgagtggtgtgaaatgacactttaatgttccatgcttggtggagatctttttatcaaaaggcattttccaaaaaatcatgttttgatagaggatatctggtgtccttaggaatgacacaaatcatgaccattacatttgatctgtaactgctgctagtttcatggagcagaggaaaagaaaaaaaaaaaaaaggcatgtgtgtgtatgcacatagatgtgttttaatgtagttttttaatctgatatttttagataatatctttttactttataatatccactgaggttcccaggctttgaactgaatggattcgctcaaaaacagttggcgtaacgatcccaaagagtctcagaacctgaactttaaagctcagcctcctaggctccagccctgaaaactcagaagcagtcgggaaagattctgttgaagaatttaatgtgctctgtaagcccgtgggaggactgactcttgcatatctgtgctgacatttggggaaatgacagctgctttggaaccttcatcctgtcctcctgtgtgcccccgtgaaaggtctgaaaagcctttctccaaaatgtgaggtctgctcagcacgcctcttgtgttaggaaaccttgtgactcagacagaccacctctctattctagatgccatatctctgcactgattcctaagataccaataagagtacttgctaattccatcgtcgacctctttctcctcttgtaaaacacagtaactatcattcatattctgagaattccagaacatgtccaaggattttcctaaatgtggctaaataccccaactataccatcactttttttctcttgactgtttgaaggcatataacctcaaagagttccattttttttctgagcaacatatcctccacatagtccatgagtctatccccagattctcaccggacagacagacatcctggtagtgagatgcacacctgagctgctcaggtgagattgtttgaccaccaggagtcagtgtatcccgaacagatgaccccattttgtc

SEQ ID NO: 25278 - DNA, 1178 bp, Mus musculus
ggtaccgcagtccccggagccgcctagaagggaggcagagcgcctagctagtgaattgcgggaggcggagcctgaagggggcggagctatgagaggcggtgcatgagggagattgaagtgggggaggcggggctaggtggagaaaggaggagctagaagaaggtatggtcatgtgggggtgggacatgtggaaatcccatcctactgaaagggaggcggagctagtgaaggtggagtcagagttcctgggaagcgaagcctgcgtaccagcggagtggagctagcgtcgtgggggcggagacagagtcaaagaggcaaggcctctctggggaggcggagcctatactccggggaggcggagtctccgacagggaggcgggtgcggaggcggtgccggggcgggctgcgcaggcgtcgcttgcaccttgttgattagtcagtgccgggagcgctgctatggcgttcctcggacccgcggctccacctcacactgggctcgaggcggaggctaggagagggccgaggaggaggaggcgggcggctggccgccgcaattgcagagccggggccaagggaggcggaggcggagcgggagccgccgcaaccagcccggccgcctgcagtgctcccctggcttgagggcgcggggcgccagccatgcctcggtgtggccactgaagccgggcgccggcgtccccgccgctgtgcctcgctgtccggctgcccgcggcgggagtacggagccgccagccagccagcggtggcgcgagcgcgggagcgcggggcaggaggaggcggggaagatggacccggctccctcgttgggttgcagcctcaaggatgtgaagtggagcccagtggccatgccgctcgacctgctggtcagcacctaccggctgccccagatcgcgcggctggacagcggtgagtgcctgcgggacgcacgggtgccaggaagggtgggaccggtggcgggggcgggcgagaacttgggggggggcggtcagagctcacccctagccgtctagttggcccaagaggctgccgcagctctggcgcgttgctctccactccccccagcagcagccctcgccgctggagaggtgcacatcacaacccttgcagtgcagtaaataaagacaccttacatcgtggaaacctatagatagtaatcttgg

SEQ ID NO: 25279 - DNA, 1211 bp, Mus musculus
gaggaatttttcctcaaattccttgctgcaggaacccacttaggtggcaccaactctgactttcagatggagcagtacaaaaggaaaagtgacatcataaatctgaagaggacctgggggaagctgttgctcacagctcaagctattgttgccatcgagaacccttctgacacacatcatcacctccaggaacactgggcagtgagctgagttgaagtttgctgctgccacaggagccactccaattgctggctgcttcgcacctgggaccttcactaaccagatccaggcagctttcagggagccacggcttctagtggtgactgatcccagggctgaccaccagccactcacagaggcctctcatgtcaacctacccaccattgctctgtgtaacacagattctcctctgcgctatatggacattgccatcctatgaaacaagggagctcactcagtgggtctgatgtggtggatgctggccccggaagtactctgcatgcgaagtacgggagactgtgagcaggcatgggaggttgtgcctgatctttacttctacagagacccagaggagattgagaaggaggagcaggctgttgctgagaaggctgtgaccaagaaggaattccaggatgaatggaccgcaccagctcccaagttcattgctgctcagactgaggtggtagcctggtctgaggtcgtgcaggtgccctctgtagccacccagaagtccccgagagaagactggagtgcccagctggccactgaggactggtcagcagctcccacagcgcaggcatccgagtgggttggaggcaccgatgagtggtcctgagctgctctgcaaacacctgagcaaaggtataaaaaaaaaaaaaaaggtggaaggaaaataaagttcctaaaagctgggggcaggggggaaaggctttagataaacaagaatgggtgccatccaacttcagcttggtgaagcattggtttatcaagatttcttgctagagcaaaagtgactgaatgatagctacagcattgggcatgtgctagagaggacacagttaactgaaccaccagagtccccctcacagcatggatgactcttgaaatccataccactgagtccttgagtaacgcctgatcaagtacactagctacactaacttccctaccaattgattgattaccttgtatatagccttgggatttgtgga

SEQ ID NO: 25280 - DNA, 1338 bp, Mus musculus
atggccctgggatgtgaaggtatccctgtatcccgggatgacaccaggaagctgggaagcatttgtgcgttgttgagttatgcctgaggctggcgtactccagaacctggtgtttaggtgattcttgctgattaggcctgacaccccacagggcctgaaagtaaaccggtttagctaaaactcctcccctatcccacaggagggccaaacggaagagccagaagcagaggagcaagcccatgaccagcagccccagcagcaggaggagtactgaaccgtctcatcagctcttgacacttccatcgtgcgtggggactttgcttccagagaattggaacgtgtgtggcctggagcgcagtagaaaccagccgttcccaacctattcccattgacagtgatcttgcatccgccagccattgctcttggctcccacttcctctgccaagatgcgttagcagatggccattctggtcagctccctgccaggtcatagggtcacataccgtcaacttcacctcctggctgcttaagactagttctactcccccctcataactatgtcccaccccaacaccatcaccaccaccaccaccaccaccacccctttttatcctggtgtgaaacaatggtaatttgatatatggtatttatattggcatttttcaatccagtgtcagtagctgtcacgcgcatttgtggtgctttgatgtttgcgagtctaacctcctctcataaatttggtcagataattaattggaacaaagggaaacagatatttgatatgaaagccatatgacagtagcttgtgtcatggggaaacagtttctccctctactcacaacactaaagggaaaaaggtggattcagaactatgacttcagggcccagcagtgttgatagagcagcatattagacaaacacacagttgttagttttcagacattcgctcacggacaataccatctcagctttgcccttgctccgtgtgtccactcctgcccccctcccccaggttttcctgttattttctttctcagggtcctttctttggtgggggtccactccccgaaagatgttgtcattggcaatctgcagttgcaaagggggtagggtggtctcagaaggcacgaggcttcctgcctcttccctcttcctccttgtaagagcttcaacccaagtcctccaattcacattaaggaatccatactaaagggggacttgagggtgtgtaccctacaggccagccttccacatcgtgtcagtgttggctgcccaggttggaagcgaagacttgattgatagcatggtttcaagagagaagtggggccacacacaaaa

SEQ ID NO: 25281 - DNA, 1175 bp, Mus musculus
caggagtgtccattccttatcatgccatgtattgctatgacctctgcatctgttctgccattagccaagctgctgattctacattttaggtcttaatatcacatccaagaaatttctagttaactcatagatcagataaaatctctgatatttcttccaacagactcctgaatttaactggcatagttattgccacagacttaaccataataattaaatatgtatattctattagcccttagtttggagaagacaatgaccaagcctattcacccagtggctaagcccagcagattctaaataaggaagtacactgtaacaggaatctcagggttaaaggcactagcaagatattaatactcctcagatattaattaaactgatccaggacatgacatttcatagcctcaattcaacatttcagggttcagtaactcttaaaacatgcctactcctgtcaggcataaacacttttatagacagaccttataaagagatcttacggatctgtgccccaatcatggacttacatgaaggtgctcaatggcagttctatctgaagtggagagtgggatgaagagcggattggtgagagtcctcatccagaaatgggtcagttccccccccccccaacccccttagaaaataccattctttgtagacaagttttggataaaattcttctttcaatatgcaaacattttgtgtggatctctttttacagaactgggctggaaagacaaaaatcctgctatcaggaaacttctctatcttttgtggagtctcaccttcaaagtgaattccttgcatttcacaattgtacaaccactgacccttagagctgaactctggtatgtgttctctgatgctgcacaaggcctgacctatgcctaaatattttcctgcattcattacattcataaggtttctccccagagtgagttctctggtgcacagtgagtgctgagcttctattaaaggattttccacattcattacatttataaggtttctcaccagtgtggattctttgatgttccctaagaacataacttgtccaaaaagccttaccacattcagtacattcatagcttttgtctccactgtgaatcttcttatgctgaataagggcagagctctggatgaaggctttcccacattcatcacaactataa

SEQ ID NO: 25282 - DNA, 1165 bp, Mus musculus
cgcttttattattgtagtgaatcaatctcattattcccaggcctttgtatctgataagtgccttctacaaatgtgtgatccatatttgttgaatcttcccagttttcctcagcacttatcaatgttgggaagcctcccatttcgtttgagtccaccgccttgcagtctgtcaaccatgtggggccactgtcaccgagtctcccctcttactgtaacgtctgcagggaaatactcatttgttctacctggagctttcttacaacatggagcgcattttccatttagattttgtttattattccagatggtgagactaagatcaagattggagagccagctacagaggaggaaatgacaggaaagattggaacagtgactgaagagtccggcagccttgaggaggatgttccccatgactccagaggcaaagaattccgtgaatttggagaagaattgaacgatcagatgcttttcagaagaagacagtataactgtgatgaatgtgaccaaagctttgcttggagtacaggtctcattaggcaccaaagaactcattggaaaccttacgaatgtgaggaatgtggaaaggcctttcggatgagctcagccctggttctgcatcagagaattcatactggagagaagccctatccttgtagttggtgtattaaaagttttagtcggagctcagaccttattaaacatcaaagagtccacactggtgaaaaaccttacaagtgtgatgagtgtggcaaggccttcagtcagagctcagatcttatgatacatcagagaatccacacaggagaaaaaccctaccaatgtagtcattgtagtaaaagctttagccagcactcaggcatggttaaacatctgagaatccacactggagagaagccttatatgtgtaaccattgttacaaacatttcagtcagagctctgatcttataaaacatcaaaggatccacactggggagaaaccatacaagtgtgatgtgtgtgggaaggcctttagtcagagctctgatcgtattctccatcagagaatccacactggggagaagccatatccgtgtgctcagtgtaacaaaagttttagtcaaaattcagaccttattaaacacagaaggatccacactggagagaaaccgtataaatgtagtg

SEQ ID NO: 25283 - DNA, 2354 bp, Mus musculus
aaattaggaggaaacaatcagcactcaggtctttttcttcagaaatgaagacaaaattaaaaacatgaagagatatggaaacttatttttccctgttgactgggaaaatctactgggaaatagaaaaaaaaaacttcattcaccattattatcttgaaagaaatggtgttatacctgcctagaaactgaaattttaaataattcaggtgttaatacctaaatttttcttgtgaagtttatattctcttttttttctccccaagtaatgagctacctggttctttgtctctttcctttttcagacagctactttatttctgtgttggtcattggagtgttctgtaagggtgcatacgtttttattttaaaaggcaacataggaattgtaaaatctaaaagcccatcctcaagactcagaaacatcctttaaagcttagtttccttttgttcaggatgagtgtatttgagaaaatagaagataaaggccaaagcctcagactcagatgagccttaagatctcagatgagagatggtagcaaaacttcagagagtagaggggacacactgggcacttacccagtgaagcatgtcacttaggtacagtcatcctgtaggaaaactcgaaaagaaaagtgattttacctaacttgtgggaatcttactaattaaaatggttttcctgtgtaaaaacagacagttgtaaaagtgatggtaaggcagacactaaggaagaatgtagtgatgttgaaaggcaaatgtaaagttaggtaattacatgacatggcttttagaaaacctcaaacatctaattcatttgcctcatgctagttaaggacaggacattccttgatggggtgggtaacaatatcaggtttgctatttttattcctttggtacacaagggtttaacaccaggctaaaacagccatacatttattattaaacatttctaccgacaatgcactgtgccaggtactgtactcctatcgtcagtcggtaggaatctgttccactgtaagtcacaagggattgatttcccctcagcattccccgctcacctctgagagccccagagttgtagttctcttgccagtgtgctgtgtttggagggagatgtcggctcagagtcagctagtcagctcttagcattcttcagaggtgagttcaaatcacactcttttagtttgaaagttaatgaatcttaaaaatccaaacatcatttctagtagcattgtggttgtaactacacgttgaatgaactgtactttaaacaactaagctattaataactagtttattagttgtcagaattgatttttttttaaatttacagtcttaacacatttttaaaaaaaatttattaagagtaatacattttagtagtaggattctgtatgcctgtatacttggctaagaatccaagttctgtggttctactatttaatggaaaactctggaagttaaagcattggataagagaagaggctttttatataagacaggcactgttacatggaaaactatccatgcaagtacagatatttcatagttccagtgatttgggtcatatctggtgctttgtcaaattttaacgtgaaaaatgagatttttgcctgagcctgttgaaaagcagtaataaatgccacacagctagtgaagtgaggccgaatgaagcttgttcatgattttctgataacaattataagaaatgtgctttatagatttaagatttattgaagtataaatatgtagtaatgctataatgtatttttaagttatacaagaaaatgtagggacttctgtttgggtttttctctgtggctgagaggaaacaagttcatgtccaataaagctgcaaactcctctgctctagataaagtagcttggaattgccttacttatttattaacaactggcttctctcccagtaggactttgagttggcacatttatataaagcccgcagggatgacagaactcttagggtaggtaacctctgggtggaatgtcaggcttaacagtttaggatagatttgtctccgaggccaaagctgcatgtgacgtgaaagcacagaagtagcattagagttggtgaacgtatgaggtctgtcagccctgacgccgtgttccttttgagaaggaagctcagacaaggctctgtggggaggggactggactaaaaccctggtggtttacaggaaaaggacgccgtgggctttgtatttaaccgactgcttaaccagttaatttacagttagtgattgctgacttcacacgatcaccacacatattttgggaggtacacagtaatgaagtaggctggtaacaagtgccaagcagtggcctagctagca

SEQ ID NO: 25284 - DNA, 1882 bp, Mus musculus
aattttttaaaaattgtatttttttcttaagaccacactgatatcaaggctgctctgaagtgagttattctgatcctgccgcctgtcttccctgtaagagtggagcctcgaggtgtaccttaaagtgaccggaatgttagagatgcaatttgcagagctggggcaaggaagggctccttgtcactgtagttactttccttgcagtggccaaatgcccaataagaaggaatacatgaccactgctgtggggagtcagcaggtgcgtgatgcagctggccacactccatccacggccatgacataaaacagacaagaagtaaggctggactgtaacacctcaaggcctgctccagtgacccactttcttcagagaggctctaccacacacacaaccaccttccaaatttacactcagatcactacaccatgtctcccaagttaaaacatgtatccacctagactttaaatgtgctttgtaactgttgatggcactgtacagagggccaaagtatttcccatcagatagcatttttctgaacccatgcctcttgggacgagatcacaggacttgacccatcatcaaataggaccaggtgacctacagagacatcacaatgatggcttcctacagtcaagtccatttccaataatgctctcatctaagagaacccatgaaccttatttgaatcctggttcaaacaaaaaccttaaattatttatgagacaattataaacttgatagattttgatgtgtgaaggtatttatgaatatttttagtcagtgatggtatactgttaaggaaaaggttcatattttagggacaaaggctgaaacatttatggacagagtgatatgatatctgggatttgttttaggatgaagtgggagggaggaaatgaatggaaatagtgttgaaacagtattggccacgagtcagctattgtgtgctaagacgctcctcacaccagtctactctgtatgtgtttgaatatctctgtaataaacttaacaaggacatgttttgttggggtgtttttttgttttttgagacagctctggctgtcctggaactcactctgtagaccaggctggcctcaaactcagagatcctcctgcctctgcctcccaagacatgcactaccatgcctgtctggtattttattactaacagttgagtagagaaattactcagtgtctgaggtttctcagtaggttaggaagaaagcacaggcagtgaaactcctctgaatgctctgagtgggcgtcaccttgctggagtcagaaaactcggttggtcagctttctgttgctgtgacagaatcacctgcaaaagtcagcacactcacgatctggtcacccctcaagtgagccaccatctagggaccaagcttccagttcggccttttgtggaatggggatattaatcggtcatattcttgacatggggaaagtctggaatctgtcagcacaagtccagctgtctgtctctgaagaacttcccaggcagccgagcaaggaggatgacagaaacaagctggtacgttttgagcatcgctcccagagtctggcgtcgtctcggaaggggctttttctttagaaagaccagaaatgcatctttatctctagctagcagttttcttcccctttgttttcatgagagataagagttaccgaggcctggactggcttgctgcaaatagtccttgtaatattccacactgcaaaactctagccacagtccccagcggtcaccatgcaaacaccaggataaactacatcttcgaagcactgagcacaggcaagctgttggagtgtggggaactgctgtcactgaacgtaagctggccttgtgccttattgaggaggcaggagaggggacat

SEQ ID NO: 25285 - DNA, 1193 bp, Mus musculus
atatattatacatacatacatatacatacatacatatatataatatattattttttaaatataagaaatcaacttcaaagttatagcattatggtaaagctattaaccatacggagaaatatgtatataagtgtataacatgatgctgccattaattatgcaacatcagtgctggacattttccttgagagcagattatatgcttacttccccactaataaaatactgaagaatagaaatgataagacttgtttacaaagaaaaattttgcctaaaaaggattgtgtaccactaaaaattaatttttgaactctttataatattttccaagtttcagatagtaaagagtgtgtgtaaaagaagaaatgcaaaaagacagaaggttctcagccaacaaatgattttgatactgacttggtatagattatggcataaagaaaccttagcattgtttagttgtatagttgctacggtaagtaggtacagttgaagattttaatttgcttttatgacctcaggaggacagtggtgtgtcctatcatcgacgtgatcagtgatgacactttcgagtacatggcgggctctgacatgacctatggtggcttcaactggaagctcaattttcgttggtatcctgttccccagcgagaaatggacagaaggaaaggtgacaggactcttcctgtcaggtaatttgtcagacgttttctttatagtatattgcagagttgtgacactttttcatggggttaaaggtgtcctttgagaaacaaagtaattgtatactttgtacatatttcacatatttttttaaagaggatttttccccctctagctaacaaagttatattttgttttcattctgtaaactcctagtatacatgataagtgatgataacatacatacattctttattttctatatgaaaacatttcagatttctaagtttagtctgtgtttaaatcaagctactcctcaatcagttgtgtccttatgttaaatactagctcagagttgtgtcttgtgctgtaacattttacgagcatgtaccatctgggtggtacttactaacttttaagcttagaaaagcttggtcctcacaatgctaaatagagattgtgagaaatacattcaatttaaggagtctaagatagaaagttcatcagtactaagaatcaagaaagatgctaaa

SEQ ID NO: 25286 - DNA, 1572 bp, Mus musculus
aacagggtttaaaggaaattaaaaagaattatgagaagtacaatttgttatagtatagtatgagatttctatatagattttatacctcagtggggaaaaactgattccagtgatgttgatgttgttttcatctgtgatagtcatggatgcttctattttcctcggggtgctcagagtgagatagtgggtggggtgagctctctgaacatagtttgaatttctttttacaatattcttatttggtttgtgggctgttggaattgtaagtttaattgccattctttaaaaaaaaaaaaatggagatttactctgcctggtctcagttggaaagttttcgatctctctctgttgttcttgggtcaactggcgtacagactctgcctcgccctgcctccctccctccacacagtttcttaacatgctgtccacttaactctgctgagctgattgtgcttcatgcccaagactcacgctactgcactgcaggtttgtctccacagcaataacctctgacccctgcgagtcacttcacagagtgctgtttatctggagattgggagatcagacatttaatgggttttttgaaacccttgccactccacttagccgtgtgcttccctgtcggacgcacactcaggttcctcctcagttgtaatgttgatttgctgctttttcacaaaataaaaatggactgaaagtgtttaattggcattttttaatgagttagccaaagaagtgcaactgtgattccacatcacagtcctgcgtttcctccctaaattctattttgttatttggttttctttactctggtttttagtaacaggatcacgtattaaaatttgctgttaattaaagtttaccttttgattttacagaaatctcattgtgacatttttttccatagcagcccattggccaaaatgcataattctgcttcctgtctgtcaggtgatacttgatggtattcctctttttttgattatcaaagacttgcttcaggaagtgctgtttcttgtgcgtaagaatgttcctgaagtcacactcgtcagtgacaccatctgtcatcattcatccagtcgtcagcatcgaatatatggatgcttagggtaaggctgtcctccaggatgcagagactccccatgcaatctgaatgaaaccggtgttggctggaatactttttctcttctgtgagctatgttaattctgtctccaatgggcccaatgtttgaaaagtcagatgtctaataaattattttcatgctcagaatttcagatttttgtaccctaacaacatggttttattccttattgtaaaagtttaacagcgttgtgatttaaaaatgtgtctcacttttttaagtggggggatgtgagtgacttaattcatgggtacttttagaacctattagataatcttattgcctttatttttctaattaaaatattcctaaatactttgaaaatatatgatactctgagtagttgtgccttacgttggttttactgagggtaaactggatcctttcatcatagcagttagtgggttaagcagatgttgtctctattgga

SEQ ID NO: 25287 - DNA, 1170 bp, Mus musculus
tgccgctgtgggaggagactggtaggtagactggagatgagtgggcagggtcagaaatgtggccctttgtaagtgagcagccgcgtggggacataaaagaccaaggttcggagcggttcccatgctgcaggctgccccagagagtgtcagttctgttcttactggctgagttaaacccaaattagcacacacgctttcttaagttttactttttacagtgcagagtttttagtgagttagcttagatatatgagagtggtgtacctggttttgataaagacataaatgatgccacatccaaagctcgactgatagtgatttaaattaggggaaaatgttaggaggaagttgtctaggcttctgaaaaaagcccatattctttcaaaactaaatgtattttgtttgtgtatgtacgtttttgtgtgccaggttgaacatgtggaggtcagagaacagtgtgtgggactaaggctgtagagtaatttaatggaacacatagaaaagaaacaagttggttatactagtaggtagagttattttcaattttgaataaatttaaaaaaatactcagggttattaaactcctgaatgtcaaatagaaaaatgtcagccttattgcttctgcccagttcacacacacagatcctatttcaagcatatagtctagagtgttatgttactatgtatgtatgtatttatgtacatatgtatgtgaggcagggtccccttttgtagctgtggctggcctagaacctcctgggcacaccagattggtattgaattcgcagagatccacctgctgccacctcctcagtgctaggactgaaggtgccactgctcctggctgtacttcaatatttagaactagccaccagatgcactcttcctgaagagttgagcccagggctttgcacatgctaggcaagcaagcattctatcactgaggtgtatccttcctctttaaaagtgatgtttagaagtgtgtagttaaaccaaagaaacctgctcctctacttttttgtttgtttgtttgtttgtttttgttttgtttttcgagacagggtttctctgtatagccctggctgtcctggaactcactttgtagaccaggctggctcaaactcagaaatctgcctgcctctgcctcccgagtgctgggattaaaggcat

SEQ ID NO: 25288 - DNA, 1239 bp, Mus musculus
tcatcatgtattttgagcagagtggccattatcagtataggagagctgggttttatttaaaagaccattgggtttactagttcttacttgaattgttctaattctagtactgtgtaagactgttctgtttgagtccctttttttatagacagcttgttctaaatttgcaggtatatcatggtattacctcttaggtttgtttgtttgtttgtttgtttgtttgtttattggtttttcgagacagggtttctctgtgtaaacctggctgtcctggaactcactctatagatcaggctggcctcaaactcagaattctacctgcctctgcctcctaagtgctgggattaaaggcgtgcactaccacgccaggctgtttattttttattatttagctcttggctcattagtttttcagtaagccccaggtgctgtttgtactggctctgctgttgcagttctgagagcaccaaatgctcaactcctaattttgcactgtccctttttagtttgctgcctttctgctcacataaacttgctcaattattggtgctatgctctgtcttggaagaggttgcccacttgaaatgggaaagatacaatggaatttcttagaacatgaatttgctagttgacttacctgtttgagatgttatagtggccttcagtcttaataatctgtcattacttctttcactgttcacagcactaagggtgagtatgtcaacagtgtttgtcttcagccttttggtacagtttctttaacttctgttgagcttctattgcagatattggacacggcgtatcttctattgatgccatcatcgttagcatattcttccagctaaaaataaaatcaaactccaaagcctgtattgtctcatgtttttgaaaattgaagagcgaagctttattattctactttaatacctgctttctcacttttgatgttgactatcattggattcaaaaatggaatttatatttgatgtataaaaaaatagatcacccccacccccacccccagaccttttgctggtgcagtctagccaagtttcctagttaatagtcacgcacagagctgatggtggcaatactagcatttaccatgtcttgggagtcctgttctaggcgtttcacataatcaccttactcagccctgcacagcagggtgcattattatccacactttatagtcatagcagtgaggcacagggaaacaaagcagctcccacattttca

SEQ ID NO: 25289 - DNA, 1469 bp, Mus musculus
tgtgcatgtagtcagtcaagtcctgggacaaagaccaatactttacccagccccaagccacactgtccttcagactctctggtttctctgttctgaaagctaaactgttgcttctgcctctttcaggtgcctgagatgttgcacaatgatgctagtgatcacggatgcagccgttggggatatttcttcctgcagaatgctgggatacttctcggttttggaattatgttactcatttccatatttgagcataaaattgtgtttcgtataaatttctaattaggttctaaaccctagagcagcttaaagaagtactgttgtttgtagttccagtagatggtagaaatacgttcatatgctgtgatacacagcatttaaaactagtgagttttgcaatttttctatcaaattttgccatttgttatgcttataaagtcagttccattgggtaacataaaggtacgttttaatatttaagttattctgttttggaaatgtaaattctgtgtgtgatccaccagtattacccagctgtatgtttcggcatgccgtgtcttgtctattctagagaaaatgtctttagtgctcttctgtgtagctttagcattacttccctgctggagttgggcccttgctcgtgctgagaaagaatgggcacaaaacccaagacaccaacagttcacactgagcatagtcaggaaataggaggaaaagagaactcgggaggattgaggaggtatatattgctttgaaaaatcacaaggttggttgtaacgttgagagggggaaattctagatgtgttttaaaggggcatgtttagttccgagtacgtgcgtggacatctgtcaaattgttatgttcctgtgaaacaagtgaacactctgatacacttcatctgcttgtacatctgtatgatagagaaatgtaaatatgttaatccaagcaatgtgtcacttggctgagaaatgaggcatttaaatctgtgtgtggagatgggccaaatgagtaactagtgtgtcaccagaagacttggttttcaccatggtctcttatgcctgaagttatgtgaacattctagttgtctaggcttccaagtggcaagtattaaaactttagcccatgagaggatgttaagacctgttctgaaaatattttgacttcttggattcaaaaagcacttagctctctttctctctcagtgctttaaaatgtcattgtgaacaactgtcctttgatgtatgacactgtagatacattggggctgtctgtagcactgtctggatgtttctttcttaaaaaattaaagtgtcaactcagtggcaggccttgttctctttcttcttacagtcttagccactgtcaagcatgcagctgaggggttctgagtctgtgcacactgtcttcagaaccttttatcttgcaagatgaaaactagacccattaaaaacttccagcctgagatagtgga

SEQ ID NO: 25290 - DNA, 1193 bp, Mus musculus
gctcacggtggggacaggcacatgtgtgaacacaggtgccacctcgatcctgtgattgttcacccttagggatcttgcactcagaaaaatgtcttgtgctatactgggcagggctgggcagggtgacacacgcctgaaaaccccatgcttaggacttggaggaaggagtgccatgagtttaaggccagcttgaactacataatgagtctcatggcagtctgaacaatatagggaggctcttgtttcagaaaaaaaaaaaaagattaaaaaaattacccattacaaatgtgagccctctgtttaatggccctgtgatgagaggaaagtaagtaaaaataacttgctcctgagctgggcatgatgtcacatgcctgtgctcttagcacctggaagatgcaggcgtaaagattaagatcttagggtcatcatctgcatagcaagtttgaagccagcctgggctatgtgggtctcaaggggcaacacaaagaatagcttcttgctttttcctttttttttttaaagcttgggccaccaccacccagctggactctttcattatttattttatgtaagtgcactgtagctgtcttcagacactcgagaagagggcatcagattttgttacggatggttgtgagccaccatgtggttgctgggatttgaacttgggacctttggaagagtagtcggcgctcttaaccactgagccatctcaccagcctgctttttctttaatttttaaaatatttagtttattttattctagtatgtgtatgaatgctttgcctgcatatatgtgtatataccatgtgtgtgcttgatgccagtgaaaatcagaagaaggcatcagattccccccggtctagagttacaggtggctgtgagctaccatatagatgctgggagtggaacccaggttctctacaagggtaaaatgcttttaaccaccgagccaactctccagctcagccactttattttaatgtccaaaatcaggttccatgtggctgttttcattgctatactaagactggtttgaagacatcctttttatacatatatatcctttagaattattcttagctttaaaaataagctcatggggctagagagcatataatgagtatatgctgtcttaaagaagactcaggtttgttttccagcatctatgtggggcagcttccagccccctg

SEQ ID NO: 25291 - DNA, 1145 bp, Mus musculus
attctgcttctccctctgtgtcttgggatccttcctctctctgtgtttcacatggagttgtactcatgtggaaaaagctcaatgttcagtaggtgatgaaaaaccaagatatatatggggctggagagatggctcagtggttaagagcactgactgctcttccagaggtcctgagttcaagtcccagcaaccacatagtggctcacaaaaatctaatgagatctgatgccctctctggtgtgtctgaagacattgatagtgtacatgtacataaaataaataaatcttttttaaaaacccaaaaacaaaaacaaaatatactatttgagaagagattaaatcataggaggcctgctcaaacagtctgggtacacatgtttgttttgctggatatatatatatatatatacatatatatatatatatatatacatacatatatatgaatgaaaatgtcattcctctagatgactggttttattatctctgatcacattcttgggtcaggaatttgggaggtgctcactggtgttctgatctcagggtctctaaggggtttgcatcaaggtggtgcctggccagggttcctctctgtcttagtcagggtttctattcctgcacaaacatcatgaccaaggaacaagttggggaggaaagggtttattcggcttacacttccatactgctgttcatcaccaaaggaagtcaggactggaactcaagcaggtcaggaaacaggagctgatgcagaggccatggagggatgttccttactggcttgcttcccctggcttactcagcctgttctcttataaaacccaagactaccagcccagagatggtcccacccacaaggggcctttctcccttgatcactaattgagaaaatgccttacagttggatctcatggaggcatttcctctactgaagctcctttttctgtgataactccagttgtgtcaagttgacacaaaagtagccggtacactctcaaaagatgttttatctatagtcctggtgctgaggctggggaaacatgaatacccaggctctctggctctgtggtgtgtctactgggtctccctagaataatgacttccaggagctggagttcttgtacatcagtttgaggttcctatgatta

SEQ ID NO: 25292 - DNA, 1104 bp, Mus musculus
actcgggagttcagaaagagggtgggtgttcctccacgccttgcttttcaaaggtggctttctcaggattaggggtacatgcgtgtgttattcacgttgtggtgacagacttgggaaaaggggttgctcttggaagatcatgggagcattttgcccatttttattgtataggaaatacctaacagaaagtatttaaattgttcacctcccaagtcaaaaccagataaaactaggtatgacaggggactgattcaggatttaaaggtgagatgagaaaaccagcaccggaacatgcgttattcattatttcaagttcaagttccagagtgatagagacaggagggcagaggaagacattgggaagggcttatcgatggtcatattattgaagaaaggcctataaagaaattttcatttgtgtttataaatgaagaggcagtgcaatgcttcattaaggctggtgtacagatttctcaattctccctagctgtgtggtagagatattgcaatggaatgctggtctcgggccttgtgggcaaactgcagggtatgggtgtgtgctggaatggatttctttggctccgctcctctcctctcctctcctctcctctcctctcctctcctctcctctcctctcctctcctctcctctcctctcctctcctctcctctcctctcctctcctctcctctcctctcccttccctgtgggttccttgacaagtttccacctgccttaatatgctgcatggtctgagatgtcacatagggacaaatgcaaaatgtgaacttcccctgagtggacacgtatgtcctgtgatatctcgtgggaagggaactgaaataaacttggaggtgtaggtctgaggttcttgtctagaagccaagttagcatcacagtgactccagaaagtgtctctgctgtggaggtcacagccaggacatttctcagtatccaaatcaggcagggcaacttctatgtagatgattaacacatgttattctattcatcctcgagacatgatatccttgctctacagaaggagagagattcaaagagctttggttgctctcttagggatctagagtgagactgaagatgctgt

SEQ ID NO: 25293 - DNA, 1139 bp, Mus musculus
tcctaaaccgccctaatagtgccaccaatagctgaccaagtattcaattgcctgagactatgaggtacacttaatattcaaatcactctagccatgttgcccatacagaggaaggaaggactctggggacttgagcctctttttccttttatgtgggtttcaggactgaacccctgttgtcaggcttgtgtgccaagtgtttttttgttttgttttgttttgttttgtttttccatagccactatcaggaacagtccctacttaccccctactcaagaacaaagcaagatgacacacagatgcctgttggatttggaggcctgaagcagctgatagctctatagacctgtagatcaggctcttgcttcagagtccaagcaggattcagctctgctctttctggatcataaagtccttttattcacctggaggaagtaacagtgtggggatgctctccaagactgggaaggaagagggcacaagttctcttcggagcttccctttctccacccgctaagtgctttgagtccagatgccaaccatgcccatctagcatttatgggtgctagggctctgacctctgacctcatgcttgtatcaagcattaactgctttaccaatcaggccatctcatccattctgtatgtgccctctgtaaattattatcttaaaaatttcattccttagacaggaatatattttaaagatggtatagagatttcttgggtagccatgaagaaggagagaagcccgtagggctggtggtctttgtggcaggctggggagaagtgatgggtttttatctttaacagcagaagggatgctgaagctgcagggtcaagaagccagccatctcctgctttggctttcatcatgccagtcaactggccatcatgatggagccttctaattgcagatgagaagcaccattgactgcctgcaacctcagtgctcactgtggcctgtactgtttatgcatacatacctctctgggcttgtctccatatatgaaaatgtatgagaaacacaagctatataaaaatcattactaacaataaaacatgagaggtatggttataaaaagtttttgcactagtatattagccattttgtgtgtgtgtgtgtatgaacatgaagat

SEQ ID NO: 25294 - DNA, 1146 bp, Mus musculus
ccagagcccaggtcaatgtctgctatatagaagaggctcaaacattatctgatgaatgagaatcatttgatgtttttttcttttcttcaaacagaactctagcaatattctgttataaataagtggatctgtttttacaaacgaatggctacagttaggagacatggttgagtttgccagctgtgtctggccccatggctaacacagctcacaaggggaggcaggaaatgggtgggggttagggttttcatagatttctggaatctgaatgtaaggagaacttcatgttctgatgtagttttaagaacagggcagtagagtgcttgcctagcatgcacaaggccctagtttaaatccccaacattacacaaactgggttgaggtggggcacaaatgtagtctcagcacttggaaggtagaggcacaggaatcagaagttcggggttgtttttgtctctatagagagtttgaggctatcctgacctactctagactatttatagtctacttttttataatttataacaaaatgggtttatttcttacagtgctagagtctgggaagtctgagcctgagaggtttgtatctggtaagggcccacatgccacatcacactataggtgaaaacagaacaggaagagaaggggggcaaacttgcttctatagcaagccttttctctgcataaggaacctactcccaaagtaagaattttaatccattcttgagggcagcacctttatcccccacgaaccttataagccccaattctgttgcatgttgacttttttccaatacatgaatttggggagcatgtccaaagcatacaggcacattcatatagcagatgcgtgctaagcatacatcctttccatacacccatttttatggatgccttctctgcataggagcttctgtttttcctcatctttcaaatgaagaagtggaggcgggaaggggagagacttactgcctcagagtcagtgaagccattggtgggtaggaattctgaaactctgaatgcaatatgtattgataccaatacaaagaccatcatttgccatcaggaaaaagaggtggggaggtaaatgaaaaaccatatgaaagccaccagaacatgagggcttaagagcagtggatacctgac

SEQ ID NO: 25295 - DNA, 1170 bp, Mus musculus
tttatgaaatggtctgaaacacacttctgctattttatactatgtatttgcatgaagcaatgtttcaacactgacagttattaaattaaaccattgatcaattctgaaaagtaatgaaggggctctgtatgctgaagtttttctgaaatattcagccaaggtttaattctttatgtaaaaataaataaacacattcatctcattggtattcagatttgctttagtcatcaataaatgtcaaagtaacatgtataccaaagaattattttaattatttttgacatttattgtctcagaaaatggggttgtatccctgttttacatgactacctgatgacctgacaaaaatgtctgaaggaaggcaggcttacagttctagggaatacagctcagtgagggtgtggtggtaggagcaagaggcagctggccacatttcatccaccatcaaaaaggagaaagtgatggctactggtgttcagtacactttcttcatctgtctgtatgtctatctatctatctatctatctatctatctatctatctatctatctttttgttgattctttgagagtttcccatcatgcaccccagtcccactcatctccctgtccctttgtacccaccctcttcccttgcaacctttcctgcaaaagaaaaacatatcgtgtggtagctgtagtgtgtcagtgtgtcccacagcattcccttttgttcacacttctttacttgcaaatggtcactgcaatgagtcattagtctggttcgaggcctctgacttctactacaccatcaatactggatcctcactgtgatcctctcagacatcctgttgttgccgtgggtcatggagatcctgcagctttggattacaggaccagccccttcatgtgtgccagcagttcatcaatggggtagatgttggagtgggctcactcacagccctggatcttggcctgagctggtcagaccactgactcttcccacacccacaccaccagagcaggctctccaggtctgccctggctagctcattcaatggagtacagtagctaacaaggggcagggtcagctctcctactgtcatgcccttgggactggctcaccctcacccgcagggccagttttactgtgctgcccaggtgaggtgcagggcctactccctagagtgct

SEQ ID NO: 25296 - DNA, 1182 bp, Mus musculus
tataggtgtgagacagcaggtttaaaagggtcacatgagttactaaaacagctgcctggcatgggtcacagtcacataatgataacaactcagagacattactagttttgagctccattagaaatgtttgaatagctcaaagccagttacacaactaagcctaggtggaaggggatgacacagggtggtgtgtaagtcactagagacctaatattatacggttatcagtgtagctcatgggtggagaatgggtttagcatgcccaggcccagtggtctctccctagagccatccacccaaaattaatatttgatcatattaagaagttatattaagtaggacaataatatagtgattatagtggttttagcaatcattttagtgaatatattaaaatatttacagatgataatgatataatcttagatagctctttgaaaaattggttcatggggttgaaggcaaaagtgagagagaaaccctgtctcgaaaaaaaaccaaaaaacaaaaaaagtgagatataaatggtgaatattgtctctgtgttggcagctggtgcactgctgtgggtagtgtgcatgtcccaccgttcccactcatccctgtctcttgtgtctgtctaaaatttccacagtaaaggagatttaaaatactatgccaagacaagcattgaaaccatccacctctgggtatttactaataagaactagaatcaaaggtttcagaggtttctaaagcaattgtgcataattcactatagcccctcttcttgttcctacttacaacaggggcttatatacagtccaggctggccttgtgctcagaatattcctgccttggctcccaagttgctgggattataggctgtaccaccacacctgactatacaactctatcaccactaccacctcctcctcctcctcctttcctctcccttcctcctttgaccagtatcttgtcatggacccgaatttgagcagttcccccagtgacttgtacatcacagcattgcctggattacttcctgagattcttccctttgcatgaactttctgttcatctcccctttccttgacatggggcaatgaaatcgactcctggacgctgtgcctctcagggaggcactgtgagaggaatgtcacttgatctttggacctttgaggttagacaaagaattagaaa

SEQ ID NO: 25297 - DNA, 1148 bp, Mus musculus
cactatagaaaaatactacatgctcgaggctcaagactaagaactgtgtttccgggcctgcctgtcaattacttttgtgctaactctagatttcttctttgtgaatttatttgctaagaaatgcagataaactgccgagtcttagagtaactggaaagccactttcaggagtgacagatgtaagttggggacagttgtttggggtgaggatttagaggtgagatatctggctgtgcccctggctcaggccagctgtttctaattatgcttggtcagattatacagattatactggcttggagagctaatattgtccctagctgctagttgtttgatcttctattgtctctttgctatgacttaacagacaatatgaacctggagaatatcttgggtaagataatttttgaatgtctaagttgtttatacactgaatggtacctcaaccatgacaaatatcaataaatatttagtgatcaagagatttttgactttcatcccagaagaacatctatttatgatgtaactgaattattgagaaatctgaaaacttattgattaaaaaaagctaggctctgtcattttctttgtctggatgcagctgtgtaggactgtcccatcttaatgtctgcatgcttctttgatgcccttggcgcttctgtttgaagcttgactagggccagagaggctgctggaaaactctagcagtttggaatgtcttactctcaaaggcttatccaaggatgagtgaggattaaagtctatcccattcaacttgttggaaccagaacgggaccagtgtgtctaactttcaggatgatatttccacagctcagaggaaggcttcatgacctagtgtttggggtcttatcacatgacttcaaaataacaatatatcaataaacagtgcaaggacctgggtcagcattccagtttctgtttatattatgaaatagaatatttacggtgctttatcaagcacacagtaactgaacctgaaactagctactgctgctatagttggaactcccagttagaagtaacttctgaaaagaaagagaggaataaaaattttagatatgtgtgtgtatgcatgtatataaataatatagagtatagaatgctatattaggtttcataattcataa

SEQ ID NO: 25298 - DNA, 1189 bp, Mus musculus
ccatttaaaatattgggcagtccgaggtctaagggaaagcagtccacatcagcagatgtcttaccacagcaggcatcatatcctgtagtgcaggggaggacaccataaagcacttgcctgcaaagcctcactgagctaaatctctggggcttgcctccctcctgcccccaacagcaaataaagtctttaaaaggttagttttaatcggaaaatccagactctctctaggaaagagtgttttctgctcctttcaagctttctttagaagcaagttgtattgttgatgtaaaaggtgggttgctacagaagaggagaagcagtccctgtcaccaaaacatagtgttattgttttcgtcctgtacatacttcttccttttctgcaaagaattcaacaataaaatcaaaattcaatattcccattcagtactacaggatactctgctgattcacttgtaatgttcactgcctcagccaaggagttcaagtgctccgagactgtttccaatgtgacctcagaagagaagagagttgtttcataacagcttctgtgtggtttttgaagttcaaaattctaagtagtgttaggtgttagccttacacttgtcgacaggagtttaaatgtttagttctctttatcttctttgttgtggcttgggcaacagacttcacacctccttttgaaaggcgatggaaccacttagggacttgatcctgaggcctgagctccccctgttctacaaggccacaaggacccttggaactgttctgtatgtagcagctggtaaggaaactttagttcaggaaattgatattttttcgctgcacatatttaaacaagttccccagtgagctatacagcaaagagctatttgtgagaatttcttgaaatttgaaatatttaaattataagggatataggcagtaggaaaatgtatacttgttcttttgtgttttattttgtttttgtttttgaaactgggtcttgttgtgtaccccaggttggccttaaacttgtgatcattctgccccaacttccctagtgctgggattatacttgcgcatcacctcacccagctcttttgctctctttttctaagctctcacttgcaaaaatatgatgttgtttaactatagggaactgaattctgcatcgttcagttaattattcctcaagtgttaaatgtctggt

SEQ ID NO: 25299 - DNA, 1102 bp, Mus musculus
tgggagtgctgggttctgatgatggtgagtggtcttggttcctgttagtaggattcttacgtttacctttcgccatctggcaatctctggagttagttgttatagttgtctttgtttagagattgttcctctgttgcttttgttaccctctatcagcagacgtgggagactagctctctcctctgagtttcagtggtcagatcagtctctgcaggcaagttctcctctttcagggaaggtgtacagttatctggtgtttggacctcctcctggctgaagatgaaggcccaaaacaggatctttcccagaagctgtgttgctttggtcaggaaggtggccggttgtctggagccgaagatggcgctgcctcagaagctctgtggctctcgccaggaaggtggccggttgtctggagccgaagatggcaccgcctcagaagctctctggctctcgcctttcccagaaatggctggcctctgtattccacaccgtcacctgtgcagcctacccccctcggagtcctggagccaaggagactcccggcgccagggcctgaggcacaaacctctcaggttggcggatccctgtgcactcaccaggaaggtggccagttgtctggagccgaagatggcgccgcctcagaagctctctggctctcgccaggaaggtggtcggttgtctggagccgaaggtggcgccgcctcagaagctctgtggctctcgccaggaaggtggccggttgtctggagccgaagatggcgccgcctcagaagctctctggctctcgccaggaaggtggtcggttgtctggagccgaaggtggcgccgcctcagaagctctgtggctctcgccaggaaggtggccggttgtctggagccgaagatggcgccaactcagaagctctctggctctcgccttcccagaaacggctggcctctgtattccacaccgttacccgtgcagcctgccctccgcggaatcctggagccaaggcctaatttttttttgaagatatttactggccttttaagttgacaatcttcattctcatctatacctattatcttaggtgtcctggatttcctggatgttttgagttag

SEQ ID NO: 25300 - DNA, 1127 bp, Mus musculus
tcatagaacagccatttatgctttacttctttggattagcatcattttaggtggattctcattgtgccacttatcaatagtttgttccctttttgtcaagtaatattctactttatagatgtaccatgcttttttttctcttcaggacttaatagacatttggaatttttgttatttttaacttctatgaatcatgatgttataggcaaattttttatagatgtgttttataaacgacagtctaaaagtcatagtaagtcattaatcaatttaatactgtgtccatttagcagaacaataagatgtttgtcctttaaagactgtgacccatctagccacaggttcttggcccagtaatggtaccagacagggatttcatcacctggagcaggacaaaatcccatcagaaagaagctagtaccctcttgatgtccatccttgtcaggcccatcgttattatgacttaaagagctcccagctgggtaacactgatgatggtttttctcctccacagcatacagaattgctttgagtttgtactggctggttttgtgtgtcaacttgacacaggctggagttatcacagagaaaggagcttcagttggggaaatgcctccacgagatccaactgtaaggcattttctcaattagtgatcaagtggggaggtcccttgtggatggtgccatctctgggctggtagtcttggttctataagagagcaggctgagtaaaccaggggaagcaagccagtaaagaacacccctccatggcctctgcatcagctcctgcttcctgacctgcttgagttccagtcctgacttccttggtgatgagcagcagtatggaagtgtaagccgaataaacccttttctcctcaacttgcttcttggtcatgatgtttgtgcagaaatagagaccctgactaagacagagttctatgaaagctacccaatatgggtgaggtttccaggtcaaccagcaaaccagcttgtcttctccatgttctaagtctcaagaatgtagtaattttagcaaatagggtcttatccttaaattctagcaggtaaacaataccattggcaatagactgtaatgtttaggaggtctatgggtcctcactggccaa

SEQ ID NO: 25301 - DNA, 1239 bp, Mus musculus
agaggcgctttgattaccccgattgaagtctctgaaactttcctatggttttctgtattatatgtctggatggagctgtttagatacattgattggtggatatttggagaaagcaacaaagatattaagtcattaaccatgaagagaacacgaggggaaccaggggacttcgaaggcaaggtaattgttgtgaaaagtctgtaaatgcttctaattcttcccccctcttaaaatcataatagttgtacagaattttaaaaggaaaagtttaaaatacctatatcatagaagaaaaaaaaattagaggaaagcaaaaaaataaaaaaaaaaaggaaaaaaaaaccttatagaagttagcattatgctaaaatcccagatgttgtaggactgtacttctgtagagtttagactgagcatcgatcccgtctccccgcgagtgctgtcggactccgtccccaagggccaggccggactgtccagacctgcaggctccggccagaagcgccgctccggaagcgtcctgccgcctctcgctttgccagcctgggagccgcgcgcatgcgcgctctctctgcccttctcacctctgcttcactcgccttctgtgcttgttccggagactttccaggccagggagaactgggaacttctcatcttcaaacaactagacaacacacacacacacaaaaccttaaacaagagagagaaaacaaacaatctttgaagaatttctgaaactgtttacaaggaattttgaaaaacagggatgtttaaatgatgctggctctgtttttctgtaaataaatttgcatattttgtaggacttttaattgtaatgatagagaaaaaacaaggaaaactatttaatgaaagcacgatatttatctttggtaaatgactttagagcagttaaagacattgcttaaaaactcagaatcagaaaaacactgaattatttaagaacacatatattttaaagtataacatatttattataatttatttgcaccttgggaagacttgctttgcattctgcctcaagagcttctcattgatgtccatctggaggccaggggggtcttggaactaccatttttttttcctttagatcaacaaaattctggttgccctcaggcctccttccttttctttccatctattttgttgttgttttacttcatttagttttctttttctttctcttgactcctccttttaggatgtccagatgttgtaaaa

SEQ ID NO: 25302 - DNA, 1197 bp, Mus musculus
actgatccaaatcctattggtggaaagattcccttaacagacttgtagcccccaaatgtttgcaagcatgtatttcaaactacaccccctctgggtctgactcttgtattggtcatctcctgcttaggtgactccacacacgtcactctactccatcacttacacagtaaagactgtgaggacaattccttagagaaacgcgtgtatcaactcacttagctctgctctcctgtaccccatgcagcaaatgtctacacatagccctcctccacccagttatcatctctaaaacctcgcaggggatgtccccatgcatcagacagctctgagggccgcaccatcacatttccccaaacccaggacccgaggtctgcggcgggcttttccctttccttatccctgtgccctgcagtagctgagaaccaacttccactgttgagctgggcaggagggaacagtctctcaaaggccctgtttctcctgaagagcctgccttcctgcaacccagaccttcctcagttaagtcagagccacaagggatggaccaggtgatccagccacagagcagagagctgtgcccaaaaggccacatggctcctgttacttgctcatctctcactgtactcagatcccttaatgaatgtgtcttaaaagcctatgaatctccaaatcctgctgcacattcacatgtgcatgagcatacacacacacacacacacacacacacacacacacacacacacacaccacatcttagtgccatactaacccgtcacacatgactgcccttgctaccatctttaaactcaagtctcctgcttcctgcacccttgctcccaattcccattctgtctgccctgtgggcctagctgtggctttcttctcacaatttttccagctctgtgcaaccttagccacaccctgctccccatacgaggccctgtgccacagtcctcttggagtccacaagtcccttccttggagctgaaatattccatagacccatcactttcccctgaccatgacctatgggctccctagggaagtataaggcaagaaggagtggggcctgaatgcagaaactgacagacacatggtgcatacaccgttgggttaggacactgggaacaagttttgggcttggaaggaggaagactctagcacacagaagtagggaggtgtgtgctataggtatgg

SEQ ID NO: 25303 - DNA, 1162 bp, Mus musculus
aaatggatggaagtagcaaatattatcctgagtgaggtaatgcaatcacaaaagaacacatatggtattcattcactgataagtggatattagcccagaagctcagaatcccaagatacaattcacagacatgaagctcaagaagaaggatgaccaaaagtatggatactttggtcctccttagaagggggaacaaaatacccatggaaggagttacagagataaagtgtgaaacagagactaaaataaaagccatccaaagactgccccacctggggatccatcccatatacagtcaccaaatccagacactattgtggatgccatgaagtgcttgctgacaggaacaccacataactgtctcctgagtggttctaccagtgcctgacaaattcagaggtggatgctcttagcaaacctttagacacagggtccccaaaggaggaaatagaaaaaggatccaaggagctgaaggggtttgcagcctcataggaggaacaaaaatatgaaccaatcagtgcccccagacctcccagggactaaaccaccaaccaaatagtacacatggagggacctatggctccaggcgtatatatagcagaggatggcttgttggtcatcaatgggaggagagacccttggtcctgtgaaagctctatgccccagtgtaggggaatgtcagggccagtaagcaggagaggatgtgttggtgagcaggggggatgggaagggaataaggggttttctgagaggaaaccaggaaaggggataagatttgaaatgtaaataaagtaattatctaataaaaaaggtaaaaacactaaaaaacattaagtgcttgttgtttaatttcttattttattcctccatatactgtgtgacatttatgattatttgggtggggcggtaagtgaataacttagtcactgacacttatccagaggtcaaagaaattgtagctattacttcaatattttagcttagttatttacttaatctaaatgataattccttatagaatgatgttttattatatccgtatgaagatcacttgtatgtgataagtctctttttgcccttagaatcctctttggagttttgaccaatggctagtgcgtatatcctacactatttgtcttggagtttattaagctgctctagc

SEQ ID NO: 25304 - DNA, 1099 bp, Mus musculus
taggagcacatttcggcttcatttacacattacatcatgagtaatggtgtccctattttgcaatgatgaatttgaagatctcatacttgaccgtaggttcacaaaaattttctacagtacaggttcacattccattttctttggaaactgacacaggaagctgaatggctctgtggtcttttgacatgtgttactgatttttttctgatggtgaatggtcttcctattggcagaacaactagctgcagggtagctcatatgagctggctgttgaattatggtagtgataaccaggtcagaagtaaagggaccactcaattctcatgcacttccccaaagactacatcattttataacttcctgttgagaaataccatgtagactagctaggatggttttcactctggtacttttcactgtccctctcttctgtgagaacttgaaaccttcactaaacaccattcttaacataccatacagtgggatgatagagattaggacaactcagtcaatctggctttgttttctgaaaaaaaaaaaaaaaaaaaaaaaaggtcagagtgggtttctgttagatgtcagagaactcctgaatgtttctcacattcaaataaaaatcaaaccactagaacacaggaaaaggcccatagcaaaagaaaatcaaagcaaacagccaggttaattaaaaggccctttttacatagctcagaatactgaagctatattcacagagcccaagagattactctctgaacagtttgctgctggctggctgctgacttctgaggacctatcatctgttcttaaaggagtaaaggataatgcttattgtcccttgtagctggtttcctcattcatttccctttataaaccttagtccctgacatcagattttctgatgaccgttgaaagatatttccatgtctcccactcaagggaatgcccatctgcctaaactccatcacttccagttggacttgacacaaatttgtcactaacagcaatctctttttctttgctttcttcaacccaagactgaacatctgccttgtaccctggcaagaatattacatcccacattagcaaacacaatatgctc

SEQ ID NO: 25305 - DNA, 1825 bp, Mus musculus
ataaccaaagatatcccaaaagtacccagtaaaaaccagaatgacccatagctaggatgaatcaaagttgactttgtgagtcctaaagaacttccctttggagacaaagacacaaaatccaaagtgaacctgctggaaggtgaccatgttagctttaatatttcaacagaccgacgtgacaaattagatcgagcaaccaacatagaggttctatcaaatccatttcagttcactaatgaagccagagagatgggtgtgattgctgctgtgagagatggttttggtttcatcaagtgtgtggatcgtgatgctcgtatgttcttccacttcagtgacattctagacgggaaccagctccacactgcagatgaagcagagttcactgtggttcctgttatgctctctgcccaaagaaatcatgctgttaggattaagaaacttcccaagggcacggttttagtcccttcccattcagattgtcgttttctgggcaccatagaaaaagaagccacttttttaaatcctaaaactacaagcccaaataaagacaaagacaaggaggcagaagatggcattacagcttatgatgactgtggtgtgaaactgacaattgcttttcaagccaaggatgtggaaggatctatttctcctcagataggagagaaggttgattttaggattagtgacaaacagaggcctggacagattgcaacttttgtgagacttgtaggtcataattctacctccaaaaggctctcgagttatgtggcaactctgaaagataattttggatttatagaaacagctaatcatgataaggaaatatttttcattagagtgagttctctggtgatgttgatagcctggaactgggagacatggttgaatacagcttgtccaaaggcaaaggcaataatgtcagtgctgagaaagtaaacaaacctcactcagtaaatggcattactgaggaagctaatcccaccatctactctggtaaagtcattcgccctctgagaggtgttgatccaacacagattgagtaccaaggactgactgagactgtgaaggagggggatatgaaaggtgaagtgtatccttttggcacagttgggatggccaacaaaggggattgcctacagaaaggggagagtgtcaagttccagttgtgtgtacttggccaaaatgcacaaactatggcctacaacatcacaccccttcgtagggctactgtggagtgtgtgaaagatcagtttggctttattaactatgaaataagagatagcaagaagctctttttccatgtgaaagaagttcaggatggcgttgagctacaggcaggagatgaggtggaattctcagtgatcagcgcactgggaagtgcagtgcttgtaatatttggcgagtttgtgaaggccccaaggctgttgcagctcctcgacctgaccggttggtcaatctcttaaagagcatcaccctggatgattccagtgctccacgtctaattgttctttgtcagccaaggggaccagatagctcaataggatttggtgcagaaagaaagatccatcaagctggtgtcattgactaaccacatccacaaagcacatcattaatccactatagtcaagttgggggtattctggtgaagggttctgaataactcccgcttcattcctcacaaaatctggaatacttattctactgagcttttacaccagttttaacaccttcctcgtgttatgttaaaagaaaaaataaataaataaatttaagaaaccattttaaaattaaaaaagaagaagaaagaaaaaggcaggtaagatta

SEQ ID NO: 25306 - DNA, 1318 bp, Mus musculus
tgcttcatctgcagtgtggagctggttcccgtctagaatgtcactgaagtggaagaacatacgagcatcacgatccacacacttgatgaaaccaaaaccatctctcacagcagcaatcacacccatctctctggcttcattagtgaactgaaatggatttgatagaacctctatgttggttgctcgatctaatttgtcacgtcggtctgttgaaatattaaagctaacatggtcaccttccagcaggttcactttggattttgtgtctttgtctccaaagggaagttctttaggactcacaaagtcaactttgattcatcctagctatgggtcattctggtttttactgggtacttttgggatatctttggttatagttccttcaaaatgttcagtgctgatatcttcaaaaatgactgttccttgaggcaatagtctgacatctgttgcaacttctttagcatttctgtacttgattgtgagttccacgtcatctccaggatgtagggatcatctgactggaggactgggaaacctattgctattaaattggtgaagataaaaccagaaatacatcctgaagaacgaatgaacggacaagaagtattttatctgacttacacccctgaagatgtggaagggaaagttcagctggaaactggagataaaattaactttgcaattgataacaataaacacactggtgctgtaagtgctcgtaacattatgctgttgaaaaagaaacaagctcattgtcaaggagtagtttgtgccatgaaggaggcttttgactttatcaaaagaggagagtgatgttgtaaaagagatattctttcactatagtgaatttaaaggttacctggcttcttacctggcccagaagacatccaaatggctgactgaagctgtgtatctctgaagattttgaagagattcacattttagctagcagctgagtggaacaaatgattctgttcagtgtggccggccattatagagttttccgagaaccttagtccattttttaaaggacctgaataagctctgagtgagtgagctaggcactgttcttctgtgactctcggcaatactggctcagatctccacaaccaagacagaagctataccattggttctcaaacctttacaggatgtccccagccttcctgggtctcttgcttaacagataacattgtggtactgattttctccataactccttaatctatactgaacataaaactgcttcataaatgaacattttctgtttctttggaagagaatatatatatatatgacataagatattctcctctca

SEQ ID NO: 25307 - DNA, 1193 bp, Mus musculus
tgttcttgataaggcaaagaaatctaaaattctatctcactgatttcattttctttcttgcttttttaggtattccaatctgatcttgaacttgttctccttgatggttgatgcaaacattccagatattgctcttgaaccagataaaactgtaaaaaaggtaattttttttaatataacacagttcacatttgacatataaaagtgggtaaagaatttaacagtgcatgccttctttttgtcccagcccttggaccagtggttcccacccttccagatactacagcctttagtacagttcctcatgttgtggtgacctcccaccccaaaattacagttgtttctacttcataatggtagcttggctactgtgatgaattctaatataaatatcagatagttcgcaggcagatcagggtcctgagctacaggttgagatctactgccatagaccattgagtattaacagagtctaaggaagagtcctctctgtacatttagtcacatttcagaccagcaaactctcagctcttctgtggcaatcctggtcagtcctgtctggattcatctctgtacccatgtgggtagctccacctttgccattgccaacaaaatgcctgacttggtggatgcaggtggaacatgctgaggctgccctatcatggagatgaagctgtctctatagccccatatgtcctccctctgttttggactttactggatcactatagagccctgcttttagttttctttgtaaacaacctatagagatgacaggtaggatccgccacctgtgagcagcagcagtcagctcaatgtcttaacgagacttggaccaggccgtggatttgaagcctttcctttaatctgatttctggtagtagcttcagaggagagctgatagaagagtgctttatgtatccaaagggaaaaagatgattgtcagtattcaacttcagagaaagactgcagcatattaactcagaaaagactaaaatctccgaaagacattctctaagatagagctagctgctcaggatttaaaagtggaggctgacatcaacagatcctatgtctaatggaatggactggagaattacgttcagctctaactgagccagagggaggtcagttcttcccttaggtggctggctaagaggagtttgaatggaggtattttatttagtctcttc

SEQ ID NO: 25308 - DNA, 1151 bp, Mus musculus
agaaaaacacaggtacatgaaaactcatgcatgcatacactttattcttctagtactgagtgctattgaaaatgagcaatgctttaaagtatgaatttaaaaacccacaatcccatctttggacattatagacccattgaaataatcccttgccaaggtccaaggggctgctgtgggaaaggcttttttagaagatctttaggttaccaggggttgacgtagttgctgtgcactagcaccaggtgtatgcaggccagggcgataatgtaataaatatgctcccaccttattgtgtctatttctgttacatagtaggtcttgagctagaatgttcaagcagaaagtgcaactctgagctaaagtaatagcatttctggatttaaaaggagtcagtgtctgattgggagagagcattcagagctcctgatgggcataactcttggcatcctaatgatgtctcttcagagcacattcctgactcattcattaaagaacttgatgttgtccctggtcctctccaggttcaggataagttccgcctggacctgtcagatgaggaggctgtgcactacatgcagagtctgatcgacgagagcgtccacgcactgttcgccgccgtggtggagcagatccataagtttgcccaggtacgtcccaaaggcttagggaactttgggtggcatttggtctttaaaaacttctctggtgaggccagcttaggctaaagggccaaacaccagctaatgtctgtccaggagagaaaatcagctcaggtaaggactaacctagacatgtgttaccattcatgccatttctataaataaataagtagaaaacaaaatatacaccaatttttgaacacaccattaaatatccgaagtaataaacatttccacaaaacctctttgtgaatttattatttccttctaaaaatacctactggactttactccagccgaggtcatgagtgggaactgagggagctggtctgttgaatcctggctgttcctcgtgtgctaagtagtagagatttttctaatgtttatatttcgtttttaattgtgtgatttagcatagtattccctttggggggggccatatttttgtttgtgttctgtgcttttggagtttccctgtgtatatattgatga

SEQ ID NO: 25309 - DNA, 2298 bp, Mus musculus
cctgtctttcatttctcaaagaacttatctgagagggaacaaaatgaaagttctggggatttgtgcctcttgctcaccataaataatcactgcaatctttcttttttctttcctttttttgtatgtgtgcgtgtgtgtgtgtgtgtgtgtgtgtgtgtgtgtgtgtgtatgtaaagttttattctccaaataagctaccctgaagataaaaatgagacattcttggtactctttatttaaacttgcttggataagtactgaattaaagtacaaacctcataggaaatttgcccttatgtgttacgaaggaggaggaggagacactatatttcaacaaatgaaacttgttaatcagcttaataaaatgaagttgatgtgttcccatggtggattagactctgtaataaagtgatgtatagttcactggtcactcatgcagcagttagcattttatttcttcatggctatgctcaagtttacaaacactgaagtgcagtgcctgcaggtgttgcccaacctagaatgcatgcaaactaacactgatgttacatgttaaatgttgcagagggtgtttggactgtgactgatcagagtggaagcttaatatggtcgtggaaaagcatgaagtaaggtgtcagtagcagctgtccctaccagtctgtgtctttggagtaatgctgtcaactcttcagttcctcaaaagggaaaataaatgctgttgatcacattctgtattttatggttaatctcttaacgtgtttttctctgtgtaaaaatggggttaacattttttactgacttttagctgctaaatttttaggtgtttatagtcaccttcctcagaatttcattttgtaagtcaaggtagtttcagagaagaaaccagaaaattttggtttcagaaaatgtttagaacagtctaaatggaatcaaatatttactgggtaaattttgtggaattttccatgtgcctgaagattagatattcaaggattatttattgacagataccatgaatttagtaatataaatttattgcatctgaagtcaaaatgctgctgctgaactaaatacatgattagtctcatttcctgtttccttgcagaaatccacgcaaattaccttaaaataaagatggagagagtttttttttctaactgcttttttttttaaatttgttaaaatgtaacctttgaaagtcaaacacattttagttggccagtgtttctcagtgaattgataccttttacactcagtatgacaaatagccccgtagatgtgattctgttaagtagaatgcaacaaagcactcactcgctgattgtgcaaaaaaacgctacagtgcttttattcgagaatctcataatctgagaagcagaagacgctgccttgacagctgtactgttgttggtcgaggtcatggaggatgtgtgctgtctatgtgggtgtggatgctgtagaacagaaaagacatttccagctcctgcaaaaactacctatgtggagagccgtgaacaatcgccattacaagatggcgctggcttctgcagtgcctaactagtaaacaagcaatgtgcacgggtgctggagtaaattcgtgccaagtcactgcccatctcggggtgtagcagtggggtgatgagtgagcagctaatcaggagctgacgcgtcacacggaggggtatttaagcagctccattttccgggttcagggtcttcctgagaagtaagcaataaaaagctttgccgtagaaggacccggttgtccgagtgtgttttgctggcgagatgttacaaggacacacctaggttaagtgacttagaaaacttatttaagggttcacatcacactgaagttagagtactacttactgctggcatttctgcgttctcttcaagtatttggcataatacatatcacttccctgcccctgaataggtaccatcttatttttattaatagagtactagtttgtatagcagagtaacaataatctgtggtttgactcttgtgtcttgttattttatttatttctaaaatttattaaaggtttattttctttattttttaaaattttgtcacagtaccattttaaatgtcttaggtaataagttgtaatgtaaaaggtttgataaaatgttgaattcaagccaatatatatgtttctcttattgatactagaggactactcatggtagggataaaaggtaatttttttttctagatagaaatgaagatcaagagaaacatatatgtaaaattgaacatttgccaccacctatttaaaaaaaattccc

SEQ ID NO: 25310 - DNA, 1158 bp, Mus musculus
caccacatgtatggctaatgctttgtggtggtcagaagagggcattggcttccctgggacccacaacattgtgggtggttgtgagctagctaccacgtgggtcctgagaactgaacctttgcaagagtaggcagtgttggtaactgctgagccatttctccagcccctctgtttttcattggcacacaaagtagtaggattcttaatggctgactccacactcagtgcgtgtgtctctgaatgggtgagctgcaccacagcacatggagatcagagggcaacctcagtgtctgtcctaaccttctactttgttgggcacaagggctcttatttttttctcagcatatagaagctagcagtgatcttccaggcatcctcctgcctctgcctcccatctctgtaggagctctggattccagtcagtcaggcttcatcttctgctttgatgtggattctgaggattcaaatttggcttctcatgcttgcacaggaagtgcttttaccctgatagatctgcctagccttgcctgggctgtgggcccttcctttactcttttcccgtcctccttcctccccgtcctcttccgtcctgactagtttctctccatgataagtcacatgtgttccattgcccctcctcactctagtttcaaggcctatgctcatacacacacatgcatgcatactacatacatactacatacatacatacatacatacatacatacatacatacatacataaaaatgaaaaacaaggttttgcaattgagagtttacctgttggttgagtctagattgcctgcctcacttaataatttccagctccatgaggtgtcttgcaaattcattgttattactaaataaaactccacgtgtgtgtgcaccacatttttgttgcccatttttctgttaatggcatctaagctgactcttgcctccttactgctgcaagtagaacaataataaacgtgggtataccagtatctctgtggtaggatgggggtcttgggaatatgccagtgggggtggagggtgcagtacctgagtatcacggtaattgtacattttatctctcttttttggtttttcgagacagggtttctctgtgtatcactggctgtcctggaactcactttgtagaccaggctggcctcga

SEQ ID NO: 25311 - DNA, 1146 bp, Mus musculus
tccagtgtagggaagccctgtgccatagagtacagtggggtgtgagtgcccctgcttccagagccagggtgacgccatcagcactggaaaagtaagctgcaaggcaggcttgactgacgggagcaagggtcagaggggcgttaatctctggctttgtttattatgaagactttgtaaagttctttttaaaagctcagttcagcccgtggtgacacaaccttaataaaaacaaaagacaggcccagagagatggctcttgctgaacttgctctttacttttttgagaaagtagaaatggttgagagaatgtcctgctgggtgtggtggcacatgcatgctacctatgatagcagggaatcatgagtagggagggcaagcctggacagagcattcgcaagagaccaaggccagagagatgtctgggtgggtaaagaacacttgctgtagccatctgacccccccaagaaccctggaaccgttgtaaattccgaatcctgtggcatgcgtctgtgaattctgaattcctatagtagagggtggaggcaggaggattgcctaaaaactcacaagcctggagtgtgggacaaagtaacacaagcaaaagtccctgccccacccacaagctgggaggtgagaactgacttaaaggttgtcttgggggctggagagatggcttagtggttaagagcagctcttccagaggccacaggtttaattcccagcacccacatggcagctcaaggctgtctgtaactccaatttcaggggatctcacacccgtgcacttgcacatttttttaaaaagttgttttctggtcttcacacgcatgccatggcacgcatatacgcatgctcagacataaatctgtacagaaaagtaaaggagagagttttcacagctgcagctagtaatgttgcctgttgttgggggctgggaattgccacacaaatcatacaccataagagtggctgtccaggaccacaagaaggaactacttaattgtggcaccagtctgtcctcagggcaggctttttatatgaaatccaggttcagagattggaaggcaagtattgaagtggtagaacactcttggctaaggagacacagtgttctcagtcagtctgtaagctgggtcctgagggagg

SEQ ID NO: 25312 - DNA, 1396 bp, Mus musculus
ctaccgcagcaaacagtcctgtaaaagtgttcatctgtgtgacatcaggtaaccgtgtgtctttttctgtctcagggaaacatgcagcggtgtaaactagtgatggaccaaatcagtgaggccagagactctatgcttaaggttctggatcacaaggaccgggtgctgaagctgctcaacaagaacgggacggtcaagaaggtgtcaaagttgaagcggaaggagaaggtgtaggccggaagaatcaggactcggaaacagaatttatgaagaatgatgctgcgggggtcgggggggagggggagagggctttgctactttgacaatggagcattgaattacaggacacttttcttcattcacttgaggaagcagatctggtggcacagaaggatcagaactggactgacgtgccgagtcctccttcctccagacgcacacctattgcacctcagttttcagggactccagacacttggtgacacagatggccggctgaggtttcagcctttcagcccatagactgtatttatctggtggattcctgtagggcctgagctgagcctggactgaaagtatccacttggacaatctatcctctctagactaaacataaaacctcttcttaccccagtcacttctcctgtttgactgtccagtgcccaagttggccttctacagtggtgccacagcacccagagaactgccacatctcacgcaaaaggatccagcgatcagttcttgtcattttcaaaagaaccatttccaagtgacactgttacactgtctgccctgcctgtgtcagagctggattcttgtggaggttgagagcagacaacactaactgctctgggatcctgttctagaggacatttcagttatctgtccttccctaccgtgtgatgctgttagtcatatgtaccacgcatctccaaacatcaataaaggactagaagaggtttttgtagatgagcagtttgcctctttctaaccagcacctctcaagtattcactctgctgcactcccagagttcaggctacttggcagaagtggtggtccacattgagttccactcatcccaggaatctgatgatgtttttagtggtaaagactgttggttcttacttgttttaagtaagcctgatataatgccagacacaccactaatcccagcactggggaggccagggcaggcatatctctatttgagactagcctggtctacagagtaagttccagaacagccaggggcacacagagaaactgtgtctcaaacaacaatgatgacagtgacggtggtggtggtggtggtggtggtggtggtggtggtggtggtggtgggtggtgggtggtggtggtggtggtggtggtggtggtggtggtggtggtggtgat

SEQ ID NO: 25313 - DNA, 1112 bp, Mus musculus
aaatgctcaagttcctcctgccttgtcaaggagacctggaaatcagcaaggaaaattatttgccccaaaagacatgggctctattggtgtcagtcctgacttgagcataggcattcacaagttgaagtacagtcttggtcacctcatgggaacatgtggcagatagctctcaggaaaaagcaattgtggattgtccacttgggggctttgcatagggaggtcaagctctgaattagaactgagctgccttccatacgttgaccaaagcagtgataagggtggccagttagtggtagtggaaagggaccgtttcctgccctgggtttcctttagctataggctgcaaggtccccactgctctcagagagccagctaaactgctggcttggtttggaatttgtttcatccctagctgtgagtgccttttggtctggaaagttggcttgtctcatcatacccacagctaggacatatactctgtaattatgaattgtccttgttttcctgagctaaaagcgaatgtctttgatcattagagtttgttagtgttgggttgtttccactgtgaggttcttaaaatgtttttgcttcctaatgttaaaataactcatgttagaaaccctgtacacatgaaaaagggtttgtagttgagacattacgtatattttactgtttataataaatcatctatacaaaagtcttgggtgttaattttaatattttgagcaaaatctgttttccatgctatgttaacatctacaatttcactaatagtgttactttccattgatttctgaagcctagaaaactgtttttgtgtgttttttttgttttgttttgttttgtttgtttccccgaagagattgtatggccttcactgcaaagacttcagaccaattacttgtattacacttggttgcctcgtggctatataacttctgagtacacgtcatcaagagtcctgaatgaagtattgtagagaataaatcataatggacaaaaactgtcttctgcctctgtgtgaccacctgacttgagttactggaaacagattttccattattttgtttgatgtcctcataagagatttgtctgcctctgcctcacaactg

SEQ ID NO: 25314 - DNA, 1497 bp, Mus musculus
tgtcaagggctgggattacaggtgtaaatggtcatgctggcttaagaatagtttgagttgctgggcagtggtggcgcacgcctttaatcccagcactcgggaggcagaggcaggcggatttctgagtttgaggccagcctggtctacagagtgagttccaggacagccagccaggctacacagagaaaccctgtctcgaaaaaaacaaaacaaaacaaaattaaatttacatcatgtgtgactgttgaagcttttaaaaatcttttttctatttacaactttttagtgcttatataaaggaatgtcaaaaaccattcagtttaaacttcgaggcagtagagctaagcgagctgctcggagatgagcctcctttgacagactggggaaacctccagcggccaagtcacttacatttcttggttttcttacagcctggaagggcgttttgaagatgaggagctgcagcagattctcgatgacatccagacgaagcgcagcttccagtactgatccgcagacgtcactctgctccttgagttacagcaccacggtctgaagcctggggaggcctcatgcaggaacattgcttcagaagacgctggagcttctttcgtagtttttgcttcactgcgagagagtgtctctccagttctcaaagtcataacagtcctcctgcctcagcctcgcaggtgctgggattacaggtgtgagccaacactttcagcttggcttctggagaggaaagaaaggctggctattgatgctgtaggtgctatcttcacagtgactgttagaccataactaccatctgcgctccttgcagccttttaaggctgctgtggtcaggcaggctgccatcctgaactgctgaggtagaatgatgttcaaacattcgttgactacttcgtaccgtggtttttttggaccccatgttactatttttttgttcttgacacttcagattttaatgtcaattattttgtagtttttgaagctaaaatgatatataaaaaacttgcataggagaggagtgttttcacttggttgtaaaggggagaaataaaccagaacactgtttttttttaaaagaattgtatttatttgttaatggggagagggtacatgatccatggcacatgtgtggggggcaggagtcagttctgtccaaagtcttgtacatactagaaaagtgctgtaccattgagcaacactctagcccagaagttgcttttgtttgtttgtgtgttgtacatatgtatgtgcaagtgtgtgcatctatgtaaggagactagcagaggacattgggtgtatacccatatttctgtcctttgaaatgggctctgtctcactgaacctatatctaggctggatgaccaaaagccccaacaatcctgtcttcactttctctttttgcttgtaccttggggttcaaggcatgtacagtgggaacacagcagtcttttcactaacggtagtgctaatggacagactcaggtc

SEQ ID NO: 25315 - DNA, 1144 bp, Mus musculus
tttatatgacttcccaatgtttgggaattagctgtattttatttatccttagtgcaaatattatagtaaaaccatttgtacgtctaagtcctttcggttttttagtcactgagaatgtagtattttcaagtgtttagtttaaatctgtgctactttacaaacagcactttctgccccatgcctttgattcccgaatgcctcagaaataacctcatgtgaaaggaaaattgagggctggagaataggtaccagagagaaaaatagtcagggcgttaagattcagagatttcccttcatgttgaagagtcagcagttagttgtcttggtagaattaaaaaattcttaccactattaagatattgtagcattgcagatacggtagtacacaccctttaatctagaagaggcaggcagatcttctggtctacatagttgcaggccagccagcactgtaatgaaaccctgtcttagaataaagcaaacaaacaaaagtaaacttaaagaaatttacaaacacatttcaaggcagtgtcactgaattgaatgtattttcacattagcttgggccctctgtacagttgttcagcactgtagcactagtatactactgtatgtagctcagcactagtataggggtcttgttggtgcctgtcaaattgagggggcatatgcattgtgcaggtcttgatactatgcaactccagtgagggagggtctttgagaacttagtctgagttattgtatcggtgagtgagtaccatggcccagaagatttaaatgacacattcagaataaaataagtccagcgccgtaactagaatcttaaccacctgacttatagcctggtagtacacttaggttagatttttcttcactattcttagaaatcttttgatgttaaatagacataggttaatgtttcctaacctttgaaaaatccttaaggttaaagaaattttttatttaaaataatcccaaggtattgaaatgattaattttacaatgtcctgaactatgataatagaagtctcatataagaccttctcacagtttgtattaaaagaaaatcttttgtatgttaatatttcatcttatgtaccaatgaagaactattcatctttttttattagatattttctttatt

SEQ ID NO: 25316 - DNA, 1166 bp, Mus musculus
gaactcgcgggggccatcttcctctgccttctgagctctgggattaaatgtgtgccaccgtgctggttttttaaagtgttttggaaattagagtattgatcctgtttgtttgtttgcttgtttgtttgttttttaaaccataggttttttttaaaagctaattttatagttgactgtatattttcttccttttctttggagcagagatggctaccattttaattagtattcccttctacttctgtaggacttcctggttttgtttctgtctttttttatccaaagtgctgagaaccaaacccaatgctttacattgtgcatagtaaacactctcccactgaaactcaccgtaggcattctttatttttttgtttaatatgttgagcatgcattttgaatagattagattcaaagtatctatcttttaggctttatctttttaggtatgggtgtttggcctttatgtatgtttgtctgtgcactgtgtgtgtacctggtgcctgtggaagtaagaagagggtatcgggtcccctgtaactaaagatggtcgtgaactgtcatacaagtgcctggaatcaaacacaggccctctggaagagcagccaacactcttaactggtgagccatctttccagtcctaaatacatatttttgacaggatccatgctgtttatgcagtatgtttcttttttgttacagaagctggttgtttttactatttctttttaatttttagtttttatatttcttcctctgagtgtgattaatagttaacaaaaataacattgatttgcaaagtaggggattttgcacattaaagatgtctttcaggattttactgaatggcaaacacttaattttcttttgtgtggctctacagtcaattcgcagcaatagcagtacccatagcacctttctgtgaaagactacagatgacagttccctggggatgcagcccagttgacaaaatgctagtgtagtgtccaggaagttcatgctgggaaggagaaagatgagaatttcaacatcatccttggttacatagagagtagtagggttagcctttgctttgtaaccctgactgtggagaagaagggagtgagtctttcttcattttcttctgagagctagctaactagccagtttttgagtagttaaggcaaaca

SEQ ID NO: 25317 - DNA, 1101 bp, Mus musculus
gtaggcatggtgctggagcagtagctgaaagctacatcttaatcactgattggatggtgtgtgtgtgtgtgtgtgtgtgtgtgtgtgtgtgtgtgtgtgtgtgtgtgtgtgtgtgtatttgtggtagtgggtttgagagagcttggcctgggctttgaaaacctcaaagccctccaccaatgatctacctcctaatgaggccacatcttctgattcttcccaaaacagttccttcaactggggaccaagttttcacacttatgagcctatggggcccatttccattcaaaccaccacacaggtgattgtgagctgccttgtaggtgtttttcttttctttttctttaattaattaaaaaaatatttattcatttattttttgagacagggtttctctttgtagccatggctgtcctggaactcactctgtagaccaggctgcccttgaattcagaaatccccctgccactgcctcccaagctgctgccccgctctaaattttctttctgtctgtctgtctgtctgtctgtctgtctgtctgtctgtctgtctgtctgtaggtgtttttcaaaagaccacccagtagctgactccagtgtaatcacactagggtctattacaagctcaagcctgtggttagtcatggctgacccagatacagcagtatgatttggtgaagcagccctaaaccctcagcgggacaaggttttataggaaatgggagcaactgagggggtgtctagcccagcaagcatctaatagaatgactattgtaagtctacaggtgggtgctctgaagcaaatccatgaataatcacaaaggtctgaaagtacatctgaaacaatcagacttttcttgattagctgttgctaggaggtagctagggagtaactttggggtatgggccaaggacaagttgtggggtccttcttggtacttgagtgtagcttgggttcagctgcaggtcaaggtcttaggctttttttttttaaagatgtagttggggcctgagatggattaagtttggcctctcaaatgctagaccatgtaagatcgtctggaagagcagcatgtattgcacttttaacatttgagctctc

SEQ ID NO: 25318 - DNA, 1207 bp, Mus musculus
acttgaaaggcagagacaggcagatctcttgagttcaaggacagcctagtctacagagtgagttttaggacagccagtgtcatacaaagaaaccgtgtctcaaaaaactatgactaaaacaaagaataataaatatttatgtgtaggttcctggatgcatgcatgttcatttgtgtggtatgtccctgttgtaagggcacatgcttatggaggcctgaggccacgtcaggagcctttctaggttgctctttctactccatcattgaggtagggtctcagttgaatccagagcttatctgttctgctctgaccaaccagccagtgtttgtaagtccccatctctgccttctgagcaggtgggccactacattgtcttgacattgatgtgggttctggggatgatctacactctgctcatgttttgtagccgttagtttaaccactgagcaatctcctaagctcttatctctttgatctacttcaaacattattcagctgtggccaatacttctggctttgaatcctgcctttgccaggagggcaggcttctccgctgtgtctcctttgccaggagggaaggcttctccgctgtgtctccgctgtgtctccgctgtgtctccgctgtgtctccgctgtgtctaaattatggttaatgtactttgctcactgtgttctgagcatcacaggtatgaacagaaagcactttactcagttagtgcaggatagccccaatacataagggaagatactgaaaggtatagcaggagtgtgggaaagaatgtacattttagctgatttaagaggaggctggaagtgattaggagctagtaaaagatttgtttaaggggaaagattgagttgagagttaggatggggtgtgattatactgttttcagcagggatttttcacatacagatgtatcattacatgtacataagtaactatgtaagccatatgcatataaacatccaacaccacttaaccttttctggggggagacaatatggctggccagagacctgcctgcctttgtctcaagtgctgggactgaagagatcttcgccctcatgtcagaattatgggcttacttaaggaaatttctctcagatttcccatctctggggaaaaaaagagtttatttttactgtttgcttgtacccactagcttgtgtgtgtgtgtgcatgtttgtatgtttgtgtctgtgt

SEQ ID NO: 25319 - DNA, 1189 bp, Mus musculus
gttgttcaaaacagggttactctgtgtaacaaccctggctcttttggaactctagctttgtagaccaggctggctttgaactaacagagatctgcctgcctgtcccaagcttgtagaatcaataaattagagaattaaaagaatccattcttgttgggcagtggtggtgcacgtaagtgttctaccatgtaaaccattttaaatagctgagtgtgagtagcagctactgtattagaccatataggttaagttcttacgtatttgtttttagaggaaattccacagaggcttataaacagtatatatttaaatttttgcagttgcacctctggtctccctgcataccttccatgtccagttataacccgaataaaatggataaataatattacttcctagtcatcctagactcagaaacctcatgcctgacttcttccaaggtctgtcatcctctgaagtgcttactgtgtctgtcacattctacgtgcaaactcttgttggtcccctgtagggtcacagttcaccactgatagccgtataaaaacagttatgtgtgtgcaggccagaggataatttgtgggacttggctcctgtcttccagcatgtgaggtctgaggacagagctctgggtgtgaggcttgtacctgctgcacacctgtgggagcccttgagtgtcttaagggcaggcttattattgtccagtgttttcaccttccccaaaagagttttaatgccacctttacaagtgctttccaatattaagtagttgttattcattaccaactgtttttatactaagtagaatacacctttctttctttcaccctgaccctctctctctcattcctaaactgttttttaatgatcctcctgcctcatcctctcaagtcctgggataacaggtatgagccaccatgcacagtttcttcttatattaacatcataccaagaaacttgcgcacaaaatttaccctgcattatttatttgtagaactccaacatcacactaaaggaaacataaatagaatacctttaacttgtttccactataccaatataagtttcattttttttcttatttgttgtttgtttgtttattttgacctctctacatagctctggctgtcccaaaatgtaggccaagctggtctcgaactcacagagctcctctacctgcctctgcctcctg

SEQ ID NO: 25320 - DNA, 1150 bp, Mus musculus
tagaggacaagttgtgggaattgtttctttccaccatgggggtcccagggatggaacatggttaggcttagtgccaagggtttttacccactgctccattttgctggtcccttctttttcttaagattcaaagtataactgaagagctttctttttcctcaagcctcaattataatgtgtgcttgttgttggaagataagagaaacaatggcatgtacaggaggaagcgtcacctgtcagcacccgcgatgtctgcctgtcttccacctccttgtgcacatgtgacttagggcattcatgtgtgtctttaacagtgcccgtggtacagattggtttatacaagagataaagttatatattgtggacactgtagtcaccttgttgactcctctatgggattatacgactttgaatactgggctgtaaggcagttattttggaatatatttgaaccctatttaggaacatttaaaaacaaaaggagaatctttttgaatattatttatgatacttgattttgagatctcaagatcttggaacatccctcccgcccttcctctggtctgagatgacctaaaacccgtgtgtcatataaggcatacacatcctttgccttctgaatgagtgtagatcacttctggtgtcttgggaccatctcttccttctttctcacttcctttttgcctttgttcattcctccttttcccttctcacatgaaatttctaagagctggttttgcttcaggtgaaggaggacgccgtttgagaagtcctcacttcaccaacctagttcatttaccccataagatactctaccatcatcaatacccggccttcacaaaaccataaacagtgctttgttcattctgatttttcacatttgtgagttttagtaatttgtggatctgtcagacatttttatacttcagtaaacaacaacaacaataaattggactaccattactgtcttcctgtttagaaagctatagtgcctaagcttagatttaggacttttgatctgtgcagactaccctgcagaaggaacacctaagtgaacagtacaggttgggtcttagaactaaaacaatgaggaatggctttaaaagcttaaaaagccttccgcgtgcaccttccaaaaagtctgcctgaa

SEQ ID NO: 25321 - DNA, 1141 bp, Mus musculus
ctgaggcattccttattctgctccacctgccagttaccctatctgaacatgagattatacttgccacgccaggatttctgggcttgaggtttgcagggagcgtggatagcggacccatgcttgtctttacatttgttgtggggtgttttcttccaaatacacgggagctgcatttttgccagtgttcagcagtctgttggctccattgtgccagactagggacaggtctcatgtttccatgtcgtcgcagacagtgacagtcacaggcagtggttggggtgaggccttctgtgagctcggtgcgaatctcaagtaggttcccacagtagacttgagctgcagtctccacagccaccgctgtccttttagagtgtctgtccatagtgtaaccatcccctggtcacagctctgtagtcccctcagtgtctgtcctatgaggccatgcccaggaagggctagtctgttcctggcgctggctgctcacccaggctggccagcagtggcctagaactagttggcagctcttgctggtgttgtctctcgtggaggactttggacatctcgctcgcctgagtttatctatttcctctttacttcctaccccttcctttcagcactttctagcagtttccccattctctctgggtttctgatgttcttgttttcttctctgagtctactcatccttctccactcccttttttaaacaagaggcgtggaacccaggctggactccaccttgatgtagctgaaaatggctttgagctcctgctgccctggtatgtgcctctagagtgccaggattacaaggagtctcattacacagcccaagtctgttatttcttgtcctgattctttcccttcactgagttacaacttctaatctgccattcttgttgtgattaacataaggctatttattataatagagagatggagtattgaacattaatttttgttgcttaaattttgttttaccttttgattttaaatgttctttccacaattaaaaccattaaaagaacgctattgtaagaacttgatctgagctgctgtgcccagggaagacttgaaaccatgctttctttctccttttacttctccttcactagcaaattctggactcgaaaccggccaggtg

SEQ ID NO: 25322 - DNA, 1119 bp, Mus musculus
gggaaagggcaaggcctgccagggccatgtttgctgtgtttgggcttgctagagcccatcagctctgaaagccattatgtatctccttaggacctcctggtagtccactgtcatcagagagagagtgctacaccaggaatgactggggagcaggcactgggatacagaaagccatttcttgaaccatgttttgtttcaggccgagggggcccaggaccttcccagagagtgccaaaatccggccgttccagctctttggatggagaccatcacgacggataccacagagatgaaccttttggtggccctccaggcagcagctcatcctctcgaggcgcccggagtggcagtaactggggtagagggagtaacatgaactctggccctccaaggcgaggcacttcaagaggtagtgggaggggccggtaggagggccaaacagtccatggcctctctggatactatttaagacgttcttgtgggctcaccactgaagcagaaacaagcctttaccactgtagccctgaccgcttcttctggggcagctgaggtctaggagcccaggtggggtactcgagacgaaagactgatgccgactccctccccagggagttggccctgcttggtcttgtatctcctcgttgctctgactcttcccgtttgtttgtgaagataaaagctggaatccttttttaagtgtcctgagaaatggagcacctccacaaagttcagttcatgtccgattggagatttatttctatatgtacagtttgtcagagaaaaaaaaaacccttgttttgtatgaatacagaatgtgatttactgagttaacagcagcacccactgtgcagtgctggccttaaggagcccttgctttcagcgtcgctgacctgctgagggtgaccttgctactggcacttccaacagatgaaggtcatttgccaactctgtgcttttcacatcatttttacctttctgttgttacactgttcttgttatgcgataaggcatactttaaaattgctctaacatgttcaagaaggctcaaaacctcagacatgctctatgaggtcaaaaattactctgaagaaaaatttgaatcttctgggtcttcaacta

SEQ ID NO: 25323 - DNA, 1107 bp, Mus musculus
ttacaaagattaaatgagaggatatgtaggaagaactactatcaagaaagttagccacaagagctggaaagatggctcagtggttaagagtgctggctgctcttccagaggtcctcagttcaatttccaacaaccacgtggtgactcacaactatctgtaatggaatccgatgcccttttctgatgtgtctgaagacagctacagtgtactcatatacatgaaataaacctttaaaaagaaccaaaaacacaaaaagaaagttagccacagttgctcttgtcagcctccaagaccttttcatatgcttccttgtttatgagagatctagaccctaactgaagtacagattgactggaagctctaggttggttttcattcttcccatgtgccacatttaagaaagaaatactctataaatacctacaatactgcccagtattaggttatagttatttaaaggcctgggagaaaatgctattttatgaactaaattcttactattttccctttttgcagatgagtggtctcggcccatatttggtcttacctcaaactataaaggaatgacaagagaagaaagggaacagagagatctagaacaaatgccacagcgacgaagattgagcaggtatgagggaacaggtatgaatgcacaagtgtagcttaatctgatggcatctagggaagacctttctgggacagctgaatacaatatgctatcccagggctgcagtgctagagatggtagtgttctagacatttgcagaaaacaactttctcagcccagttccacaactgtaagaggaaaaaaatgttattggtttaatttctctgtattctggatatattttggaaggcagggctatcatttataagtatagtttgggtaggtcacccagaatgaaacctcctgcacagtacagttacagtgaacaatacgtgagaacagtgacaagttctcaggccagcaagatggttcagagcagaaaggcacttgctgtgcaagtctggcaacctgagtgatccgcatgacccaagtaaaggtggaaggaaaactaactccagttatcctctggccacatgcatactctcacacacatactttt

SEQ ID NO: 25324 - DNA, 1961 bp, Mus musculus
tctgctttgtacagaagagtacttactactcctgcttctatcaactgtacgtaataaaatttcattatggttttggggggttgtctcatcattgtcttagacactattctctgtgagatcaaaagccagtccgtttcagtgtgtaagtatgatatgaggaatttgtctggcctttgttcctggctcctgacaaggaatatctcaaacctttacaattcttgaactatctttgttatactcttgatttggcacatcgtagggccctaagttcgctctaagactggtcagcagaaatatgcttgacctagtcgtattgcctgtttgattaaccagccatacctttgtattgaagctatagtaaagaaaagaactctggacaagtcaggtgccttgcacacctataatcccagcattttggagactgatgttgaaataagagggtcatgagtttgaggctagcctggattacatggcaagactcttaactgctctggatactgcaactatgttgatgtgcaaagagaacaaaggcacagaagctctgcaccaccctccatactactcctgaatcttcattgacctggttggcttaatttgtatcttttctaataagatcagttataagtataaccttttattgaaagacatagtgcttttccaagttctatgagtcattcagcaggtttttaaaccaagaaattcttgggaacttgcctggaagtttatagctaccctggaattttcatggtctaaagatatcacttgcagtctatgtctgaagttgggacagtcttgtggaggaaatctgatccctagaactgtcaattcttacactaacaccgagcatttggtatcagaattgtgttgtataccactgtatatgcctataatctcagcactttggaggcagaggcaggaattttgggagctcttccaacaataactttgagttactcaaagactgttcaaataaagatggtatctcagtagagttggaaatacaacaagcatactttttatttctcttgttagagatgctttgtttgtttaaatctgaagagttaagctgtggggagaaaaagttaagaaaatacagatataattgaaaattagttacatatagcaattggacaaatagaaaaaggagaaactatttatagtttcttacttggttttgagaattcttaatcatgagagatttctatagatcaagaaagttttatcagtaactcattcattacttaagtcctcttctagtacaaactggagccttgatttaaaaaaatagattattattggccacaatggcctttggacaattgaaggaatgtggacttcatggactagaacactccataagaacctctcaagcctggtgtggtgacacacacctttaatctcagcatttgggagggagaagaaggctgacctctgagttcatgaccagcctggcctacagagtgagttccaggacagccagggctacacagagaaaccctgtcttttaaaaagagagagagaaaaaagaaaagagcctcataaagcctcattaaagtacactcagcatgcaagagcaaatggagtgtgaagcagaaacctacagagccaacagttacagactaggtggtggcaaaaactacctctggctttgtttaatttcattaactaaaaacaataaaagcatctaatgaattcaaaacagttctgacatgtaaagcaagtttttaagagttattttggtgtcttgggatgagcttcacgtaacaccatgttaatgggagtaaatataaccagcaggtgataagcccttgattgaaggagatggttctgcactacttgaagggaaagatgctaatttctttataaattacctttgctgtgtggattggggggggggggtccccaagcttgacccattcattgccttcatagtttccatttactatagtttctagaacact

SEQ ID NO: 25325 - DNA, 1203 bp, Mus musculus
cacctgctttcctcctcagtgagagagctcagccttcaaggtgagtttgttgatgaactcaaagtagttgtaagtatgttgaaaaccctagaggtttctaaaaagacccagcctttcacatgtatttggtgaaggcctgctgtgccccagacatgaccatgtagtgtaatcagtgagtgcatacggagattatgattgtcaggcccttcaaggagagacgtgaaattgaatcaggtgttccaagaattccaatttctgaaactcagtggtattaaagctgaaaggtgatcattagctagagcaagacaggaaggaagcagcagttgccacttgggcagtgccagtaccctgcagctaagacctttctcttgtcaggccatctgcatgttagtccaggggtgccaaagtgacctttgagatcaagctgtgacctggcatgagtcaggtgcctgtttctcccacatctgtctggttcaggtgcaagctgctctgggccagtctccttgcttatgtggatgctgttcaaactcaccttgggctttattttgtttggcttgagatgggtattatcatgtaactcacccacttgcctctctgcgcctctgcctctgcctccgcctctcatgggctgggattaaaggtgttcaccttgctcccccagctccacatccatctttggagcatcttggccacgcccagtttacatacactcagcacgtgctcatggctttggtgctgagtcaagccagggtttcctggatctcccattggctcaaagccttgtatcaagtcttaggagattttaagagactccccaccctatcttttttaattatctgtttattttatatgtatgggtgtttgcctgcacgtgtgccactgtgtacacgcaggccagaagagtgcttggggtccttggaactggagttgcaggtggtcctgagccactagaattgaaaccacagttctctggaagggcagccagtgctcttcactgctgagccacctctccagctccagtccaccctaataactttttataaaaaaaaaaaaaaggaaagatgtatttattttatgtatatgagtacagtgttgcaatcttcagacacaccagaaaaggacattggatcccattacagatgtttgtgagccaccatatgatggttgggaattgaactcaggacctctggaagaacagtcagt

SEQ ID NO: 25326 - DNA, 1198 bp, Mus musculus
gtggcaagggactgattagctgcgttggtgtgtctagtgtgtctccgtgggctgcagggtgaacagtagtgcagagctctggggagtgtcgggattggtagaggaggggctagaggctccccacacgcttctatatccatgagtctcaacaaccacaacagttctattttttataacaataaaagtggagaataaaagctgactctccacctcatcctattcctggaggtagtctcatttaatatattgtgcagtgtattccttgatgacctaatggtgcagtctctttgttctaattgaagtttaaattcctgacagtgcaaaactttaagaacttttactggtatcaaaatttttactgcttaatttatcttggcattcattgtgctataatgtgaaaaaataatgcatgtaaagaaagtctaatgccatttacataaatattgcttggttataaagaaatatggcttcttaagtaatagtaagaaataactagattcattttacaataatttagatgaagctgctcttaaccttctgaaagaattgggcccatctgggattgaaacagagctgcgaaacctgtcccctgatgacggtgggtcggtagaagtcatgcggagctttttaagcatgattggaatgatgttggacagaaagcgtgatttcgagttggcccaggcataccttgcattgtttttgaaggtgagtgagatacgatactttcctttatatgtggcagtgttatcaaacaagtctgcaaagatgggcatgttttgcatctacagtattgaataagccaatgaatacttggaatatggctaactatagctgaacaatagctgcctggcctggtgtctaccctgacatggctggggattttggactttctagtctttatttttgttactactcagtggcataattttgactttatcccaatttgtcatttctttgttacctgtgctgaaccttaactttttaaatttacattttcttttttaagttttctgtgatcataagggaaagttgggttctttgtttgttcatttttgtctgctgctgaaatcaaaatattcacccccgccagtttcaagtaacttcaagtacaacttgcgcttttgagtaacaaaaccaagatgttctgtataggtgcactgcatggtgtgatgtgatgaaggcgtggctaacactagct

SEQ ID NO: 25327 - DNA, 3851 bp, Mus musculus
atgtgaggtgactccgtgtccacacacattttgtgtttgtgtgaacacgcagcgctcagtggtgcatgccatttccgtgtgggttgctgtttctgctcctcactggtcttacgtgtttccctttccttcgtttggttggttggtgggaaggtgggtgggtttgtgtttccgtgttggcagatctggagtaacgtgagctctggcaataatggcaggcaggcaggtcacacagaggccttcttcacaagtctgtggtgggtcagctgcatgaaggaagggatcaaaggcaggaaggtctgctcttcagtttacattagtttgtttctgtaaaaatgtaaagtcagttctttacatccattttgacagtcaaaaaagggagactgaattttttctcttctaaaatttttttcttgcaactggtgatgaagatacacacaggacagaggcgcagggtcagtgttctggtgggtgagctcatagctcttggcttgaaatatcacttccaggacctgccagacgcagttccccccagagggttgtgttctcagtttgttcattgctaagttcctgtctgactttattgtaacttctgaaaggctagatttcctctctgctcttctcttcagcaatagggaaagaaaatggacttgagagtgtccggtgaaggctgtgaattgttaactatccagtgtgtcttctgtgactttatctgtttttattagtgagagcagaaggtctcgtgtatcccactagtctgcccatgatcataaagtgacaggagcctgggtaaagacttggtaccaacattggatgctgtcaaggctctccctggcctgctccgaacgggctctctgcggatctcacacttgcccagtgtctcttggctagacctccagtgactgatgaggtcattcactgctgagcagggacgcactgcaagtaaaacaaccctcgtggaaatgttttcattgccattgtgagtttcacagtaggttcagaagtgacatgtgagctgtctgaaacctatgttcattaatgtagagttcacataatctacagtttacctgtggtaaaagtgtgagtgttctttaaaaaaagaaaggaaaataaaaaacaaaacatttgaagagttgtgcagccctcaccacagcacagtttagaccgtttttgtcacccaaaaagatcctttgtttctgtgtacactgtgtattgtcacctaagcagcagttacccaagttgccaggatagggagaggatgaaaagggcgacaccagagcttgctaggttttacttctgagagtagagtggtgtgtgggggtggggcgtgtcggggtggggcgtgcatgcaggtgcatgtgggtgtggacgtgcacgtgtgcacatttaagctcaggaacatttacatgttgtaagtgtgttatctccattattgtaacataaaaacgatgtgaagtgaggatgatacttgcatacttagagcggctgcttctggagcagacctattgcaggaaaaccctacaagccatacgtgtaactcagagtatcccagcagaggctgggaggtgatggtagtgaaagagcgttctctgctcttgcaaaagtacctggggctgggggaagggcttatagcagtccatagctccagttctgaaggatcttgtgccctctggcctctgcagatgcaggcatgtgcacagtgcttatacacacatccaaaaaaacccactcattcatagaaagaaaaaatacacagctgaaactaattgtagcaatgttttctttgactctatatccaaagtatttcagtacacagctgatgtaaaagatattgcgatagctcactgtgtctattaactcttggaaataaggtgggtattctgtgctgggactcgccatatggcaagcactcattgtccacaggaggcctgcagctgttatcatgactcacacaagcctacagtagctttcatttgccttgctgtaagatgaagtggacaattcctgaattgttctcttcaccagaatcttttatagctgagcactttcagtgcttgctgcacacggtgtctgctttagaaatgtgcataaataaattactgatttccagtaaatttaaaaattattgcctcaaaattattttcactaaaagtaacttttgataggaccgtgaaggagaaacagaataaccactcacattgccgtgcagatgaacatttcctgtagcttacagcttgctgaggaaatgtgtgtactctggaaatacgtgccctagtgtcgtgttcaggacacactgctcttttaagatgaaattagttttatataagtgacattttggtaggaaatactgggttttgcttaaaaaaaaattcttgcctactcttgaatgactaaagcaatactcagcaaaaaaataatagtagaagtattcttagatttctgtgctataaaccactggagtattatcttataaataccaggatttctttcttgttccatgaacacaatgggtgtatttgaaactggggggtttcaagtgtaaatctatatcctaggatgtttcccctttatcttcttgtcttttctacttgaggatcatttgactgatacttagtgagctaaactaatgtctcaaggttaagactgtacccgaggttctggagaagcagagacaacaccccagtctttgtcactcatctctctattaggtctgagaaatcccctttgctgtggatggcagttttgtatgtttatgagagcacagtagcccctttaggaccagatgctaaattaaatggctgttgtagctttctagaccaaaaaagagaggctaacagaaccagagaagcagatggaaatctggatttaatgaggactcctttaaaagttacatgaacacttgtccaggcccttccatccttccttcttttcctgtgataccgaggcctggtgcatgctgggactgagctacacttctggccccctcagtgagcacatgggacttgtaagagtatagagtggcaagatctgagcatagaagaagggagtcctcctcctacagtgcagggctggagttacggttttgtcgtcactttatttccagggattgtataagtactgctatgtactaaataaaaattcatctcttgcagtccaacaaatgatgtattatattaagataatttttagaaagtttatcattttatgaatctgtatatggaattagaataaaggactgctgatataaatgagatgtatatttttaaattacagtggaatgtatctgaataaagatttctagacactctttgtcactggtcattgaccttgtttgtgtaagttactttaaccttaagtactgaccaaatgcttatatatttatatttagagaatgtcatttaactacttgaactatttaacaagtataaatctggaaaataaagctaaacctatgctaatctgccaatgtttcctataatattagcaacaatactgctaaatctttatttgcaatttgcagccttacattgcaataataacatactggaggaaattaactgataaagggaagaggtttattttggcaaacatgtctgggggttctggtctggaatccagtagccttgccattggcctctggtaggagcagcatgctagagtagtagcatgtgctgaagaaagcaaacaagcaaacacaaaacaaccatgcttacctctgcatcccgaacatgaagagagggaagaagaccagactctcatgtccctttccaagtgtcccctgctgacttgtgtacctcacattaggtaccacctcatagaactactgggaccaagttttaagtatatggctcttt

SEQ ID NO: 25328 - DNA, 1116 bp, Mus musculus
cagaacaccccctgcttccaaaacacctcgtctgctttaaaggtgaccctaggcttggctgcgcgtctgcaaggcagacagggaacactgttttaggttggtgcgcttgagtctttggttactttgtaacgtctttgtaatgtagcatctcactgcctagggagacaatggcaaatgcagtagaagaattgagtctggtgtggcagtgatgtgattaactgggacactcggtatgaaagcttatcatatataatgtgaagtagaaggtcagaggattgaataacatatcagaaccactgtttataataatggttcacccaaggcaaggggaggaaacactggtaggttctctgagaattttcttatagcccctgaatctctcgtgtgtgtgtgtgtgtgtgtgtgtgtgtgtgtgtgtgtgtgtgtgtgtttggtcctccattttgtctaggctaaatgatagagaggattcacttctttaccccatgtgccttccgtggaacctttctgcctttgggggctgctgtggtttctcctttctcctcttgcagatggagagctgaggcttgcttctgttggcgatttttgtttcacaggaaaaaaggaaagaccttctgcagagccaagaattcttctattctggtcgcaatcctattcattaaagattaatttgaattaataagctaataccttagatgggctaaagccagttccccagagtgagctgcgcaccttaatagcaatcgtgtgttgcatagctgagggttagccgaagaccttatgtgagttactctgtttaccctcccccccccacacacacacacaggaatgctgggggatattcagagcctttcagttctttgtctcctattgcatgagaatggcagggagatccaggaagaaacccctgtgattctgctccagggttcaggtcctccgctgagctgaactcccctcatggatcctgaatgacaatctgagttaaattgattgctttcttcctaatacctagtagcaactgttacagggcatggagcagctaatgaagaggtagccactgccttccaagtgatgcaactcattcctaaatgtctggctgttacccacctgacagtg

SEQ ID NO: 25329 - DNA, 1126 bp, Mus musculus
ttatatgtaagtacactgtagctgtcttcagacaccccagtagagggcgtcaaatctcattacagatggttgtgagccacggtgtggttgctgggatttgaacacagggccttcggaagagcagtcagtgatcttaactgctgagccacctctccagcccccatggtttcttcggaaagtcagttatgtcaaatgatgttttgttggggcacactggtgaaagggtgttttgctaaagcagactcatgaaaagatgttttaagtgaagcagacacaggagaaaggatgttttgctgtagcagacccgtgaaggagtacatgatgtttaaaaggaacatagatatgaccccacagatggacgatgtgagctcgatattggctgtccttgcttggccttcttagtcttcactgatgacatgtattggctcgccctctgttgcattgttgagcttcacttgtggtgacttcatagaggaaaactcctcaaagaagttctctagagatcccttggcttcctgctgcttcctcagactcggcgccataaggtttcttctggatagaactgctcttgctgattcatgtgtggtgtctgccaagtggactggaccgtagctgctgattcgtgtttggtgtttgctagtggactggactgagaacagtggatattggaatctcccaaagaactatttctaaacaggcccaatttccctttgtcctaataacctttcttttctacctcctggtgggtggtggactagaggggaggctgaacccttattaaagtaggttgtgatatgtgcctacacttccctttccttctcacagtggtctgcttttctggaagggaccaaaagcttgatggaccaaactcatccaatttcagcattctggaaatcttgtcaacagtcacttgagcatccccccattaggatataagctggtgttgtgtgtaaatggagacttccaaagatcaactacagttgttttgttctgttctgaaaggcttgattatgaagccagactttaaagtgtatggctcctgtgaaggagaacatagggccagcagctacactcactgcctgagttctaactttgcctttgaccacatgttggctgggcaagttac

SEQ ID NO: 25330 - DNA, 1177 bp, Mus musculus
tccagtcagtcatctgtcaccgtgcccattgtggaccctcttaagatgaaggggaagggagaagtgagtgttacctgcagttgactttgccattcccagcatgctcaagggcttcatgtttttgtcagatccccttgggtgattctcagccctttgctctgtaagtcacccagtggagctaaaggcagcaacaaagcagggtggctgctgtcttcactgcggtccccattcatctgggcagtggagtaagcaatgccactcctgatcagttttcggctgagcttgggaatgctgcatcatggtgggggttcctacattaaactcagtgtctggtgtccattcttggtggtactggggaggggcgaaaggccgcaagataaatttggtccactttcctggagaagcagcttttcctacggtgaaaaacaacatttccaattaatctctgaccctaggcaaaagtcaacccccttcatagagcagagcattaaatcagcatctctccctttctcccctccttccccgtcctctctcttccttcttctccccctcccctctttgcctctttcttacctttcctcccatcccactcccccatcccagttgctgtggagcccaggctggtcttgatctcctgcttcagcctgtaagtgctggggttacatgtgtcccctggccctgtttatgtgaagtttccttgttaactgagacagagtctgactgggcattctgtctggccatgaacttacaggtccccttgagaatgatgagcacagtcacctttagagaagcaaaagctaggtccggattctggagagtcagctgtgtgagctcctctgcatctgattggagagccctgaagtcctgggtgtgtgtgtgtgtgtgggggggggggggggggcggagcggggctgtgggggggggcactgttgcacagtctttattactttgtattatgtaacctaggcgcctggaccactctgatgttttgtactatgaatcattttcatttagaagactttgcctcttttcctcatatcaacatctttaacactgtcaaagcatttctcctgaataaagcagcttaaaaaaaaatacaatgcttcctgctccctgcttttccctccacttgttttttctgtctttagctcggggggggggggggggcaggggggtg

SEQ ID NO: 25331 - DNA, 1109 bp, Mus musculus
aaattgatgagtgaattcaaaggcagaacgacttcagagtacagttattttggcggagtgctgtgcagataaacagtatttaaaaggggctctggttggcagtaatcattttcactgcaagcctggcctcttttggtgtcacagaagcatgccatgaggattttgatgtctgtgtgtgtaacacagatgttgtctgctggagttaaccacattatttgcagttactatacctcctcaaaaaacgtgtgcgttaggacacatctacctgcggtctttactaaactaagcacgtttatatttaccaatggtgtgatcatctcccatgtaaatgatacgtgcacattgattgaacatgtgtgctattcacaattgacttaaagaaacattgtcttacccttcctgttatggcatagagatgcaattactatatatgtatgtatatttgaatgtcgtttatttatgtgtattggtgttttccctttgtgcatatctaagaaggtgcattggatcccctggaactggggatggttgtgagctgccatgctggtgctgagacttgaactcaagtcctttggaagagcaaccagtgtgcttaactgttgagccatctctttggtaccaattaatgtatattaattaggtaaatttagcttctactttagttcacaagtgaacaattaactgtaaaatcattaatcaatagctgctattactgcagtaatttacttggtgattggctattgctaagtacagtcaaggttaatggaaggtccaagtgtctttaagggagaagaggcctggacacctctatctgaaagcagagaagaaatgcctacatattctggttttggaaatacagaaattggatgaaagggattcagggttctgtgaggcgtcaggaagagaaaaagcttaggtcagattttttccagcagcatgcctgagatttaaagtttggaaaattgacaaaaatttaactctagttgaaggcattacattaggaaatgcatctctcgtaagtactgggaggaaagtaaaaatgacggtgaagaggagctgaaaaaccaaaaacgtcacaattgtgggcaaaaatagattcccagctttac

SEQ ID NO: 25332 - DNA, 1167 bp, Mus musculus
aaaatgtcactggaatttagtcctaagagaagtacgttgtcatcatattggcagtgtactgttgtaaaaaattaccacaaacttagtaggtttgttatgtatttgtgaggattagttggttggttgaattttttgtttgtttggtttttagacagggtctttatagctcaggttacccttgaactgtgcatgtagctgaggataaccttgagcagtcactgattttctcactctactgctgagtttctggatgtatatccagttttatttggtggtgggatcaaatccagggctttatgtgtgctaggcaagcaccctcccaactgagccacagccgcagcccactgcatggtttaaaacaaaatttactattgacctttcttgggggtcagaagttgacatggttctccctgtacagtgaagaggcacttcagaggcactgcgtgtcctaaaagctggagagaagcagtcatctttgcccttctttcccctggcttcactccctttcttcatcctcactgttataatctgtctccctctgaacctgatgccttgcttctgttgtcacgccctttcctgactgaccctttgtcttattctgaggacatatgtggtaacattggttctgccagagttcagaagaatttgctgcacaggccttactaatcacctctgcaaagtcctcgtagccaaggacggccatgtggttatgggcttgggagatgacggtgcgcacagcttcctggattgccattgtgttgccacaggtgtcctaacacagctttttttccttgaagcattttaaaaattaattttgaaaatcattcttttgtgaatgagtgtttttctgtatattaactacttaggacttagtctatgatagaaactgaaagactttttgcagcaccttttatggactttccaatcaactccagcctctttatactatctaaccacatgcacagtggtgtttatatctctccctccctggtttccgtgattcctctatatgtgaggtaggtgtgtgtgtgtgtgtgtgtgcgtgtgtgtgtatgtctgtgtctatgtctgtgtgactgatgtgtgtgtgtgtgtgtgtgtgtgtgtgtgtgtgtgtgtgtgtacacacacacatatatagtattcctgttattgaacttgggagtc

SEQ ID NO: 25333 - DNA, 1247 bp, Mus musculus
attataacctgatgaaatgtaatgattgcagagaattagaatttagtagattataattgttgcaaatgttttctattccttagaagtaaaaaaaagttttaaattatttgaagaatttaattaaacaaattgcagagagagagagagagagaatatgaatgtgaatggagtatctgagagaagaaaaattattttcattcataataatcaattacctttagctgatacaggcaaatagcaatttcagtgctgtgagaatcacagtctgcactattactattacttattcacataaaccaactgtggatgtaatttttaaatagctgtcatctcttcatccagaaaagttttcttttgctttattttaatttttattgaatatagtaaataatcccattcatcacttcattagatctagttttgggtattaaagttataattttgtttctaaactcatttggcccacaggtggaaatggtgtattccttgttgtcaatgcttggtactcatgataaggacgatatgtcacgaactttgctagctatgtccagctcccaagacagctgtatatccatgcggcagtctggatgtcttcctctcctcatccagcttttacatggcaatgacaaagactctgtattgttgggaaattcccggggcagtaaagaggctcgggccagggccagtgcagcactccacaacatcattcactcacagcctgatgacaagagaggcaggcgtgaaatccgagtccttcatcttttggaacagatacgagcttactgtgaaacctgttgggagtggcaggaagcccacgaacaaggcatggaccaggacaaaaacccaagtatgttctttatagtgtgcatctcaatgcatgtttcaaaagctttcggttagagattctttttaagttagtatgctgtctttatgaatagaaggaatttgcattagctaactaatgctgctaaaaaattttaaggcttaaatctgcatttccctgaaaaatttttacaaaggaaactgttatgtatggtactgtgtaagcaggtcagatataaaggtaatctgggtgggcaggcttgccttccttccttcctcagtgcaccattgctcccaccccacccccaaagccaagtactcagttaaagaggacagccttccccagaagacaaggaccatccagtcagggatatatgagaagtcctgctagaacttcaggcaagctttcaagaagaaaaaacaaa

SEQ ID NO: 25334 - DNA, 1087 bp, Mus musculus
gaggacgacctgttacaggagtgtataagttctgccatgccaaaaaagaaaaggccttcaagactcaagagtgagagcgaaaagcagagccctagaaaagtgggtggcatattagctgaagacctgacgcttgatttgaaagatctacagaggccagattcagaacacgctttctcccccgactcagaaaattttgactggaaagctattcaggaaggcgcaaactccatagtaagtagtttgcaccaagctgctgcagccgccgcgtgcttatctagacaagcgtcatccgactcagattccattctgtcactaaagtccggcatttctctgggatcgccttttcatcttacacctgatcaagaggaaaagccattcacaagcaataaaggcccaagaattctcaaacctggagagaaaagcacattagaagcaaaaaaaatagaatctgaaaacaaaggaatcaaaggcgggaaaaaggtttataaaagcttgattacgggaaagattcgctccaattcagaaatttccagccaaatgaaacaacccctcccgacaaacatgccttcaatctcaagaggcaggacgatgattcacatcccagggcttcggaatagctcctctagtacaagccctgtctctaagaaaggcccacccctcaagactccagcctctaaaagccccagtgaagggccgggagctaccacttctcctcgaggaactaagccagcaggaaagtcagagcttagccctatcaccaggcaaacttcccaaatcagtgggtcaaataaggggtcttctagatcaggatctagagactccactccctcaagacctacacagcaaccattaagtaggccaatgcagtctccagggcgaaactcaatttcccctggtagaaatggaataagccctcctaacaaactgtctcagctgcccagaacatcatctcccagtactgcttcaactaagtcctccggttctgggaaaatgtcatatacatccccaggtagacagctgagccaacaaaatcttaccaaacaagcaagtttatccaagaatgccagcagtatccccagaagtgagt

SEQ ID NO: 25335 - DNA, 3410 bp, Mus musculus
gtttgattcttgttagaggggttttgttctggaaaccatatttgatagtacactttgtcctcactggtcattttgggaggcactcttattaggtaggaaaaaatggtaaagccaagtatatttgtacagtgtgttttacatgtatttaagtagcatccatcccattgtcctttaattatcacctgtcttaaaaataacactacagatagaaactatatgatatattgctgtcatcaatcacttttagattataaattaaacttacatcagggagaaattggtatttatgcaaaaaaaattagtccttgtgaatccatctaatgtcataattaatcatgtggctgtgaaattcacagtaatgtggttccccatgaatatgtttacccagcctgctttgctttactgcatgaatgaagctgacggttcaatttcagaagtaacaattaatgattctgtgatcacatggtgtgcagagagatagctacagtgtaacgattcacactattttgtgctcaaatctgtgtaactgtaaagcattgaatgaaactattttaactgaactagattttatcaaaagtaggtagaatttttgctatgctgtaactgttgtatattctggtatttgaggtgagttggctgctcttttattaatgagacacgaattgtgtctcaaactaaatgaacatttcagaataaattattgctgtatgtaaactattactgaaattggtatttgtttgagggtcttatttcacatttgtattaataactgtcaaaagggcctcttttaaaagctaaatgtaattttttttcttcagattctatgcattaagagtaaaatttcctcttgctgtaataaagacaattgaagaagattgttgacacttaaccattcctaaaatttatttttatgtaattagcacctctcaatgcttggtatttttccactttttttcttactccttgggggtttgattaaaacaaatgcctataatagcacaagactaggcactggacataagggcccacatagaatatctccttttccttaatagaatccatacttgaaaaccattgattcttgacagttaccagttttgtctttcaggctttccagtgcaactgtcttaccccgtcatcttctccgtattgatactgggtctgaaataaatgcctactaccactctgtatagtaaggcagatttttttttgcaatcaggcataatcagtattttctcatactcaaaaaatacaagtcagtgaaacatcagagatatgtaatgctgttatgataatatttcaagaaagattcaaaagtgggccaggtcagtaggtaaaggtgatgcctcaaagcctgaaggcccagttcacatcacaggatgcacatggcagaaggaaagaaccagccccctaaagtcatcctctgacctccactcgcctgtcttggcacatttgcatgtgtgcacacacagacttcttacgttgtccatgaggacattcagggctaacgagaaggctcagcaggtaaagcctggtgacatgaagtctgtccccagaatcctccaacctccacacacgctccataattagaaagtcacaagtttttttttaattcctacccgctaaagacaacttcatttttaatgggtccggtggttgggatgttattaagtgcccactgcccatatgaatgagaatacactgacatacttaatagccaagagtttcagttcttgtcaaatgttatgtgaagttgttttatatcagtattccatattgttctccaaggttgccataagcaatgggagatgggaatataggtcacagctggttctctttcattcctagttttccattagaattactgcacgtcagtttttataaggcacttcaagtagttttgtggaaagagatgaggttttagttagaatacaattgccttttaattcatgttttaagaaattaatgttagaagtaaaagaagagtccattccacctattggagacgaaattcccatgggcagccctgctgggaagggtctgtcttgtgttgtcccttgaagatggagttgctggattaaaccctttggctagagataatggctgtgaaagcaaaggggttgaccttagttgtgctttcagaagttcactggatgattccttaactggtagcaggccaagtactcctggattttgcttgtttcagatggcacactaagcccagtcagtgttggggcttggttactgggctggatgcttattaaaagggcaaggacctacttagctttggactgcagcaaagaaagcctaaggtagcaatttcaaacaggtgtggttggatcaccagaagtgtttgttagatcatttctgggcacacacccgcagtttgataagagttgatctggagagggctacaagaatttgcatctgtaatgtatttagggatggtgggtggtatgtgggcttctggtgtggggaccgtacttggaaaagtactgtcctaagtgtgtacagcacagctcttaataagcaaatgagttcctgatctaccaagtaaatgctccttggcatgggagacctgaatattgacttgtccagtctcctagcctatgtcgactcattgtagggaggaaactcaccatacttaggaatacgaaagtcaagatgtccactgcctctgagtgcatcactcttgtccctttgaaataactactgttaaaagagggtgtgtgtggtgggggggggggtacttaaaatacttagtttcgatgggcagtaagaggctatggaaagggaaattcaggatgagggaagattggttgtaagtgaaaggaaactaatcaatttgttagtacacagtagaagtgattaattggtgaaaaaaattatatttgataatgaactttacaaattaccagggtactaactaggtaaataaataaaagataagccctgtaggtatcaaccagcaataagtaatgttagagttttctttatagtgtaaaatgtggatcatgttaccacaaagttaattgaaagatgactttgtcactgaaaatgggagatggttgccagggtttctttgcagctaagaaaatgaaaaaattaaactgtccaaagctaaagggtttacatggtcagataattcagatatacctaacaacttttcaggagtcaaggctaaaatacagtgtatattctttctcattttctagtgagcctatctatttccctgtgtactaaccttagaaaacgactttgtaatgtggaattctatgaaccgtgacttctgtaaacccaggtcattttcctcctgttctaactctgctttttgttaggccattgatgcatctttccgactgtatgttctgtgtataatgctgttcttggtgctaaatagactttctttc

SEQ ID NO: 25336 - DNA, 1139 bp, Mus musculus
tccagagaatggaaccgtgatgttcagtttcgaggcagagtccgggtacagctcaaacaggaagatggcagcctctgtcttgtacagttcccgtcacgtaagctttttaaaatgaattcacagggttcttgggtaaggttatcttgtacaaaaggaataaataccacacagaatgttgaagcagaaggattattagttcaatacctgtgtgggctgtagaatgagttcaagaataacatgagcaactttgtaagtccttgtctcaaaatagaaaacttaagaagtctagagatgtggctcaatgctagactctacctaccatgcacaggttcctaggttcaagccccaatacagcaaaaataaatctaaggagcaatattgaatgacaaaagcagaaatattcatgctgtggttccacgagtgtaaacttaaatactaatactatatattggtaaatatatttattactgatagaaatggatttttaaatggactagaagctaacatacccacttttcagacagtacttgcctaatggcgagtggtaaagtagttagggagtggggatcggagactaatagagaacactggaggggtggatatctgctcggggtggatgtcagctcaggggacaagggtacttgatggcctttgttcaggggaaagaaagaacagactccacagttattttctgacatgtgtgtacatgtcacatatatatacacacacattatgtgcatgaacacatggttttagttcaaaaacagtgtcaaatctttacttttttatttatttttaaccttttaatgcatatattttaatttaaagctgttcactctcttccctccccccccccaacgtcttcaattttattaaaataaaacaattgcactgtcagtctaattgatatgaagttgtttgtttttagtcaaatacagatgaattggtttttatacatcggttattgccagaagcttaagagtctgactcaagaataatagatagggctggaaagtggccaggtgccagacacctgccaggcagcacacatgaagttttctagtttgttttctcttaacattttccttactgccttaaaggacccaaaatagatacacgaaaaagcttatgatttgaaa

SEQ ID NO: 25337 - DNA, 1183 bp, Mus musculus
tgttgtcgtatatgtagaaagcattttcatttaaacctaacagagtgggcagtacctcaagtgtttaaaatattttgctgtgtaggaagacatgtcactatactccaggaaatacaaaagagggttgggaatctctgtctgtaggccccgtgctctgcggggctcactctgcatgcgtctccttgtgcttacagttaggaaacctttgtggttgtgcttcacgcagtgtatgattatatatatatatagttctgtgttttaatgtatctgggcatatacatatatatggaaaatgttattgtttggctagaacatgcacagtgcttgtgaggaagaggccaggagaggcttgtagacgccacctgtgacctgagaagggagaccacctgccgaggctggaggtctgagcttccaataacgtttcagaaatcaatgcaagcgagtaagactcgaacccgtgatcagctccagtttcccaggaaacagtggcaccatctcccctgctcctcctctgagatgctgaaatgccagccatttatggtttacctgaaagctggctaacaaggtccttagtctctcctcccaaactctttaaaaactagttcatggcacctcccaagacagacatcccacctcccattttttaaaaacacgatcccacgtagcccaggataacctccaaatcccagctgctgctcattgtagcttgtgccccacggctggcatacgtgtgtgttcttgttcctgtcagcagcacattgcgctgatgacgtccagctctaagagccattctgggcaagtgaagggcagtggctaacagctgttgtcggtccagcagtggctgggttaaactttctactcttttttggttttatggccaacctcaagaggtctccttactttacaattcataattattagcattcccttaaaaatctcgttcagttttaggttttgttttgacagatagaataaagtttaagtgactgcccatggcctgattggtcagaggtttgggtctaaaaatctgcagtttgcaccatatgccagcgtcccagcctttgagttagtctgaagtggactaaaggagttgtctaccaaagttaacaacaggagttactttcaagacaaatagatagtaattctcctccagatgactaagatcataataatatgatattaa

SEQ ID NO: 25338 - DNA, 1110 bp, Mus musculus
atctcaaggtaacaatagcccaccaggaggctagactaccttgcttgaaaaatagtgtgccctagaggagggcatgtgagctttctccaggggaattttcaaaactaccctgagtcctggcacaggagggaagcaggcctgctcacagacttgctcagggccggtcacacatttccatttttaggttaaatatgtcttcgtaggtttagcacagcagggtgtccatcagactagtcttacgcggttgtaggcatttaaggtcacccgcccctttctgtctaggtgcaccgattggatttaaaaagtcaggcggactccgggcaggtccagctgcttacagcgggggggggggggggggggggggggggcagcgcagtgagccgggtatgggcgtggcagctgaggtgagcgctcggctggggcagggcggggtccgcgccaacagggcgaaggcgagcgcggggcgcgctcccggaaacctcgtgcacgagccgcggcaccgcccgcccccgccccgccccggtcagctgggttccgcgtccagccggctgcggagcatcccgggcggcgcgaacggcccagccatgtccgcagccatgagggagaggttcgaccggttcctgcacgagaagaactgcatgactgatctcctcgccaagctcgaggccaagaccggagtgaaccggagcttcatcgcgctcggtgggcggcgggtccccgggagcggcgccggggcagggacagaggacgggcgggaggctcctcgcgcgtggagcggggcctgggagccgcagactgcgggacgcgcggacgctgacgtgtcgcctctgccggccgcgagtgtcccaggacccacagctttgggcgcagtgtctagcggggtgaagctcgccttcacgtcccagaccccacccccactccggcagccgggcctcgcgtgcacagtcctcgcgtgcgcccgcgcgcgggagccaggtctagccaagcggggcttccgaggaggggggaaccgcgggccagccagcaggaaggagaagcaggggactgctgggtgtgcccaaaccagccgggccctcctccatagggtgttgaggccggggttgctcggta

SEQ ID NO: 25339 - DNA, 1234 bp, Mus musculus
tactgaatgaaattcttcggttgccttttcttataaaatgactgaaaatgtaaaagaatagcctataagtgtgacatatggaacggtattgtttttttctagaaaaccaaactggattttcaaatcctacattggaacacctttctgtgtcgttcccaaagtgacacctgcacagatagcacttagccaggatttgcaattcagtggtcacaactcctgaacggagagaagctcgagtagaccacaaagcaaccttgcttagtcattgcaacattacacacatcactcacagagctgaatcacatcacatgctgcctacaggacttcagttactgtcaccagctggcaatgctgacttgtctggatcaatccctgtgctgtccccaacccacctccagataatgtgagaaaatagccatgccagtgtggagggacttgggtggtgctcagatctgtgtgtcatcagatgggcctcaaaagaatgagcacacctcagtgtgttctccaagggctagaccactgcagctttccaggtttattcagggggcttcatctccagatgaccaccgctcgctcgcccgcccagttgcttgctgttcagagcagccgctcacaggatgtgtagtggtatgcttcttgtcgtagactcttagcatctttttttcgtttggctttgcatggcttttcagataatctgctaatcatttcttacgggatagtaacttgtgttaatatgacagatgtgggtcaggcttcatctaagtgggttgtccctcataccccacccccaccccggtgcttatttgaattgataaatgtctcactttgcccatgctttgcatgtaatgactcatgcatgattttcttcttaatagtttgtttcatacaaataaatggaatttcacaacatctttaataaggtgaggaaagcatgaaccttgaacgctgccactattattacccagtaagagcaggaagtagtttgataaggaatagtgtgtctacgtacttcacatttcacttgtgtgtgcaatgcctttctgggggagagggaaaatccagcagtagtgagtgtgtagttggagggtttttttttgttaagtactgaatcacccagccttgtttgtgtggtttccttttgataatactaggtcattcataatgtatttttagaaaagtaattaagaatgccaaaaaaaccctgtatcatttgatttgaacccatcatgtggtg

SEQ ID NO: 25340 - DNA, 1114 bp, Mus musculus
cccccccgcccggtgtgtgtgtctgtgtttgagagggaggaggggtgtgtgttagaggtcaactttcaggagttggttctctccctttaccaaatgatcaaatttaccaaggatcaaattcaggtcattaggtttggcaacaagtacttgtacccattgagtcatcctaagctgtgggttgtgacccctttgagagacgcatatcagatactctgcatatcaaatgcttacattatgattcataacagcaaaattagttatgaagtaacagtgaaataattttatggctgggggtcaccacagagtgatgaactatatataagaggatcacagtgttaggttgagaaccactgctctaggcttttaagtttcctaatgtactatatctctatacgttgtatattagtgtatcgttctctactctgctttagaaatacaagatacatacaaataggtgctactaatccctccaccccagaaatacagagctttgggtagtggaagacagttgagaaattttgtgcatttcaatgattagatttagctgggaggcagaagcaggatgatctctgtgagcttgaggccacccaggcagggctcataatgagaccctgggttttttgtttttgtttttgttttccgagacagggtttctctgtatatccctggctgtcctggaactcactttgtagaccaggctggcctcgaactcagaaatacgcctgcctctgcctcccaagtgctgggattaaaggcgtgcgccaccacatctggcgaccctgggtttttttgtttgttttgttttgttttgtttttaaagatttttttcagcatctatctgggaatagttgcaagatcctgaaatcccaggtgtttcctgggagttcattggctggttagtctacctgaactggtaagcttcagattcagtgagagattctttaaaaaaataagaatagaagaccacacacaaacacacataaagatatgggaactgaagcagttgttttctctctttttatagattaagttctgaagtactgatcgagttctgcgtttcttcaatgaggaactacaggctgatcttctgccataatctcaaacagccataaat

SEQ ID NO: 25341 - DNA, 1802 bp, Mus musculus
tttttgtttgtttgtttggttggttggttggttttggttttggttttggttttggtttttggaacagggtcttgatgtacacctcgagctgcccaggattttgctctgtagccattgaactctactccttccttagcctcttgcctgtcatagcagtcatttttattgtcaatgactgcttatttttcttcagaggaaatgaccacccagttttaatatatacagtgtataatctggtacttaggttgttcctatctggaagatcttaggtgaggttaaagaaaggaggggtgtaggtggtagcttattcaacacagaactcacttttgttctttgaaactgtaacatagtcttaagtcctagcgtggctgtagcctcttgttcattcgtgtgctgtcttccctcactttgtgtacttctttgtcaggtgctcccactctttcccggcttttagaagctgggcccacacagttcaccactcctcttccttccttcactactgttgccagtgagccgccagttaagcttgtgccaccccctgtagagtctgtgtcccaggctaccattgtcatgatgcccgcgctgccagcaccatcctctgctgcggctgtctccacttctgaaagtggagctccaggtgcgtccctgacccacgccctgagcgccacaggaccaaaccttagatagagaagggtggccaagaccatgatctcccacctagagacttctgttctccatagacttggaccatctttacccttaggactacaaggatggaagtgggtgtgtgtttgtgagttgggtggggcaagttaagtgcaataacataagcaggcttgagactgtattctcactttactttataaataaaacgagggagaagaaagcatggtcagcaataagtttttgaccttaagtgtctacagttctggtgtgatctcagggtggtcacttaatactggataagcttctgagttgctttttctttttgttcatcagtgagccagcctgagccctgtgtacccctggaagctgtgggggatccacatactgtgactgtttccatggatagcaatgaaatctccatgatcattaattccatcaaagaagagtgtttccgctcaggggtagcagaggctcctggtggatcaaaggctccaagcatagatgggaaggaagacttggatctagcggagaagatggatattgctgtgtcttacacaggtgaagagttggactttgaaacagttggagacatcattgccatcattgaggacaaggtaactgtgtagcaaaatcctaaaaagtctcctaggcttacaccctttttcctgtctctgacttagacttatttaattctacttttgcccgttttcagctttgtactctgctaaactgatcttccttttcatctctcttacttgtctgcatagcacaagtgtctgcacttgtggttcccactaaatggtaatagcgagcagctgtagcatctaactctgaactggtaacctgagggacctgggctttccctgtgtgctcaacagtttgtgtgttgtgggacaggtggatgatcaccctgaagtgctggatgtggcagcggtagaagcggcgttatcgttctgtgaagagaatgatgaccctcagtccctgcctggcccctgggagcaccctatccagcaggagcgcgacaagccagtacctctgccagcaccagagatgacagtcaaacaagagaggctagacttcgaggaatcagaaaacaaagggctccatgacctggtggacatcagggattccggtgt

SEQ ID NO: 25342 - DNA, 2380 bp, Mus musculus
aagtgttccaccttactctcttggctccagatctcaattggattcatgttcgtgatgttgaggaagcctggaaactattgaaagtgggtcgcaagaaccagagctttgccagcacccacatgaaccagcaatccagccgcaggtctgctgtgggaattgactcttgactgtatctagatagctttagccttccacctgatcatagaagttatagagtaatttttcccttttccttttcagtcacagcatcttctcaatcagaatcttgcaccttcagggagaaggggatatagtgcccaagatcagtgagtaagtttccccacttagaaatttgatcatcttggccatgtggttatgggggcagaagggaacttctcaaaggaatttgctctttcccttcttttgatataaacagcttggaagggcccttccctagagagaggaattatagaacaaactatgagttccttacatcagctcctatgctttactccagactgtcactctgtgacctggctggctctgagcgctgcaaacatcaaaaaagtggtgagcggctaaaggaggcagggaacattaacacttctctgcacaccctgggccgctgtattgctgccctgcgacagaatcagcagaaccggtaagctgtaggctgcggtggcctgggcctggccctttgctcagttcctggtcagccctgagggtggtgcttggatacacacacaccctgccaaaggctgcacttatactcacaatgctttttatctgattctgtacaaggtcaaagcagaacctgattcctttccgtgacagcaagttgactcgtgtgttccaaggcttcttcacaggtcgaggtcgttcctgtatgattgtcaatgtgaatccctgtgcatctacatatgacgagactcttcatgcagccaaattctcagccctagccagccaggtgagaagctatacacataatgattgtattttccttggatgcaattttttttggtcttttgagtcagggtttcactgtgtagtccagctatcctagaactcactctgtaaaccaggctgagatccatctgcctctgcatctggagtgcttgggattaaaggcatgagccactaccaccccgcaggactggcaatcttaaaatagctcttaggagccgggcagtggtggtgcatgcctttaatcccagcacttgggaggcagaggcaggcagatttctgagttcgaggccagcctggtctacagagtgtgggttccaggacatccagggctacacagagaagccctgcctcgaaaaataaaaacaaatagctctagttaaggagtcaattgagattttttttccccttccagcttgtgcacgccccacctgtgcatctgggaatcccatccctgcattcattcatcaagaagcacagtcctcaggttggccctggcttagagaaagaggacaaggccgactcagaccttgaggacagtcctgaagacgaagctgacgtctccgtgtatggcaaggaggtgaggacacaaggcagttcggttgtggcagcttggtggctggacatgtgctacaaggtgtcctggtcgatatggggctttttaaaaagtgcaggggggctcataggtgtggtcttctaggaactactccaggtggtggaagccatgaaagcgctacttttaaaagaacgacaagaaaagctgcagttggagatacagctccgagaggaaatttgcaacgaaatggtggaacagatgcaacagcgggagcagtggtgcaggtactgctagcccagcccctgtgacagggacagcagtggggtgtaggctctgttctccagcttcactcaggatcctcactaccactttctgacagtgagcgtttggacaaccaaaaggaactgatggaggaactgtacgaggagaaactgaagatcctgaaggaatcactgacaactttctaccaagagcagatccaggtgagtttatcctggccagtctcaacagccactcggcttccatcatttgggtcagagcaaacaaatgtctacttttactctgtcttgaaaaaccaagccaaccaaacaaaaacaaagtcctggaactcactctgtatgtagaccaggctggccgtaactcagatccacctgcctctgcctcccaagtgcttgggacaaaggcacacactacctaccaccaccgccactgccagcatcttatgggtttctgagatagggtctcactattgtcgctctggccagcctcaaactaagttttataaactctagaaagaacagtagtatatactataattaatgtttattaggttcccttagtatcgtgcagctattgagtttaagttgagggatgagctcagta

SEQ ID NO: 25343 - DNA, 1575 bp, Mus musculus
aaatagtaccatttttgaaaagggggcagaactccttttatttgtaaggaatgatctgaacagtattttaataatcattttttgagattagcactgaatatattttgaaacagctgtgactttgtttcagacccgggaagaaggtaaggccttgctccgccagatcctacagctgaggaaccaaggggagacacccacctctgacacgccgggtacctttttcctccctgcctcactgtctgcaaacaacactcctacacgcagagtttctccactcaacctgtcttcagtcacaccatagtcgactaccctcacgtcagcacattgctagaccaatatcaaaccttacctgcagtaaagagcagtcacgtctgttttcccaaggacctagacagaaacagcctgagggacagcctatggaaccaccttcagaggcaggcagaaatatggtgggggaaagatggtcttctgcagccagctagcagtgctcccttctattcagagtggcaggtcttggcctttctagccactcccccaaccccccaaggaatcccttttacaacacttaaccagcagtgatgccacagaagcaaggtttcggcgctgctgagaggggtagacaagaacggagcgaagctcaccatgcttggtgcctgtcctctgcatgcagggagctcagctgtgactttctttttaaagacagggtttctgtgtatcctagcctgtggcctttctgcctcagcctccctaatgatagcattacaggcgaatgctgagtgaggcctaactagaacgacctttatgttactgagtgtactgttcggataagagattaggtttagagtggagctatccatatgatcttgtgtagttttccaaagcagccttctaaaatcttccaagtgagtcagtgagtatggactgtggctcacatgagggccagatggccgctgtggccatgctaactatatatatatgtgatgaagcaacacaagaagagaacttcgtggacattatggaagcttttttacttcggattttaaagtctccaatttggttttcaaccttatctacaaggttgaagaattcactgtgtttttctaggtttcagagccacttgatgtctgctacaatgagcttgtgcagtaggtgctatagatcattctgtggttaggagctagccttccttctcttgtactcagaacattttactccccatttaatggaaggaacactaactgggtgccatgtggtggtgcatgtctttaatcccatttggagacaggcaggtgggtgttttgacatagcaacttcctggccagacaaagctacccaagcctcttgggtatcatttaaaattgtactcatttcctagtgtgcattaggctggttcccactgctgttcctgtccaagggtctaacaggccagatggtatttatatcaattttctgtccccctttttatatttttctaaatttggaatccaaataaaagcataaacaatgtctttattccatataatatttgtgcatgaaaaaaaaaacaagattacataggtgattataatacaataa

SEQ ID NO: 25344 - DNA, 1169 bp, Mus musculus
tctctgtgtggccctggctgtcctggaactcactttgtagaccaggctggccttgaactcagaaatccacctgcctctgcctcccaagtgctgggattaaaggcgtgcgccatcatgcccggctaacatattttaaattttgtatgtgtgtgcatgtgtctggaggtcagttcactcctgccactgtgtgggtcctgggaactgaacagttgataggcttgtcttcaagtgcctttatctgctgataagggctgccttaccagccctttaacaactatttttgtctttggtggtggtggtggtggtggttttttgggtttgtttgttttgtcttgagacaaggtcttactctgtagcactggttaagacacctgtcactttattgtttattttttatttttttggttttaaggtgtttattgtaggaaagcggagagagggagaagagtagaaagtagaagccggccatggccacgtggagagaagggagagataagaaagagaacaagaccctaagagagctgtcactcttttaaaaaatggattatttaggaatctcatatcatgcaacccaatcgcactcacctctcagtcctcccgtgtctgtcctccctccccatgacaccccccaccaaaaaaaatttattttttctgttgtccatatactcattggagcctcatcaacttgtaatggccagtctctggccaatgtaagccaaggtaagttcttcaagaaagggtttctttctatagccctggctgtcctggaactcgctctgtagaccaggttggccttaaactcagcctgcctctgtgttattgaatttagctcctatacttggtgggcactgacagtcctttgggtctcaatgtgttatctatgttaaaatttacttgtttacctgtcatttctgattttaattacatctttactttttagtttctgacttgctttgtggcctgacttatgtaaagctcaatttcttttgtaggcttcatgaacagttgactgagtcagagcaggctgcccagtgttacatcaaatacatccaagatatctattcctgtggggtatgtgtcagagcacaagagccttgtcacagatgggctcctgtcacctcggtcacgcctgctttccttatctaggagaccgtggagcacttggagga

SEQ ID NO: 25345 - DNA, 1245 bp, Mus musculus
tgcttcatcgaaagcagacaacatcttaagtggacctcaccaggtatctggaatacatgtacaggaaataggctttcttgctattgcagccgtgaaggaaatgtgccgcccggtcatactctttaacatcaaagtaggccttggccagggtgtaagcatccacatcctgcgcgtcctcctacaaggaacaggttatggagtggttaggtctcagacagccagagttcacctagggaaagcacagtcgttaactctgagatacaggaaagaacggttatttcccctcctcaaaatgtgtgcatgcacttatacagcttagacagtattttagagaaatatactacatgtaacgccaaacaactgtttttcctaagtttttttttttttttcaaaataaaaaaatggagcctggcacagtgacacctgcctttactccaagcagttgggagtcagaggtaggcagatctctgtgaagtcaaaccaatcccggtccacagagtaagactcaggagagccagggttatataataagacttaagtctacggccataccaccctgaacacacccgatctcatctgatctcagaagctaagcagggtcgggcatggttagtacctggatgggagagcgcctgggaataccaggtgctgtaggctttaacaaaaaaaaaaaaaaaaaaaaaaaggttgaggtctggggagatggttcaatgagtaaagtgcctgctacacacacatgagagactgaacctggcccccagcacgtagaaaccatacagcaccatacaatcgtaaccccagtgcatggctgtaatcccaacatccagcaggaggatgaattcaaggctctcctcagcgtttgtgtgaggccagtttgaggactcagcaagtttgaggtgaggccagcctggtcaacaagagactctgtctcaaaagagaaggaagagtgaggaaggcaaggagaaagggaagaggcagagagagggaaacaaggtcacgctcattactacagtggggagcacccctgcccgggtgtgtgcacacacacacgtttgctggggccagcaagatggctcagaagataagagcacttgtctccaagccaagccggaaatttccaggaccatgaggtagacagggagaattaactcctataggctcttctctgaccttaacatatgtgacatggcatgtgtgcacacacatacagatacaataagtgaataaagaagcttatacatgaat

SEQ ID NO: 25346 - DNA, 1175 bp, Mus musculus
gtatggggattagctgattagtgcttgtttttgtttactcttcagggattttcaccaggaccttatgaaaggtatcccagtaagtagacctccatccctttccctccctccctcctctgctccctccctcctttcctccctccctccatccctctcttcctttctctttgtctttctgttaagagagggcctcttaactgtgtttagctacctgggctggtgcagccgttgaacactgagacggaagccatgtgccaccaagcctagattttccttcctgactttggtttgtctctcaggtggatggcagagggttccacacagccgtgtggctgtagctgttggatgctttctgtagacatgtctgtcttttaggtacagcttctttgtagtactccgaatgctatgaatcatggccacagaaagaagattgcaaagcgtagcacatctgcacataaagaaaatgtgagtgttacttcctaaactgggaactgtcagctctgttcagtttgttggtttagatctcaagttgctgctgctatcctgaaaataactgtttggagagcatcacaaacagtgtgtgagtgtaggttcctgtaatggactgctggaagtcagtttttgccttttcacatgggtccagggctggaattcaggactttaggcttctttcccagcaagcactgtttaccactgaacgctagccctaaataattttactttgtaagaacatacataacataatttgttcataaattctttgtgggttttttttttttttttttttttttttttttgcacttttattgctaaggattgggtgtagtcattgttcaaacagctctttcatgtcattgagctatacccctgccttgtcttggattcctgaggatggagcagtatacagccctagtgcatgccaggcaagcagcagcctacagctcactttttgtgtgctgtttttaagatagagtccatgggactggagagatggcacagcggttaagagcactggctgctcttctagaagacctgggttcaattcccagcaaccacatgggaactcaaaactgtctataattcacaacctcacatagacatacttgcgggcaaaacaccaatttacattaagtaacaataaataaattaaagaaaaaaaatacagggtccagtta

SEQ ID NO: 25347 - DNA, 2439 bp, Mus musculus
ggatcttgtgggtttttttgtttgtttgtttccttaatataacattgggcttgttcaaggtgtcaagaggagagagtttttgtttttgtttttgttttttttttcggtcttaatagctctggagccaggcttttaagttcatcgcatcactgctctgtaaatggttctgttttggggtctagcagaatcttttgagtactatgatttcagctaatgggcttttctgaagtcccgccctctcccactagatgaatctagtattgaggcttgaggcagtccccacacttgttgttttcattgtctaagctgtctgcagcccgcttctctcgcttgctgagaagctgcaagcagatggacaactgaggcagagctaaggagcttgggcgctctcctcttccccaaggggacctttccttttctgatcttacaagtcagagacagggttgctctccaagaatgtgttgaggcagaccaggagcagtgacattattccctggaagtccttgaggccaccctcagcactgccttttggaagctggctgtagggaaacttactcttgcaatatctaggcccggtctctctctgatctgcttgaaaaagaggtagggtgttcagcatttaatagtttgcttgtcttccacacttgccaggaaatgtttatttgcttctaattggccctgagagaccacagagaggctggggctcaccgagggattgacttggggtgtgtaaagcaaaggctatgagaagcagctgggagtttgttgttgttggattgaatttctttttttgtttctcacccacaacttcagccagtgcagcagatccagtggttggagggatggacttgaagattgcagttaccttggtagggttggcacctgtgggcatgcatatagaagctgtcactatgcatcctgtgaggctttgtttagaacaccctgtatagcgaaattggacctgcccttcccagttgttatagtaagggcacttttctgttcaatttccatggtgtcttaaggcccagttcctagtgttacagaagacaactaaggtcatgtactttcttccttgtggaattgagcctgatgtttaatgtctcccacatgctaataggaatactatagaggcgtcagactctttgcctccacttcaggggaggtggccatgtcttcttaaacctgtggccctcagaggttctaccttctcaaggctcctccctgtctcctggctagttaccacatcttaccactgggctaccggtctctaagggcctacgagagactctcctgagaattcagggaaactgagcccaggagttatcgtaggtttcatctttccctggttctccctctttggtccataatttccctggtgccagcttcttttccacctggggcaacctcatccctgggctctctgctgcagatggcagtgtcagcctccagtaggtcactggcagtgccaatggggtctctgcgggccccaagtttaagtgaaggcagtgattctgcctccaacctggctttcccaaagcccttaggtcaccgcccttagggaaggaggcctacaattgtcatattttaattccattactttaagtctggaatgttaaactaggcagaactatcatcttgcttcccagtttaaatgcctctggccctggaacaagccttttcaagacgtgaatcgttggttttacacagtagctctgctccaacggttctgtgtaaaccaaacgctgttttttaatgcatttggactgctgaccatgtaaaggcagcctatgtttgcttcttttgtaaagcaagcaacttccctctactttagccagtttcatcatttgggttctcacacagtgggcttacccagagtggagcacacctccggggcttgtggctgctgctgtgtagacgcctgcatctgtgctgcgtgtgtggtgcgtgtggctggccagcaggtgagtcttactgcgtgcgtgagtgaagccactcccaggctgatgctctcctcctgtgcccggtgactgcccagtggcagctctagctgcccttcattcccacctgctgccaaagtccctgtgctaatgggattacagaaacaaaaagtggaaaaaaatttttcgtaaactttgttttatattaaaaaatccataagtctgtgtgtgttaaaacatgaggttctgcctctgtggctgtgtttgaaaaaataaagttttattagaataatccattttcccaagcaaccttgtgtacgatagtgtctttttcccttatatgtgcacatgtgtgtgcacaaacatgcacacacaaacacaaacacatagagggagaggaagaaacattcctcttaatttaacttcattgcagaagggcagtatctggacactagactctgtgatcagactctgttacctgggattctgtcgatatggcttg

SEQ ID NO: 25348 - DNA, 1582 bp, Mus musculus
tcctagctccacactgccttccgaatacttggataataaccaatgaagtagcggtttggatgacaccctgctatctctggctcatctttctaaaacaaaaatgacttgtggtctgtggctagttttctcgataccagtgctggtgaaatccaggtgtaagagcaggttcatgaaatataggagagaaaagttgattgacttatagaactgtgatggctatgataaaggaaggtcagtgggttggatcatcactaactgaagctaaaatcttccttccagaattcaagaaattctagtctggcctcttctggatttggagtgtctctctcaagtttgtcacaaccattgacttttggaagtggacggagccagtccaatggagttttagccacagataacaagcctttgggcttctctttcagctgcagctctgcatcagagtctcagaaggactccgatctctccaagaacttgttttttcaatgcatgtcccaaaatgtacccagcactaactacctgagcagggtttcagagagcgtggccgatgactcctcgagcagggattccttcacacaaagcctcgagagcctgacttcaggcctgtgtaaaggcagatctgttctcggagcagatactcagccaggtcccaaggccggcagctctgtggaccgaaaagtgcctgcagagtccatgcccacccttactccagccttcccacggagtctcctaaatacccgcaccccagagaatcatgaaaatctatttttacagcccccgaaactgtcccgagaagaaccttctaaccctttcctggcgtttgtggagaaagtggaacacagccctttcagcagctttgtgtctcaggcatcaggtagctcttcctctgctacctctgtcacctcaaaggcaacagccagctggcctgagtctcactcctctgcagagtctgcacctttagcaaagaaaaagcccctctttattacaactgactcctccaagctggtatctggtgttctgggctccgctctcagcactgggagtccgagtctctctgcagtggggaatggccgctccagctcgcccaccaacagcctcacccaacctattgagatgcctactctctcctccagtcccacagaagagaggccaactgtggggcctggccagcaggacaatccgctcctcaaaaccttcagtaccgtctttggcaggcactcaggcagctttctctccgccccagcagagtttgcacaggagaacaaagcaccttttgaagctgtaaaaaggttctcattggatgagcgaagcttggcttgcagacaggattcggactccagcaccaacagtgacctgtcagatctgagcgactcagaggagcagctgcaggccaagagtggcctgaaggggattccagagcacctgatggggaagctaggccccaacggggagcgtagtgctgagctgctactgggcaagggcaaagggaagcaggccccaaagggccggccccggactgctcccctgaaaggtgatccagctgggaccatacatggtctttgctctagcacaaacaccaaatgct

SEQ ID NO: 25349 - DNA, 1254 bp, Mus musculus
tcactataagagttatctggccacaaaaaaacatttttgatcttattaatttttttaaacatcgggaactaagtttttttgtgtatcccatttgtttctacttctcttagaccatctttaaatttacttcagggagttaggaagaaatagtcactgttcccatagcaacctttggtaaatttgatgaagcaaagagatccacaacctctatttgttcttccctcaagacgcaccagagctcagtagctatgataggctattgcttagagtctagtgataaaagcagtgctttccttcaggctctggtaaactttaggataaagtccaagaggctttggggtcctgaagagccacagccaggtggtgactgccttcttcctccctgcgggggtttcatccctatccctagagttctcacttagctgggttactcagagttgagttctccatggctcgtagttcccaaccgaagcctttttctttcatgcgctcttttctgggtacatcctcaaggagcatggagagaaatagctcacgtcagggtgtgtgtcttgtactattgagccctgtttatgcatacctcttgtgaaggccctttgtcctccttccccacgacagttggccagtcggtgctgaaggacgtgagtaaagtaaggaagctgaagcagtctggagagcccttcctgcaggacggctcctgcatcaacgtggcgcctcacttgcacaagtgccgagagtgccgcctggagaggtaccgcaagtttaaggaacaggagcaagatgattctactgtagcctgccgcttctttcacttccggaggtactgggcttttatctaactcacttcccagttttcattggttttaaatgactgcagctctctctgaacccacagatgtgtcttgccatctttcttaccttccctaacctttgctcttagagtctgtgttgaggctctgtcagagtagtcagtctctcagttggattgtgaagtggcatgtggctttgtccttagagagtgtaagttgaagtattttagctatagccttgtgctgtccctgagttattctcaagtctgattccattgggagttgtataagcaagactcagattcttttgtggctccccctgaccacctcccttccctcagtgctagagtaagctgagagatgggcatttgggacgtagtgcaaagctgcttctgtccttcttttgtcgttcagttggtttgctttaggggcagtgtcttatttg

SEQ ID NO: 25350 - DNA, 1176 bp, Mus musculus
tacagagtgaggtccaggacagccagggctgacagagaaggttgggggatggaggcagagaaaaaggttttttaaaaaaaattatggattctgaaaatcacttggcaattattctctgaagatcagttctgggcctcaaggagtctgatctgaaactcctatagatctgttacacaggaaacccgggacctctgcatagtctctgctgctgtgtgtgcgcaggcggccctttcctctacccaggtatttattctccctgattttgctctgtctcagcccagtggggctgccaggctgatttggcctcctctgtgctacagttagaagctgctcctaggcagtgcacaggccactgtagaaactagcttgttcagttacatagcagctgtggcaacagaaagggattaagtggaagagccaaatgtaaccctggacttgtgagtggaagttatgagctgaaggaaggaaatgcaatgggtgacttgatgttgatgccacctgactcttagatgttgagagcagcttgactactggacacacactgagtgcattcaggcaatgcctcttacagcctaaagtggaatctactgtgatcttcagatagcaggaagatagtctagtgatggaatgttaccctttgactagtatcatagcactgctagcctaggttcttttggtaatagacattgtaatttaaacggaaagttccatatatatgtatatattgactagatcttaaaaccttgctaatatggttgcctaccacttcagactccacatctggcaaagtttaacatcggaggggcctttcttcaagtaataggcattccatttgtgatgcagttagctttatggcacatagacattcataatttgagccaaggatgttcatgtgtacttgacaggtcaaactatgaaggacaatgtcaaatccaactttctccatgtatgccttaggttgaatttgtttccaagttaatagcttttactggcttagacattcacactcatctgttttattttatgcttagtcatatttaaatccagaatttaatagtctactagacagataaatgagatgcatgaatataaaaatatataagggaaaggagatggtaaactatttataactttattatattactaacatttcaaagtttattagttgcttataaa

SEQ ID NO: 25351 - DNA, 1228 bp, Mus musculus
ttgaatgtatgtagggcaccagaccctgggagctagatttacaaagggttgtgagccactgtgtaggtctggggattgagccctttcaccgtgtcagcagcagtgccttttacctctgggccatctcttcagcaccattgttgtgccattttttttccttaatcttttaaaagatttatttttatttcatattatttatgtctgtgtggcacatctgtgtgccgatacctttggtgttcagaagggggcttgagataccctggagctggagttacagactgacaagaattctggaaactgaacttggatgggttccctagaagagaaagaagcactttttttttctttttttaagatttatttatgtactttatgtacatgagtgcactgtagctgtctttagacaccaaaaatgggcatcggatcccattacaggtggcgtgagccctggttgtggttgctgggaattgaactcgggacctctggaagagcagtcagctcctgaagcccagaagaagcactcgtcactgctgactcacttctccaggccttgtgttagcctcaaacactcagagtgacctagaactcactatctaactaaggttgaatttaggaccctccaactcccaagtactgggattataggagtatcccaccaccactctgttgtctacatgctagaatgttgtgtacatgctagaatgttgtctacatgctagaatgttgtctacatgctagaatggccccagggcttcatgtaagctaggcaagtactctgcccactgagaatgcatccacagcctacaggaagtgattttacatgttttaagtaggccttgaacttgggacaggtgagtgattagctctgtcagagtgaaagaaagcagtcgggctggcgagatggctcagtggttaagagtgccgactgctcttctgaaggtcccgagttcaaatcccagcaaccacatggtggctcataaccatctgtaacaaaatctgatgccctcttttggagtatctgaggacaactacagtgtacttacatataataaataaataaatcttaaaaaaaaaaaaagaaagaaagaaagcaatcagtagatcaattgctacttcttcattgctgtgacaaaatatccaggaaaagtcacttcaggattgtattcaaagacaggattcagaaatgaaatgttggtgttcttgctcttctgtttttagtcagttttgg

SEQ ID NO: 25352 - DNA, 1146 bp, Mus musculus
gatatgacagtgtggcgctgctccatgatctttatatagcaggtgcctgaggaaggaggagcttagcttagcgagtttcctcatttgcatttgtattgtgaagaaatattctcagcagccagctatgtctcctcacctcaaaatactggtagataccaacttaatttttccatcccagtgcttaggaggcagaggcaggcagatctctgggagttcaaggccagccaggtctacaaagcaagtctaagatagctagggctctattacacagacaaaaaaaaaaaatgtagtggtgtcctccagagtgagaacacagtataagagcagagtagaggccgagtccattctccgtagccagagatgatgacctgggaattctcatggagcacagcatgtgtagatggttctcattgggttgcttttgttttcacagccagtgctagtttcaggggtgcataaaaagctcaagtctgaactctggaagccggaagccttcagccaggagtttggagaccaggacgtggacttggtgaactgcaggaattgtgctatcatttccgatgttaaagttcgagatttctgggatggctttgagatcatatgcagtaagtaacttggttatctggttaaatagagacagtgtagtcctgcacctgaaataacagcccatcccccatggagggaggagccttctgtttcgaccccagctgaacagagctgcatggcagtcctgtcatcccagagcaggcctgctgcgcttcatggaagacttaggttgtatggaactctgttgctctaaggaaaggagcaagaacctgcgaaatggagcagtaacagcgtgggtggagaaagcaaggctcacctcacctggcccattatgaaatgagaggttgcatctctcaacaccggtccctagattagtcaggagaggtttatgagaatgctgtctgtattctagagagactacggtcagaagatgggcagccaatggtgctcaaactcaaagactggccccctggggaagatttccgggacatgatgcctacaaggtgagtggtttcagatagtaccgtcctcacgggcttgtgctgggtggaatccagcagagcccaggcacagagacctgagctctagctcttgttttcc

SEQ ID NO: 25353 - DNA, 1864 bp, Mus musculus
ggtttaggaagcacggtcgctgtaggacttagccgtgcggctgtgagctgctgccgggaactgacagtgctgattgttctccaggtgaagaacatcatataccacgcagtgaaagacgctgtcggcactctcaaggcccacgaatccaagctcgcaaggtcctaaaacctggggtacttcagctctcctgtcaagcaggcctttcacaacacttaccagggaacggcagggttctctgcaggagcagaggcccttccccaagccagtgtggtcagtattacaaactccagccgctctttctgtgctgcctcaacactgaagggtgacacaagcaagtcgcactgttgacacacagtgtcagactcaagccgagggtgccacattcccatccagtggccttttgggaatccaggttgcttgaacattgctgggctctcctgcacattctcctggtttgagaccatggaaaccaggaatgtgggcacaccttcctttcctgttcctcttgtgcctggctaactagggatgtgtttggaggcagaggaagtcataactggcaacataaggtgatgacttactgtgcctggtgagagcctggcagtgtctccacacgtgacctctgacctggcccatcctaggagatgggggtgcagcccttcccgtactctccatgaacaccggagtcttcaggacccagggagagcccactgcttttcccaggaggctccaggattaggaaacgtgtatttagtgaaaaataggtttgtagtgaaatagttactatttcatgaaagtagatatttttagaacttttgaaataacagttgttttcctggactatgaggaaaggcacattacagttagtcttcctttcgataaaactctttgaaaagaaatatgatttttagaaatcagctgccccttatagcacaaaatcagccaaagcgtgatttaaaagaattggctttttattaggagttttttagtttctccgcgtccttctcagtcttatcttgagggagcagtcatctgagaaagaactgcatcatgtctgagcttcggagtgttccctgcacgtgaactgctgaccccaggagctgtgtcaccaattaccagcgttcccttgggactcctcatgtgtgtccaaacggggtggaaagtttgatctccaatataaagaagttttgcttttgttttttggagttttgtctagaatattttcagcaaagctttccaactcagtggagtttttattaaggatttacttggaaatgatagaattcattggcccataggtgcattgggaaatgtgtctctttccaggtgtactaccctgcagccttgtttatatgttcacagttactttcttttttttttttttttaaataaaagtcatttattgtagaatacttttaatttcactttctgtattttaattttattgaagggctgattgggatttccatgttcttattaaaaaatctaacaaatctctttggagtagacaaaattctttctctaccaacctttctaaagtcaagaaagtctctcacattgggtgtgagagatggagttgatttcagggtttcctactgccctgcctgcatctggtcattgcactttgctgtttgaattgtgcttagttgggaggaagacagacagtggggatggagccatgtgagctgggaagtggagagagggttcccagtttgtgctcattgaacagaatggagtacgtgcaatcctgctaggagccgtgcaatcctgctaggagccggatgagagacgcctgccctgacgtgcagcctggacagagctgcaggccaggctgtgaggctgcagtcgcctgcctgccttaacctgt

SEQ ID NO: 25354 - DNA, 1099 bp, Mus musculus
ttctcccaggacaattgaaatttgctaaagggaataaaagaaagcaaagggagaggcaggaaagacataaaagcacaggagggaagagatggccgcaagaggggccacctcttaggtcagatggaagatctcagagccaagtccttctactcacgagtagaaggaccgttggccaacagccctttcacttaccatccctgcctcccccgtcctgttccctttgacttcagctgcctgaaacagccatgtccaagttcttcacctctatccaaaggacttgatttgcatggtattggataaatcatttcagtatcctctccatcacatgcctggcccttgctcccttcagcgctagaccatcaagttggcataaagaaaaaaaaatgggtttgggccctcagaaccctgccctgcatctttgtacagcatctgtgccatggattttgttttccttggggtattcttgatgtgaagataatttgcatactctattgtattatttggagttaaatcctcactttgggggaggggggagcaaagccaagcaaaccaatgatgatcctctattttgtgatgactctgctgtgacattaggtttgaagcattttttttttcaagcagcagtcctaggtattaactggagcatgtgtcagagtgttgttccgttaattttgtaaatactgctcgactgtaactctcacatgtgacaaagtatggtttgtttggttgggttttgtttttgagaatttttttgcccgtccctttggtttcaaaagtttcacgtcttggtgccttttgtgtgacacgccttgccgatggcttgacatgcgcagatgtgagggacacgctcaccttagccttaagggggtaggagtgatgttttgggggaggctttgagagcaaaaacgaggaagagggctgagctgagctttcggtctccagaatgtaagaagaaaaaatttaaacaaaaatctgaactctcaaaagtctatttttctaaactgaaaatgtaaatttatacatctattcaggagttggagtgttgtggttacctactgagtaggctgcagtttttgtatgttatgaacatgaagttcat

SEQ ID NO: 25355 - DNA, 2310 bp, Mus musculus
ccaggtatcttgcggtaccgagtagatttccagggaatggagtaccaaggaggagatgatgaattttttgaccttgatgactactaggtagtcgacatgggtccggcaaccgtgcctcaccctccagcattcaacccaaggagcatacccgtggtggagtccaacagatccctgccttacaattggagcatttccagaacttaatccgtgagcattggatactgaaaagaaaagtgaaacaaaaccagacccaaccctacactttggtttgtcgtggtgtcagcgcagcagccgacaactaagtctctaaaggccactgtggactcatttaaaaagaatcccagtttttacttttacttgatggtaaaattggttgctcttgtattttatgaaaaaatgatttttttaaccttcatacatagaagcaaaatactttaactgctgtaaaccttcaaaagttagtagacgtgaggtcatactggtttgtttcttcctttgatcggagaataactaaattgctgcatttcgcagtgacccatttacatggcattctcggcttagactgcacaagaagaaatatatgtgaaatattggaactgtttctctcttggtctctgtttaatgttgaaagggtgagctgacaggaggcagtttgagcttcactccctcacactccccactcccagactgtccctttcaaaggtgcaggttgcgttgtaaagtcagactgagtgccaacacactggggccagggcactctgggcagtcaccagtgtggaggcacagttgtgcctggcatttgggagccctctgtgccattagcgttactgaggctccctgtcatctcagcctactagaaaccagtctgggatggacatgatgggcttctgtgctattgctgggattgggagaaataaaacatgcaacttaagtggaaccaaaaaaaaattcaaagatgattttgcttggatctattcttggtaaggggaggcggtggtgtttccttgtgttggatggcatgagattatgtgaatgttttgattttatttttttgttttcaaatgaactgcaagatttttttcacgggaacgacagacacgacacgtatgaccgtgcatgtatctcaaacccctggtggggctggagcatctatttcaaaaagtgggatctacaagcacctctcagatgagaaagtatggaggcgggtggggagggtaggggtggggtgggtaggacacggctgctggcaccatggactatataaaccatgttagagccggaagttggcctgaaaacctgaggcttaggcttcatagctgggctgtaaattggatttaaacccagttggagtgcaaagtcatggtgtgctcaaggtggtgacagtgaacagagtatggggtgcccggtggtagcggtgggaaaactataccgagtagactttgaaggaccgaaggttttttaagtcaactggtatcacccacactcaccagggtggtagggtgcattgggtttcaaattgggtacttttaacactttagtgcctgactgctgttcttcactgacttgactcagtcacttgtagctttattggtctgaaccagctccttgttcccaggttacagacctgcctatctatcgttccaataatcctgtttcacttgaatgaagggagtctgtcttcaatgtaaagcttctgcttctcacactgtaccctgaggtccaaatgactgtctgtcctgtaacctgatgtctcaacccagtgagaagagtcagttccttagtgttcaccaacacgggaggcttcaccggaacaggcttttgctttgggctctgctgtttgtttgcagaacacccaagagcgagcgaacacacccttcccagcagtaccttagggttttgccattgtaaatgggtctaatgtgatatgacaagaccagagaaattggatgtaaatttacatttttgaatatgcttgttgtttcacatgatacatttagggtatgcagctccttttgtagtttttatttttactatttaagtttggaaatgatgccaaatttttgtatttctttaatcaatgtgttctccttggtgatatatattgcattatatattgatgtgtgtatcaatatataccgatatgtgttacacttacgcatacaaacacacataagtgaggggtgaaaccgtagcctgcactccctagcctctgcagagagaccctaagagcagaatctcggtgttgtgatgtacagaaatggagaagagtattaaaccatatttaagaatatattttgtgtgcttgagatt

SEQ ID NO: 25356 - DNA, 1614 bp, Mus musculus
caggcaggcagcatcttccctacagcaggcgtcattgaaactcttcgaaatggcgtacaaaaaggtacaagggctggaggggtaactgggacctagttattggggttccctctaccatttatagaattgagaaaactgtaaatagaatgtcacggggaagatgaggtttgtacggtgaatgaagcctgttgaacagagagcgaacttgtggatacctgtgaaatcttagtgatcctcaagtattttctcaacagatggcatctgaacgggaaggttctggaagttctggcactggggaacagaaggaagatcagaaggaagagaaacagtaatcgtggcagtgcattgtggagccagaaggacatactatgaagcttgggactaaagggacttcctgagcagaaaaggggcagacttcagtctttttactgtatttttgcagtattctatatataatttccttaatatataaacttagtgacaattgctaactcatttaatgggtaataaagtcagcaatagcaggttcatactgttctgtcactagcctgttattttcagctgcatgtaaaggggtgggatggggctgtgaaccaatcattaaggtagatttggtttgtgctgaaatggctgtgatttcaaggtgggaagcccatttcacatgcagtggaggtagtctgtcattgaccttgagttgagatcatatgcagatgcttgttggccaagagcactactataaagaatgacctctgtatatttgctcctacaactgatgcctttaagactgagctacctgtaccatggtctgtaggtgcagaagctaggtcagtggatagcagttgtgttagccatagcttaaagtatgatatgagaatgatataagcctctcatgggcctgaggcatacttctctagccaccctcttggttggccaatgtctggcatctgtattcttgatgattgttcctttttcatccactctggattttttaaataaaattctgaaagcctcttgatctcctttgtgaatggtgatagctcaaggattatgactgctatcagttttgtagggagaaaaatcactggctaaaaggttgaacaaatgaaacatggggagtgactaataaaatgctggcatatatgctggatgtgaaagtccactcaggaagcagtttgaagccaggcagggctgtacagttagactctgtcttaataaaagtactggcataaacaaatccagtcgttgtaatcttctatctagaaaaacttcagtgctttttaccttgaacaaatttcaagcagagttggtttaaagaatatagtttcattagtaagttctaatgtctgatttcagtgactcgggacagtttttgggtgttttgttttttggcctatgtctatgtgcttatctcctgaagctgtagttagaggtaactgtgagccctggtggtggccctgcatttgctgagatagggtttcactgtagaatactggaatgtactacaaagccacctgatttctaaacatttttgaaacattaggatagggtttccaagatacaaaaataggatatacagctattatttgctataagtaattatttcatgtggaaaca

SEQ ID NO: 25357 - DNA, 1123 bp, Mus musculus
caaaataagaccctaggattctggtttattctgttattgatattaacaaattctcctaagatgctgtgcacttttgttacctctaatacataggctcagaaactatccctcatttcagatgtaaaattgataatacttcttcctaagattgggcgattgtgtagaatatgagaactgtattttataaccccttgtcatgtgccttctatttcaaatgatatcctctgggaagctagataattaaattcttctctcatttaagtggacagtggatgagatgctctgaagttgtcaaatacaaacaagtctgcagtcttggatatgaatctctctgacttgctgtctggcaggcgtattctgtttggctccatcagtcgccctgggtgttggctaacaggttctttctccctgatgcttaggttcagcagactgtacaagatctttttggcagagccccgagtaaagctgttaatcctgatgaggctgtagccatcggagctgccatccagggaggtgtgttggctggtgacgttacagacgtgctgctcctggatgtcactcccctctctctgggtattgagactctgggaggcgtctttaccaaacttattaataggaacaccactattccaaccaaaaagagccaggtaagagccattcttttttcctgcctattaacagtcccaagttgtacaagtgctgtttacaatcactttatgaactctttaaaactttgtttctaagactatactaactggactgggtgttgagactatgtattttgtttttttcctccccctttttttgcagttcctagaaaagttagacctcaactagcagtggtgaaagatgatgcaatttccttaaaaggctgttgtcatttattaccatatattaccatagtccttgtagtcttctgttatcaaaagcaagaaaagcctggggagggacatgggagtaggtttgatttctgggcgaatgatgggctgtgttgtacaccaccaagtagggacatatgggtctggcatggtctcagatgaagaattacttcttgtggctggtagattattccaacacttggggatgttgagacatgaaaattcagagtttgagaactgccttg

SEQ ID NO: 25358 - DNA, 1163 bp, Mus musculus
aataagaactagcttatgaaggcagggagggagcagcctgggaataaattaaagaaagaaagccgcatccatttctgcctctgaagagcagatgtcagcatgcctgcccctcttgctggattcagcacctttctagagataaatggcagagctcaaagaggcttcgtgcgggacctgtgctgagcctcgatggccctgggatatgtcagccaccaggaaagaggcctggaggttggaggccaggtctaggcttctagtatctgagagttaattttgtttttgtttatagaagctattttattgttagcactggatataactgtaaaactgaaaaagaggccaagatatggtgatatagactgtattccatccacttggaagactgaggctggaagattctgagggcaaggcaaaaataaactacacagtgagacccagactcagaaaagccaaggaagaacaaaacaaaaaagctgaaggaagatcaggtaagagtcatttttttcttgtggttggggatttagctcagtggtagattgcttgcctagcaagcacaaggccctgggttcggtcctcagctctggaaaaaaaaaaaagacaaaagaatcattttttcttttcttttaaatgaagatctcagactctgtgtttcccaggctactcctgaaccctggactccgtgtcgcagcgtccaccgtgtcgcagcgtccaccgtagctgcacttacaagcagatgctatcaggcctggctagatgagtttacaagagagattgtaagatgctaagatgtttaccaaagtgacacaggaatggacttgttggagcttctagaagtgataagtcacagcttgatggttaacctgggtctctctgaagccctgtctctaatggacctgtggctcttctcacccacatggccactacccttcatacacccctgctcttctcggcttccttttctggattttggagtctctggctctcatatggtgttccttaaccttggagtacttgactcttctctcatcatgggacagtaataactgaaatcgcaggatgctcgtgaggctccgaggaaggttaaaattctgtgatcttggaccaaacagggattccagatttcctagaacttagaaacttctcagatgagctacagggaagga

SEQ ID NO: 25359 - DNA, 1209 bp, Mus musculus
tttgagtctgaagtctctctaaaaacttaatgattacttaagaacttaagatatgcattatatttctctctctctttttttaagatttatttatttatttattgtatatgaatacactgtagctgtcttcagacacaccagaagagggcatcagatcccattacagatggttgagagccaccatgtggttgctgggatttgaactcaggacctctggaagagcagtcagtgctcttaaccactgagccatctctccagccggcattatatttcttatcgtatacattaagaaacaaaattattttggaaactaaatatagcataattttaagaattgtgttatttcatgtttagtaagatctctaagtgtgtctgtcacctaacttacttatgaacttggaattgctatctttaaagatactagtctactatttttcattctaaatgattttttttttaaattaaacttctaggttacaaccctggtaaacaccaatagtaaagggccgtctaataaaaagagaggccgttctaagaaggcccatgttttggctgcatctgttgaacaagcaactgagaatttcttggaaaagggggataaaattgcaaaagagagccagtttctcaaggaggagcttgtggttgctgtagaagatgttcgaaaacaaggtaggtcaatatatgaagagagacaggttttcctagaaatacattaaaattttaaatttacatttatttatacgtgtgtctgtgattctatatatgggtgccacagcatggcatatggaagtcagaagacaactgtgggagccccctccctccctccctccctccctccctcctcccccctttcccccctcccttccttccttcctcccgtcatgtgagtctggagattgaactctggttatctggttatcaaatgtggcagcagctctcactgagccatctcactggccctaactgggcttctttctcatgggttattcaccaggggagagttggctgctgtgccatgagaacacttaggaagttctgtagcaaggaggtaacgtctgctgctaatggccagcagcatacttttgccaagcatatgaatggactactttggacagatagccatttacattcaagattcagaagacagcactcccaactaaccccaaaggattataaatgctccttttaagctatcattaatttttgaat

SEQ ID NO: 25360 - DNA, 1155 bp, Mus musculus
tttgttgtctgccagccttgaaccagaaagtcttctttcttctacagtagaggccacaggcttctacacttacatgttcagtgtgatttgcgtatatttttattttattttattactaataagcacctgttaaataggagatgaagaagttgttatggttgaaatctagctagactgcattataattgatgtaaatgtttatctgattccttatagtcactgagttaagggaagaggtattttaagcccttttgttatatagtacccagatctctgttatatgaagatacttaagtaatagtacaaaccgaagagagaaaaacagaaacaaagactctttaaaatacacgtatatatgaaataatggagtgtgggctatcttaccctttaaataaaatgttagtttttaatgaataaattatttgaattaatttctgctggttttgtgttttcattctgtaaaataggagatttgatgaagagcgctgctggggagtttgcagatgatccatgctcttctgtgaagcgaggcaacatggtccgggcagctcgagctttgctctctgccgtcacccggctgctgattctggctgacatggcagatgtctacaaattacttgttcagctgaaagttgtgagtttgtatctatatttataatttgttctttgtgtcctagtgaagctggtgttggccatattttgtttagtattaagaattattttggggctggagagatggctcagaggtgaagagcacttactgctcttccagaggtgctgagttcaattcccagcaaccacaagatggctcacaaccatctgtaaaggaatcggatgccctcttctggtatgtctgaagacagctgcagtgcactcacatacataaaataaataaataattctttaagaatgcttttggttttgactcagtgattgctttgttcaatttcttctctagttcaagtatttatgacacaggctcttctacaggccacctttgtctcagttttgctgaagaaattgtaacaaaggtatttttgactgccttttattttattttttttatagtactcattctatgtttctttgtactaatagtgttccagaattagaaagccaaagtataaactaattaggtgctcctcaatacctcca

SEQ ID NO: 25361 - DNA, 1172 bp, Mus musculus
acttgtatgtacacattcgagtctgtcctagttagattacaagagtcagagctacttagagagagacacagacacacagagagaaacagattgattgtagagattaacaatatataatcatggaagtagttaaattctgaagtagattaaaagtatatgtgaggctgttgctttcatacatcttttataaaagaaaaaggactttaagcttggtgtttctaggaaagaattgtcacattaaatgggtttcatataaattgacatattccaaatatagatttctttgaaaaatgtcatggttgaatacaaggtagtaattaattgcctcactttgagtacttagatttttaaatttttttaaagttcttttacatagaccattttaattggatcaaaattatttgacctggatggctggaagaagcagcccagttatagatgttttaatgatgcttttagactttatttctgtgagataaatcttccttttgtaattctcattggtaccacatttgcaggattctgtttatgtaaatagtgttttcttttgtgtgtgcatgcgtatgtatgtgtgtgtttgtatgtgtgtgtgtgtctgtgtataagaaccctgagacatctcattgtcttggcctgtaaatagttttattatttaatttttttctatttgtattggcagaatttgtctgctcattatttatggttatacaagtactagttggaaatattgagtgtgactacacacatacattcaacttagtggttctctgtctgtctcatcaaatataagcagccagtactagaataaaatggagataatgaaatgggttaaaaaaaaggaaaaaatgactggaagtgagctaagtagtggctttctctttgatatgacctgggtttcatcttgatcattttgtgcccctactctctaccaccttagatttatacatttgggtatgtgcacttgtgttctcttccccttccccaagtataagtagaaagtgtaaattcttgcgttttcaaggaaagactgaatgaaatgctgaatgagtagactgccaggcatcaccgaagaaaaactgctgtaggggaggagaggaaagaacaatttggtaacttctcagactgcagttaactaaaatccggaacttatttatgtgggcattggaagtagg

SEQ ID NO: 25362 - DNA, 1090 bp, Mus musculus
aataggatttttacctaataactgctgcaggggactacagctgccagcccctttggtctttgatatgtactgaagtctcctctgctatattctcttgtcctttgataaaaataaaattagactttagggataacacattgtttttttattcctcaaaatagcctttggcacccaaagagaaagcccagcattaatttatgtcatgttcttgttgtcataaagtaagcatttatggaattgcttgatgttgggtaaaaacatctcttctttaaaaacttttgtccaaggatggtttttaccttcatgtgcatttgtagattcgttggggaattgtattaaaactgaaatcttcgttatgattgattcagaggtcagcctgaaccctaagtcctatgtgaagagctttctttacagagagggtgaggaggctgacacactgctctggtgaccagaggctgcaccctggcctctgtactgcaggctaagggctctccctcagccggaagcgtgggctgactgattcatggtctttgtttggctgcagacccccgaggagttggacgactctgacttcgagactgaagactttgatgtcagaagcaggaccagtgtccagacagaagatgaccagctgatagctggccagagcgcccgggtaaggacatggcccttggtcctctgacttgtttgggaaaggctctgtggcacttaggcctggctcttttctagggtgttcagaatgccattttctgatcctttttttcctgtggagtacagctaaaatcctcagtcatggcagctgctagtaacttgtggcttcctacaaaacagccctcagctaggcctaggtgagagcccaggtccacagctgtacgctgggctgcggtttatggtgccccctgagtcaggaaagagtgagggtctagtcagggttacgtttgctaaaaatgattttgcaatgcttctgcttgttgccctgataactgtaggaatgtgctcttaaattcatgggcctttaaacctacaacaacaacagacccacaagtgcatccaagaagaccattcaccactgtcacattgtggtcattac

SEQ ID NO: 25363 - DNA, 1631 bp, Mus musculus
tggtggggccaggcctgcatgcatgcaggggtctaacccagcttgtcactactcatctgttccttgtaggtggacagcgccatgtccctgatccaggcggccaagaacttgatgaatgctgttgtgcagacagtgaaggcgtcctacgtggcttccaccaaataccagaagtcacaggggatggcttccttgaaccttcctgctgtgtcatggaagatgaaggcccctgagaagaagccgttggtgaagagagagaagcaggatgagacgcagaccaagattaaacgagcttctcagaagaaacacgtgaacccagtgcaggccctgagcgagttcaaagccatggacagcatctgagcctgcacagcccatggggttctgaaaaaaaccagtcacatgcttcactcaaatgtatttgctaagtagagaacactgtcttattccacagggaggtagcagatttcagactcaaccaggtggtgaattttgcaaggacatgtttgtgttaaagctggttagaaaaaaaaagcttttagaattcaaaaatatatttctagctatatttttataagtttaatgaaaataacagttctgtaaccaaagagtaccacattaacttcttggtcacatttctgagtaggctgaagtgcctgctttctaggtaggggtgagcgcctgaggggagaggttgctttttagccctactgttgggcagatggaattaaatgaccaagggtggcccagtgtaaatcacagggcaccttagacggtctggagaaggaaggtaccagaaacctcttctgaggaataaactataggagacaataaaatataacacagtacccaggaagttgattgctttctttatgaagcagaaggggaattatgacgcatggctacagttactaatggactctgctgcagaacattaatggagttgctttattcgggctcgtgtgttgtgatgctgtaatcagaacatgcttccctgttattccagcttgaaatgcaaattcaccatcgggctcatttctaatcgtcgcagtgtttcctgctttgggccagcaaagaagcctgatgactgcatagggtttgcttaggcaatacttagacgcaccgtgtttgtgactactacagcaatcaccatagctacgagatgagattttactgtcttatttaaattttatgaatctgtctgttttttacactaattttcccaataaagtccattaagaaccaagtctaagaagcagaagtcgttctttgccttcaagaaggagcagacttgtgctctatgcccctctgccaggacggttgcctagggagggaaggagggagggacagtgactgtgtctctaaggaggacctttcaggctcttgccacccaggaagggtcaggtcccgttcagtaccccagtcccagcagcgtgagcatggcgggttccattccgtagcctcatctcctgggccttcctactagaaatgccctctcggaactccctagaaagatggctgtggcccttgtcacctccctagattctgttctgccatttcagtcagctcttctcttgccccttgtcaaggcgcctgccttccacaggctttcagtgactgtcgctggtttgttattg

SEQ ID NO: 25364 - DNA, 1174 bp, Mus musculus
gtgttcagaggcactggatgcatggaaggttgtgtggttaggagctccttcctctccttcctgctgctcctcctcctggtccctcactctgctatttgttcattttcctcaagggtttgctcattctgtgtttattccctctaagtgctatgagggtcaatttcaagaaatagggtgaaggaaacatttccagtgggttgaggctgagcgactgattgggtctcccctgtactttgtatttgttttggagaacagttgcagcaagattgccttctccgtctgctttggcagatgtggttggttccacctactgcttctccttctggcagtgcaggatggaggatgacgtgggaatggagactccagctcagtggctagcctaggaacctgtctctctggccagcgaagggcgaatgtgtcaagccaagctttctttgcttaggatttgaattctgtcaccataggcctcatttttaggttttgggctcttaaggcagtgacatttctaaagaatccacgcagggccagatcttccccgaagccactggtatctgttgctgttcaatgggctgtgagtgctttttttttaatctgaagaaaaaagtgagttttattaagagctatttaaagagttcaggagagtagatgttggttattccagtaacccctgggttgagcaagtaaaagctgcgtgattcctgcttcctcactgtggcattctgcctgagtctgacctatcaaagcctctaggagttgccctctcttagaacgtgagaacggcttccagcaattagagatttaaacaggagcatggagaattggaatgcttggtaaataagctgagagtagttgactatcagtaggaaagggaaagttggaacacagggctcttgtgtttctgacttatcggacagctccatggaaggataaggcatgtagagtgaaggataaggcatgtagagtgaagaacgggatcagtttgggacttgagtgtgaaacaaacaagagactatggtaggattatccttcaggttgaggcagcatgaaggttatgttgaaaatctcatgttgctttgatgttcaaattattcactgcgttatgtctctgtggataggtcatgtgattgaagtccaaattctgtttaccgctgagttacaagactaaggaatagtt

SEQ ID NO: 25365 - DNA, 1112 bp, Mus musculus
gcccccaccccccatctttactaaagtgtcatttttaaaagtggttctcttaagtgcaggatggctggttctggaggcagtcttactgttttggcttcctacaagttaagattacaggaatcagccaccagagcagtgcactgtggtccaatctacctgatgtacaggggtaatggctaatgccgttctacaaataagaactccagggagtggacttagctagtggaatggttatttgggggtggagctcccaaagtcacactgtttctctactcttgtttctttgactcagcccaacaaagtgaagggggtttgagggctggagatggttttttaacttaattgcacaggtgtcgacaggctgactctaatctgggatgttttgatttcatagtggccagctgccagtttgaggcgatgtctgccctggtaagtacagttcggctagttccggtttgccccagctgtaggcagctacctaggtttccttgtacctaggcaagtgttacactgctgggagaacagcagccaatagctggttggcattctgggcctggttcatgccacctctgttgttaactataccaggatgtcagcatagttgcttacccaggaagagaagcgcaagctctgcaggaagaaacctgaagtccagatcttccgacatggaggttacttaaatcacaacttggaaatggaactgagtaaaagccactgagggaaataaataggaaaaaaaaaagtcaagatttagtgcctgtaaatggttgggagcggacctgaggcagtggagggagttactagactgcacgttcactaaaaataggatgtttcctcgctccacaataataaaagctaagtcatgatcccctttagtgagctccctgttgggaatattgagtctggtgttgtagtatgcagggccccttcagaccgtccaggcaacctagatgcccaatctctattactattctgctctctagctcgtcaataaatttatgcatattaattgaccatggggttctgggaactagcttaggtcaaacagtacaatgagcagttaggctcccccttttctgttattcatgatgattttctaagaaatgcctcaa

SEQ ID NO: 25366 - DNA, 1112 bp, Mus musculus; identical to SEQ ID NO: 25365

SEQ ID NO: 25367 - DNA, 1157 bp, Mus musculus
ttaccacgcatttcttttctctatcaaaatagtccagactcctctggacaggatcgtgtgttgtgggaccttccggttttcaaacaaagggtttggagggccatggtgtagcccttcaatctttcttttctctgctagtgctgtgccatgcttttgtgtttttcctttaccgtgggtgtttagcccttaaggcgcgtttcctgttctgtgactgtcttgtggaatcgccccttctgtggaatatttctatattggataggttacagttattcatgtagacgtttctagaacgtctagatgtggttctaaaatttctagtctttctatagctctgaaatttcgtgtggctgatttcataggaagtgttcatgggacttttgtgttgatgctgcatgctgcatatttaaatgggctaacttgtcagtcgatccaacgtgtttcgcccaggtaaatttagacttgactatgcgggtggtttttcatgggtgttgaaaagctccttaaaagctccctagttgttgggcgtagtgacgcatacctgtaatgtactcaagagaacagggcaggagaattgctgtgacttcggggccagtcgggtaacatcaagattaccacaaaatattattgtactaacagttaagtctcactacgaattacgtagatttctttttgagacagctggaggctgtttttgagaggcacctcctgtctccacttccctagagctgaattacctacagccttgtgccaccacacccagcccagttatcttcataacttttgaacattagtattttaggaatctagaagggaggagtatattactgcaaaaaaaaccccaacgttgcctttgtacttaaatgtttttacaaactcaaatgtctccgaagtactagagaagattaatctggttggttatataatcttaaaaggatagcttttacccaacaggttttgcattgaagttcttctaaatttttatttctaggcccttcacaagtatttagttcatacttcctacccatagaagtagctttcccttcatcgtttatatacagcttttatatagcattctaaacatgaactgatttgaaacttaactttttacctgatgcttttaaactaagtaatagtacaaggcggtaagtgaaaattta

SEQ ID NO: 25368 - DNA, 1227 bp, Mus musculus
catgctttcacagcaaacagatttactcattaagtcatctctagccctgtgctggtaacttttattaaagccttcaaggtttcatgagtgacagatttttttttaaaaaatattaatttatggttctaaggattgatcataggacctcacaaattaagtgctctaccagtgaactacattccagcttccaaatgaaattatttataaaaaaaagtttgtgtgtatgtctgtgcaccacatgtgtgcctgatgcccacagaggcagacattcattgaaactgaagtcaccaatggttgtgagccaccatgtgggtgctgggaatcgatcctctggctaagcagtatctccagccccaccaaatgaaacttgtaaagaataattgtcaaccctgtcctcaaacatgtatcttaacactggtgtaaaaatcttccccttgggcttggagtgtagatatctgtagtagatatttgcttatcgtgtatgagaccctgagtttgaaactcaggagcctggtgaaaaacatttgaaaagccctaatcttataaataaatatgatggttcatacctgtaatctaaagcttctgcagcctttataaatgatgttgacttgagattgataatgaactatccatgccatctgccagtaacaacatctattattgttatttaaacatatttagtgtttctgactttgataagacatttaggtgtcaatgagatggcacaatgggtagagttactagtgtgatgacctgaatttgatcctggagtccacaatgtggcagaagataatcgactcttctacttttgtgtatatgagtattttgtccccatgtatacaggtgcactgcattcatgtatgatgcctacagaggccagtgttgtggataccctggaattggagatacagatagttcagttagtgagagctgggagccaaattcaggtcttctgctaagctatctctccacctcttagaactgacttttgagagttatgtactgacttttatacatgtaatatggcatacacatgcctgccctcacagcacatacctacccaaaagcagaaaaatctaaaaagttcttgcctttgccatcttttgtgtggctcagaaggagaatattaaaacgatcgaggttttgtaactatttttagcttttttatgagattaaagtttaatgtataatgaatgatattattacctgcatgtttctactttttgg

SEQ ID NO: 25369 - DNA, 1558 bp, Mus musculus
ttttcttggcgttaccatttttgaagcaaagttaacctagctttctagcttgagctttctttttggccatcttttaaaacttttttttttttttttgatctataaaatagacaagagatagttctacaatgtccaagtcattccagcagtcatctctcggtagggattcacagggtcatgggcgtgacctgtctgcagcaggaataggccttcttgctgctgctacccagtctttaagtatgccagcatctcttggaaggatgaaccagggtactgcacgccttgctagtttaatgaatcttggaatgagttcttcattgaatcaacaaggagctcatagtgcactgtcttctgctagtacttcttcccataatttgcagtctatatttaacattggaagtagaggtccactccctttgtcttctcaacaccgtggagatacagaccaggccagtaatattttggccagctttggtctgtctgctagagacttagatgaactgagtcgctatccagaggacaagattactcctgagaacttgccccaaattcttctacagcttaaaaggaggagaactgaagaaggccctacattgagttatggtagagatggcagatctgctacacgggagccaccatacagagtacctagggatgattgggaagaaaaaaggcactttagaagagatagttttgatgatcgtggtcctagtctcaacccagtgcttgattatgaccatggaagtcgttctcaagaatctggttattatgacagaatggattatgaagatgacagattaagagatggagaaaggtgtagggatgattctttttttggtgagacctcgcataactatcataaatttgacagtgagtatgagagaatgggacgtggtcctggccccttacaagagagatctctctttgagaaaaagaggggcgctcctccaagtagcaatattgaagacttccatggactcttaccgaagggttatccccatctgtgctctatatgtgatttgccagttcattctaataaggtgagttaaagcaacagatgcttctaatttcttttacattgtagtgcctattctgtatttatctatatcttttactctaattctgtagtctgatgacattgagttgatcaaaaattgttatacttttgagaacactatttggaaggtaattgtttttgaacaatataaaccagggctttacattaataatacaatctacctacaatgcttcttgccacaaagctgtcatccactggaattatcttgatggtttttttgtttttgttttgtttttgggtttttgttttgttttgttttttggcatcagtatgttcttcttaatcatatttaagcaggcttttttctcccccagtctgctttgttgaattgttttaagcatttttccccctgaagtcaatgtgctttccatttaggatgctagatttcagctttccatctgtcttgattgctgatttatatgtagtcaaatatatattcttagacaattctcttttttccttatctgtggctacagggaa

SEQ ID NO: 25370 - DNA, 1947 bp, Mus musculus
gagcatgacacctcttaagcaggctttgccactgagttgcaccgtccgtggaatataaatactctttttaaatatttaaagtgatgtatttttaatttttgtgcatttatgctttgactgcatgtgtgtctgtgaatgtgtcaggtaccctggagactagagttacagtttagatctgtcatttgggtcctgggaatttaacctatgtcctatggaagagcagtcaccattcaaccactgagccatctccagccccgttataaatattctccaatgtttttttcttagatgagtcaggcttttcatttgatgacgtatgagtgttggtgaccctcctattatgttgctgaagcttggtaaacttgtttctctatagggttctctaaaggctgcacattaaacacttgaccactgagcaacagccataaacgtttatctttaattttataacaagttaaaattggccataattagtacttttaaaaaaatatttgtttattattatatgtaactacactgtagctgtcttgagacataccagaagaaggtgtaagatctcgttacggatggttatagctgctggaatttgaactcaggacctttggaagagcagtctgctctatctatctatctatctatttatctatctatctatctttttaatgtaagtacggtgtagctatcttcagacactccagaagagggtgtctgatctcgtgatggatggttgtgagccgccatgtggttgctgggatttgaactttcagaagagcagtctgtgctcttaaccactgagccatctctccagcccctaagtagtactcttaaaattaaccatcctgccattccatacactatggccagtaaacctgtttgtttgtttgtttgtttgtttgtttgtttttaagacatttagtataacagaaaaactatcttcttaaatcttaaagatttagagtaaaacaaaagccgggcgcaagcctttaatcccagcacttaggaggcagaggcaggcggatttctgagttcaaggccaacctggtctacagagtgagttccaggacagccagggctacacagcgaaaccctgtgtcaaaaaaccaaaaaaataaaaaaaagaaagaaaaggaaagaaagaaaggaagaaagaaaagaaaagaaaagaaaagaaagaaaaggaaagagatttatggtgctgaggttttatacatgttaggaaagtgtactatatttatatctgattacaaaaatgatgatggtttggttgaaattaaggtggacaagattgaggaacttgatcaagaaaatgaagctgcattggaaaatgggattaaaaatgaggaaaatacagaaccgggtgccgaatctgctgagaatgctgatgatccaaacaaagacacaagtgaaaatgcagatggccaaaatgatgagaataaggaggattatacaattcccgatgagtatagaatcggaccatatcagcctaatgttcctgttggtgagctttaaagatttttctcgtccccttttctgtttctcccaacaaacttattaaaataagacttaaaagttgatcttatataagctctgatagtgtataaagttatatcccctggtgaattaattttatttttttctaacactgttctatatttttttttgtgtctcctaattttgtattatgttaccattcccactgtgttctctcctcataatggtttctaaaataacacatttctttttgttttgtgtttgttatatattcttgtctttcattttaagactaaagttaggtgggatcttgaatatcagttaagtaaaacaaaagggtaatgtgatattgttggtatttttagtttaggccatactggaattcacacatgttttctgattcaaattatattgacaggaaaaaaagatttgagactaaaatttaagtttacttaa

SEQ ID NO: 25371 - DNA, 1199 bp, Mus musculus
ttttatacaaatgaagaagttgcaaagaatactcattgcagcagccttcctcattatcagaaattaaaggtaaggctgaatataagaggagacttgtgaaaactaacaaacaatatactttacagaaataagtgagatacaatgtgtgtatgtctctggacccagcattatgctttctcatttttccaaaattgcctgggctttaaggagtttagcggtttttacaaacttgagtctcttttcattcaaatggttaagcaaggtttagtgttgccacatattgaatatgcctaatctgccagttaaaaatacttcaacatggggctggagagaaggctccagtggttaagaacactttctgttcttctagaggttctgagttcagttcccagcaaccacatggtggcttacaaccatttgtagtgggattttatgccctcttctggtgtgtctaaagagagccaaagtgtactcacataaatttttttaaaatattaaaaaagaaaaaacctcccaacaaaataccacatctagcttagtagcaaaaataaattgttatcagaatgttgatatacttaaaaatattgtgcagttatatttggaagattagggaggtggctcagttgttaaactgcttgctgtgaaagctccccagaacttgggcaaatacttgtaattctagctgtcaaagatggaaatggaggaggctggtagtaaaaccagctttaccagcaagatttgggtttgattgagaggccctgcattagtgaatgaggttgtaggcaatcaaaaaagattcctgataaccaatcatgtacttaaaaataaaattacgtataagagatatagagatacagcttagtggcagagttcttggtagcatgcataaagttctgactttgaagcactaaaaagaaagaagtagaaaaaagatacaattaactacctttggactgggtttcatggggcctcatccaaatctgaaagctctaaagcttctactcctaagtgtttcaaacaagagaaactctgcctgtatagcattcagttatctcagcacgttttctttaacaactggtggataattggtagccttgtattttaatgaataatctgtcctttgttttatcattttttgttgtttacaaatgtatctttttgtaatctatgtttcctgacattatggttataagaaaaga

SEQ ID NO: 25372 - DNA, 1756 bp, Mus musculus
ctgagccagtttagttttgtatgttaagattaactcatttgtaaaatattaaagtgttagcattaagtccttaaagttggactggatgttgtattttataattgatacatattctaggtgttttttaaaattacttagtctctgtaattctttttcccccttcagaaatttctgaataaattggcagaagaacggaggcagaagaaggaaacttaagatgtacaagaagcttaattcaaagaaaacgatggttctttgattttaatgttaaccttttttaaaatacaatactgatagttagaaaactactgtacacttttgttttagtggaaaataatagatgtctgttgtgtttaagtgttatagcaaaaagtacacatacggttaagttaatgaaaatgtttttgtttcatccgagtgacaacagacaaaagtacttcctaaagattgactgttgtaagctatggaaaacaacttgcaccactaagagaaagataacatagaaccattcagaaaaatgaaacttagtagtttgaggcttcaaagaaatgtcaacttctgattccattcaataaagaacaaaaccaattgtatttttttttacttttcatctgaaacattccacattttaatctgagccttgcagacttttcatttgactttggaagctgttttggttgcattgcatttttagagaacttcattcatgtgagattggccattcaattgcaggtgcagttttcttttaatgtcatgctgtttagatgataagaaatattaagaattggctttagatttgtaatttttttctcttgagttcctgctaggttttatattctagtagtcaatgttatttcagtgaaatgtaaaaatattcccgttctctttgaccagtattaatttcttgagaacctattgcctgtcacttgaatcctgtagctgtcatacatctctggtataagcaacatttgatttttgaagtgtgtaaaccatctatattttcaagatgtaattttacatttctgcatttcaaaaccagtttggccataattcttgacgcacgcttctaattcatgtacctgcacatgtgacctttgtgagcagaaatttgcatgtataatctgtgtttacttgtaactctctggttatatactgcttatatctgtggattcaagttactgaagtgaataccaataaaaaaaaaaaaaacttaggtcatgttgattggttggttaaacatgtttggatgttaaccaaaatatttgtccgttgtggctttttattcactgttaaatttttatgcatgctttaacaaattattcttaagtctatattggtgttctaaaaactactaaagattttggtttagagctgatggacttcttgttcttgttacataactaaaaatgagactttttctttaaccttacagttttaaatctgaggataaagaaattgcaaaagttcaaattcagagatatctgtgcctttaacaatagaattaaagtagcattggaaagattcgtcttgtcgctgcttcaaaatcaagaaggaatttttgctgtgttgaataatctgaagacccaagaacagctttaatttaaatcggtgacaaatagtaattgtctttcaaacactccgacagttgtatttaaaattataatttaaacatattgttgggtaaaattttagtaacatgcacaaaaaatccttgctaatctttagttttagctgttactaattatatgcttttgta

SEQ ID NO: 25373 - DNA, 1164 bp, Mus musculus
gtattaattgaaaaaaaattaacaaaagtctagtaaaatttataaatctggagctggagagatggctcagctgttaagagcattgtctgctcttcagaggtcctgagtgcagttcccagcaaccatatggtggctcacaaccatctgtaatgggatcggatgccctcttctggtgtgtctcgagagtgacagtgtactcacataatgtgaataaaaatctttagggctgggtgtggtggcgcacacctttaatcacagcactcaggaggcagaggcaggcaaatttctgagttccaggccagcctggtctacaaagtgagttccagtacagccagccagggctatacagagaaaccctatctccaaaacaaacaaacaaaaaattttctaaatctaaattttaaaatacagccatcttctcttcccctacctcatgtaacacgggaataagctctctaaatccctgttggttacttgttttgtggtgctggggatttagagccccgaaatagggaaccctctaacactaggctatattcccaacccaatggacctcctctttccttttttctttatttttattaaataataaaatttcaaaacttatgatagctgtttcatcttatgcagactagccttgaacacatgctatatctgatcttcctgctctgcctcttttttgggggtgggggggtgttgagacagggtttctctgtatagccctggctgtcctggaactcagaaatcctcctgcctctgcctcctgagtgctgggattaaaggcgtgtgccaccacgcccagctaccgctctgcctcttgagtagctaagattacaggcatgaggtacttacaatgcctggctatctgttcagtattcacaagagggaaaaattaatttcctgcaacagtgaagccctatttcaatatagattattgactagaaacacaaaagtctgaaaatttgattcagactaaagttcctactcaaatatgaattcaacagacatttttgaacatgcagttgtttgaaaatatgtaagttcaggcaatctttagaaaaaataatactcttaaatctacgttagaacgaggagctggagagataattctggctatcctataatgagaagaaaataaaaaacaatctaccttctaggagccct

SEQ ID NO: 25374 - DNA, 1207 bp, Mus musculus
cctaccacttgagaggcagagggaggtggatctctgagagtttgaggccagcctggtctatgtatggagttccaagacagctaggaccacataatgagactttatcaccagacagtcaaatcctctatttttctcccttaaattttgtttccagacaggttttctcactgtagctctgactgtcttagaacttgtgtttgttttgttttgggagattcaaggatttttctttgtagtcctcgatgtcctggaactcaaaaccagtctgggctggagctcacagaggcccacttgcctctacctcctgagtgctggtattaaaggtgtgggccacacaaaccctgtctttattttttaaatttatgtcttgtgtgtaggtgggtattctgcctttaagtatgcgtgtgccaccgtatgtgtagtgcctagggagtcagaagagggtatctggtccctgggactggagttgtaattgtgagttgccctgtgagtgctcaaactaaaaagacttccagtgctcgtagccactgaggcacatggccaaccccgccctggttttttggttttgtttttaaaggagatctcaccaggatgtatggctttctgactatcctagactggctgacaaaccccagggatttaccacctcattgctgccatgacagcatatgccaccacgtatgccaccatgttcggctttttatttgggtgctgggagtggaactcaggtcctcatgctctcaatgacaatcacctggctagtttttttgtttgattttgggattttgcttatttgagtgaggctcttgctatataactgtggctgacctggcatttgctatgtagcccaggctggctatgaacttatagtagccccttgactaagcttcccaagtgttgaaattattatcttgttagttttcagtcaacgtctctagaagtggtgggacctaggaaaatggagtcaatagaagaggccaactaaactctcatgcaatagccagctttactcagaacctcagatgggaccaaaatgtatgggggttaagaaagctcacctgagtaaggttctcttgagttgtttatgcgatcacaagaacaagccacgaatgtgtgagtgttcacattgcataaattaatttgttttcccagaagcatataaaggatagttaaacatttaataatagaataacagagccaggcgtgg

SEQ ID NO: 25375 - DNA, 1872 bp, Mus musculus
cccccaagttttcagtgaaaatcttaaataaaattccctaatagccaacaatgccccagttaatcagactgagaacatgtatttaacatgtttggaagtattttcagagcatcaggcacacttggaaaaagaaaataccttatttcatgctatttcttatagcttaagtgaggttagtgcgtttcttgttatacttaataggatgtagaggctaggaggtgcagaccttcagtcccagcacttaggaggcacattggctggtgggtctccgtgagtttgtggccagccagatgacattctttctctgccatgagtttgggggtaggaagaaccttagatagagttcaaccttttgtatttttctgggagataatttttacataaaggtctaggttgaatacttctgagaaatcacagtcatctgtaatgaacttgctttttcttttctttttcttttaatatatgatttttcaggtcaagagcaatctgaatcccaatgcaaaggagtttgttcctggggtgaagtactgacatgtctgagcagccggccgcttttggtggatgtagcacagtttccacactgggaaggcagtgttagaagactccattgtaaaagctctcgtcactgtgttacacttacgcattgccaaagtttttgttagtcttgcatgcttaataaaagtgctgagactgttactaagtaaggagctgtcacacaattactgaaagtagaattggccacgtggcttaatgtaaagacagcaatgggagaagcaccagtcaactgtgacaaagaaccaaattaaatcacctccaaatctcattgaattgtctgtctttgaggctaaactggtcccttaagggttagttgacacgttttaatgtctacactttgtataaatttaaattaggttctgattgttaaacagatttctcagttgcatttgtccatcaaaaataacctcttctggagaaaatctgttaaattttgaagtaagtaatttcacaagaatgtctttgaggttacaaggtgatggtcagataggagctagtctggcttttgcctggtgtattatcatgttaggaatactgagttctcccagtgttaatcttgaggaaatacagtttgaggcttgcatcttctgaagattgattgcatcatcgccatcatgtgtgaagtctaacacaggacccacaccagcccataatccaactgaagcactcaaaagacggtagcatgactctggtgctcttccttgctttgttaaccatcatgactatagtctgcagcacaacttttcttttaacaaagctagaacagttttggcttcttaaacttcatatttgagtaggttaagctgccatacgtgttcagtgtgaatagtgtttaagttgaaaatattgtaaaaaaattatattttttcaaaaatatttaaaaaaaaataaatgatagtagaaccgagctggtgcttgtgttattggtgcagacaacagactccagcgttggtgctcgcctagtgtgggcactgggcagccctgtgtgtgaggtgtgctgacaggaaggtgtactccagtccacagtagccaagcaggtgtctgtcaagtgtttgacttgcccttgcccaagactgcactgtcagcaatcttagccagccatggtagaaagctgtggttggtctggggatatctgttaatggcggagcacttgcttagtatgtgcagcagcataaatgtttcttgatgtgctagagctgcaggccatgtagccatttattgtatttgagaacagtgtattgctaaatagccaaggccagctttgaacttaggatcctcctacctcaagttcctgggtgctgggactgccttgctctt

SEQ ID NO: 25376 - DNA, 1824 bp, Mus musculus
tacacagaaagttcacagcgaaaccttgtctcaaaacatacgttgtaaaatgtacctatgaaccaaacttaaggaaagctcctagacatgaaagcttccctctcccagccccaggctctgctagaaaatgcactgttatgaaactgccctgacagcgtaaggcccctcccactagacgacttttactaattctgtagatttcctggcactgagagttatctgtgaggtgatgataaccagagacaacactaacagctccgtcaactgttgcacctattgtctgttcttacagcctggtggcactgttttatttattactgtagcctacagtactcatatcctgtttccttgcttcagttgaaagataatatggcactatctagaatagtgttaaactcttaattccttgcttacagtttagatatgttgtctgtgtgttggtgaacaaagttttgttctcctgcctacatcttttgggagacttcctggcacagtgagttctctgctggggctgtttttgctctgtgtgtgtgtgtgtgtgtgtgtgtgtgtgtctcacagattgagaccacagaatggagactgacgggagtgaggctcgcacaggagtggaagctgccattcccgagaggtgctttctttagtgagagggagacagaaaatccttttccttctatggaacagtagagcctgaaggggcaagttcatcactcaagccaggaaaacatctccgcttcactgaccggcgccaggcctcacagcttgggagaagcgacctacggtaaggaaatagcattgctctgcatgcttatgggaactgttagaaaggacaagaagtgcagaaccctgctggagcccgatccagccagctgctgaattctccatccgcaagtctccatcctcactcctctgaactggcgctgccagaggcaccttgggaatcccagcaggttcctgttgcaaatggccctcaccaccaactcattgtctctgcatgcacggctcctcccaggggctggcgttaaatctgtactcacttaaggtgttagattggtgtcctaatccctttattttgggaaggggccaagttactaaacaccttgacgtttgggcctgtgctgttgatacctcatgcagtatcaagtaactgttacatcctgagtacatttgcatttggggaggtggagaagggaatgttctggggccagagtcggggttgacatatgtgaaatcagttggcagtgaaaaatgctgagaactctggtcacctgacccatggcgtttggagtgagttttaacaaagtgaacattaaacgattttacatacaaaattcgactttatgactcctctttcctcagccactgctgtcagcttcagatactgaacacacgtggagccattttggacacagttgttactgtgcaatagcttgtgtttagaacagcacataatactgatggcatgaattctaggttcgtttgttttgttttgttttgttttgttttgtttttcaagacagtcttcaagacaagactctgcctctgcctctgcccagcctgtgctggaattaaaggcttgcaccaccaccacctggctaaggaatttttttttttttaaagatttatcccttttaattctttttatgtatatgggtgttttacctgcgtgtgtgtgtgtgtgtgtgtgtgtgtgtgtgtgtgtgtgtgtgtgtgtacactacaccacgtagtgcccttggaggccagaaaagggagcggttgtgagccatcatgagggcaatggaagcagaacctggggtctcatacgagcagcaagtagggctt

SEQ ID NO: 25377 - DNA, 1102 bp, Mus musculus
gttacttgacaatggacttgattataagctgagggactagagaaatgactccgttaaaagtactgactactcttccagaaaaccagggtttgattcccagtagcttatattatctgtaactccagtctcaggcacatacatgatacacagacaaaacacacaacattaaaaaaaaaaaaaagggacataggctgaatggaaaactgagtttcttttctttttctttttgatttttattactttatattagtgtttaccctacacttatgactatatagtctaccacatacatatagtacttgtggaagccagaacagtgtctgataccctgtaactagttagcgagtgggagctaggactcttaatcatagaacaacaaccaatgagtccttttgactccagctccctgaagatactataaaaatttcctttgaagcagagcagtagtggtacatgactttaatcccaggacttgggagacagagttaggctaacctggtctacagagcaaattccaggatagccagggctatatagaaactccatctcaatagtaataataaatttcctttgaattgaattggggggggggttgtttttttgtctgtctgtttgtttttttgagaattgaattttttttttaattttccttttggaatggtaacaatatcagagattgaacctagagcttcaggtgtaggaggcattccctttgccactgacctacccctagcccttttattgaattctatatttgcttttttatttttagacagtatgtcattctgtagctcagtctggcctttaactctcaagcttcgtaagtgctaggatacaggcatgagccgtcatgcttagcttaattgaattttttttttctttttaagtttaatttttgggctgggtgttgtgatgtatgccttaatcccagtattcaggaaagaggcagaggcaggtggatctctgagtttgaggtcagtttagtctacatactaagttccaggataactaggactacaaagagagaccctgtctcaaaagaaatccatccgttcctcccttctgtaactgtagatcagtctgtctgtctttcttttgttct

SEQ ID NO: 25378 - DNA, 1140 bp, Mus musculus
tcagacacaccagaagagggcatcagatcctgttacagatggttgtgagctaccatgtatgtggttgctgggaattgaactcaggacctctgggaagagcagtcagtgcttaaactttgagctatctctccagccccgcccatatttttcttgttttgagtcagtcttgttatgtagccattctagttttgaactcactccttcctccatttgcctgtacaattgtactttataacttaataaattatatatcctttaccactcaattttttaaattgattttgtattttaaaaaaaggactactaaaggtgtgctttgttcctgatgatcaaactgtcttaagatacataatacttgataccaaatttgtcctcagtttaactatggactcaatttttctttctttttttaaaatgaccattttctaacctttactgcagataacctgacaattctttcaggtatggattttatcataagaaaacagacttcccttttttattgttctctctctgtctctctctctctctgtgtctctctctgtctctctctgtctctctctctctctctctctctctctctctctgtacttgttttttagagggtgtgtgtgtatgtatgtaacagccctggatgtcctggaattctatttgtagaccaagctgacctcaaacttaacagagataggcctgcctctgccccccaatgatgggattaaagatgtaaagatatataccgctttgtatttggtgacattgctctttacctctttttaagcttgagatttggtgtaactccttacagtaagtattttaaatttctagtttccagtgtagttgacttagaaagtaagattgagctggtggaagggaccctagtaacttgaatgtaagatgggggaactatcttaatttaggttttattgttaagaacaccatggcaatggcaactctataaaggaagatattttattagggatggcttatagttcagagtccattatcatcatggcgggaagcacaaaatcatgcaggcagacatggtgctgaagaaggacctaaattctatgtcttgatcagtaggcagtagaagacagattcacttcatccaataagttgacacctcttttagtgccactt

SEQ ID NO: 25379 - DNA, 1172 bp, Mus musculus
ttagctttggctacatattaatcccagaatacaggagacagagatagttagatctctgtgagttcaagactagcctagtctacaaattgagttctaggacagccagggttgttatgcagggaaaccctgtctcaaaacaaaaaaaaaaaaacttaagatgatacacataccagcaaatactaaatttgaatcttgagtcctttagatactacatttataggaaattgttttgaattttagaacagtgtctcactgtatcctgagtataggcttatttataattggaggtaaagctaggtggtgctatgtccctgtaatagcaacaacccaggagggttgccacaagttttgaggccatcctagttttaggtagttcatggttagctatagctttgaagtgagaccctaacccaaagggaggggcaggtggttagggagcaaaaggcgggtgtgtgaagaaaattagagggagaaagttgattttgtttgaacattttcagttattgccttaaaattactagttgggataatgaatgaaatgttgcttattgactccttacctatgttaagctgagttctctttgtgtgtgtacaggtacaacagaatagctcgggaatggactcagaagtatgcgatgtaattaaagaaattattggataacctctacaaataaagctaggggaactctgagagagagaaagtccttttgatttccatttgactgctttctatgagcccacgcctcatcttcccctgtgcacatgtttacctgacacagcagtgctgcgtgttgtacatacttggaacaacaaactagaaatactgtacttctgtaccaacattgcctcctagcagagaagtgtgtgtgtgagaagccagttctccgggcataacctaggtgtgagactaaaagctttccttattgacttaactttggataatggcaagatgtgaggggtagtaggtacacagtgtgtgcttggatgggaggaaaagctccagtgacccataggagattgtccttaagtggagtccatccaatctcaaacagtcataaaaagcaaggtgaagaacgtgaagctgtttctatattcatttcatcctgaaggacctacaacttaggtgaaagttatgaccaaacagattaaactacatgctgtgctttaaggtc

SEQ ID NO: 25380 - DNA, 1151 bp, Mus musculus
tagcccctttccataatctttggtttgtatgtggtttctcagttaatacatagctaatagctcttatttttcttatgtttttaactgctttaggcctatttcgatgtaagggtggagatgtatttgatggaaatccgtgtgtatatttaagaccctgttgctcctctggagcttgtacgttcacgaatgattcatctgtgtaataaactgattactacagtcattacagataattttgtgtgaataggctttttgatttaaaaacttggtctagctaagattagtggtggatttttcctcacccctgaaatgttttcatctatatttgttgcatttcaaaatcatgaaacaattccagtttacatactaaaaaagatataaaagtaattttattaaacaaggtagaggcataagcttaaaggcattttcatgaaacttatatgtgcaccattccaggaacatgactgttaaactaaataaatttgctttgttaatgaaactgagcagcatttcaccaaaaccttgtgacagtctcttggtacatagggcatagaatgcaaaggtgttggttgctgtttgttaagttaattgattgtaatcataaagagtagctgaccgaacctgggaaacatgagcacaatcttgtattggagagtctgtgttgttactttgcactaacatttgcaggatgtcccttggttttaaattgtactgtatgtggctttttgaagtcttcccttgactctagtaaaatgtagtttgaaatttgtaaacaactgttaatccagaaacattcatgtgaactaggctagttacctcccctcgtcccctttcctaacctaaatgtaagccaggccagcttgaaggccaatgctctttagtcaccaagatctttgaaatgcatctttacactcttgcacaaaaatcgaggaataaatgaccactgcttttggttttaaacttgttcacctgtctcatctctcagtgtcaatgttcctccatctcaacctgtcagctaaaagtctcttaattagcagctggctgcttacacaaatttcaggaatgctatattagcatctccttggccctgcaggtaattgctttaaccagttgtaaaagaacaattcagaattgaactctaacaagatatt

SEQ ID NO: 25381 - DNA, 1229 bp, Mus musculus
tttatgaataggttggaccgaaagtgagggaccccgtttttaaaataggggacctgtcacaagtgctggggcgcaccggaaaaagcaagcaaaatttccttttttttcctccctggggaatcgtaaggggtgcgcagagttgggttggtgccatgggttgcaaggaggtaccattagattttggggggtttgtagtgactcatctggaaagacttgctcccctagtctccagaaaagtggggggaatgaaggtttggcagccgcaccctactgtgctccccgggaccctgggtggtctgagagttgggtcatccaaatgggagtacccaaaacgagatgcggattaggcccttgatcctctcgccttcccttgtgcccccttgctgtttggagccctcggttttgtagtgcgtccccctcccagcccaccccgccccccgtcgcgcgggtttgcccaggaagcactagggaagggggcgtgtgatcgctggctctcgcccccgcccccgccggagcagccccagggccgccggcaaacagagtccctttcaagttttccgctggggccgcctggcgggggcagtgagcgcggtcgccgcggacttgtttggagcgcggtttgaacgcccagcgccacctcaattgcccccatcggggggttcgggtgtacggtcctagcagtggagactgtttaaatgagatgggtagggggcgcctattggcctaagcttgacctgaccctctcctgaaaggctacagtgccttgagttgttggtggaaacccttcccatctcctttttgagagtagtatgaggagactgtcctcacctacttcgactgtgactgcatggtgttgatttagccgttccttagatgagagtcaagctggagcttgttgttgggggggggggcgggtagcgacgcgctctgcagctgtcgcccccctcagaacggaaattgtcctccttagggaggagggaagggtgacagtttgattttttttttttttttgccccggggaggggtgggaacagctgacggaggttggcctctgggttactctgtagtcctggtaagcactataggtgcctccccttcatcctggcaggagctggattctctaggagaagcacttagctaaaggggctgcagaagctaggcccttggctagctggcttgttagtgccttatttatgtgtgtgtttgggcccggtttcccagctcagcag

SEQ ID NO: 25382 - DNA, 1125 bp, Mus musculus
ggccaggaatggtaactaacatccataatcccgggatttaggagctcgggttgttgcctctcccgctccccaaacacacacacccaagaaaaagcatccagtggccctgtaaatgtcctatccttggcctcaagactgtggctgtgaccctgcagaggtcatccatacctggcacccgctttcagctgtgtgtcttggtcatgtctccctatcctttgccaacctcttcctccaagaaggcctctagcctcactggtgattccaccagcccagctctcacgcactcctgcgggaagggtcagtgtggccatcccacttgcccctccctccacagtaacacagggcattggtaggaaagggagaaccactaaacatttagatctagctgtaggcctcctagggacagagcaccagcccctcccaggacgtaagctccaccccctatgcagtcacgctcttctggggctgagggtagggtgaggccatcaccaccacctccggtgacctcattgccagctggcattatgatgtcactggcctagcattctgagttcctcctgcatgtgtatctctaagcctccaggtggggcactcccctgggggcctgtgacagctgacccctgaccaggaagaagtgacaggcatggtaacaatttggtggcagggtagtaggataactgggtcactttgccttgggctgttctgtcagttgcccaagtagaacaaaggcagccataaagcaggtgaccagcacttagctctgggttcaagttctaccacggctgacagcttgaacttttgtgaacctttgtttctttatctctgaagctggttaaagcttcctgtctctcaggtaccactatctgaacatgtgaagcatacgaatgcaacagcagaatagatgctcaacaaatgcgagcccctaggaaagggttcttagttaaatgttagttgaggtgccggtttgaaaggaccagactctgctttcagggggtagaggctgaagtaccccccactgctatcaggtggtcacatgactttccttcttcccaatagccagacacccaagcttctgaggctagggtctggggcaagaactctgcgttcccatccctccatctgttc

SEQ ID NO: 25383 - DNA, 2404 bp, Mus musculus
ctggaggtaacagcaccgtagagggaggtgtgcgggctctcccatctctctggcggtccatacctacccctgagtcctggagcccacctttcctgtctgcaagtgtgggggatacccaagcccctagggcctggaggtctggctgcaagatacctgttcactgccctaaaagtcagagccacatcctgagatgccagcaagccatggtttgcaggtaggggcctggcgttcccagtgaggccctgggactctgatgcccctcctagggcctgtgtcaagatattcccacataggtaccaagtttctatctcctagacatgtcctaaagcatctagtctgtaacctaagactggttctgtccctagccctatctgaggggttttgtctatggaccctgtggccttgagaagagtcatgtgttgttgaactcccaacccagccccaccccacccccaccccccactccataagatagagtagtcccagtgctgcctgccctgcctgcaggtaggaagaggcagctcattcataactgtgagcttggtgtacctgcagggatctgtctacccgtgtagcagagcctggctctctgtcccagatggggtgaactagccgagttcaggagcagcttcgcagtttcccatccctgcccactcgtctccactccttgcaaagtggcttgactccataatggttggaaaggcatcctagtcgtggccttttggccacctttctgaccgcagcctgcctctctctcatgtgtcttgcttacctaccagcacaccaaggcacacccactccagggtggacacccatgtgtacacctgccctgtaggcctcctcatcatagacttggctgcttccccgccacatgcacacagcagtgctcacactcacttgccagaacgcagctgtggccccaggtaaacgatggccacctggtgctaggtgcctttgggcatctgagtggctcaggaggcctctgggtgctctgggcctttgggtagcccagctgggtcatggctcctcctttggccaacctggcctggccgagatgaccggaactcttcggggtaactgcccgtgcgttctccatgcccgtccctccgtcattgagccggccacggggagcatcttgcaccaggcccaccgggaccctgactgaactctctccttgtttttgtctcccgccccgccagaaggtgatgcttccgtcgggagccgccttccggtggtttcagtgatttcagtgacggccgggaacccaaagctgccctctccgtgcaatgtcactgcccgcgtggtctccggcaagggattcgggcgaagacaaacggatgcacccgtctttagaaccaaaaatattctctcacagatttcattcctgtttttatatatatatattttttgttgtcgttttaacatctccacgtccctagtataaaaagaaaaagaaaagaaaaaaaattttaactgctttttcagaagaacatcaacaacaacaagagaggtaaagacgaatctataaagtaccgagacttcctgggcaaagaatggacaatcagtctccttcctgtgtcaatgtcaatgtcaatgttgtctgtgcgggagatgctgtttttgtgtagagaatgtaaattttctgtaaccttttgcaatctagttactaataagcactactgtaatttagcacagttttaactccactctcattttaaacttcctttgattctttccaaccatgaaatagtgcatagtttgcctggagaatccattcacgtttataaaggaataggtggtggcaccgtgtagaagcccctctgtatccatccatgtgtgcagaggggccagagcccactgggactgggagttcctgacccaggcccgaccatgttgcaccccatcgtcccctgattgggattccccctaccccaacagtgatggattttggagagatgaaaattctattcatttgttgatccactgagatctggagagcccacatctcagtatttctgatcctggctacttcccttagagaaaataagccctcttttctcagccttgctcgcagcagcagaagaaagggcttctctgcgtggtcccctgctggtaggggtgggtgcccagggggccccctgcccgtggccagctccctgctgaggaacatgctgtttgtattgttttaggagaccaggctgttttgtgaataaaactgaatgcatgtttgtgtcatgataacactcctggcttcttgctcttgggttttggggggctggcttggggctggggctggctagagtctcttgggaaggagaagcctttggacccaggaggtagggtgagagctggaacaggcatcctggaaacagcacggaacccgttgtgtatggaagggttggtg

SEQ ID NO: 25384 - DNA, 1178 bp, Mus musculus
acgacgcgttgcgctcggactcgccgccgctgtgccccgcggccgacagcaggacttactactccctggacagccacagcacgcgcgccagcagcagacacagccgggggccgcccacgagggccaagcaggactcggggcccctctaaggccccccgcctcgcccgccccacgtctccaaggagagcggagaccaccgactggagagggaaaaggagcgaacaaagaaataaaaatatttttattttctataaaaggaaaaaagtataacaaaatgttttattttcattttagcaaaaaaaattgtcttataatactagctaacggcaaagacgtttttatagggaaactatttatatgtaacatcctgatttacagcttcggaaaaaaaaaaagaaacaacaaaaaaaaaaataagagagatgggccaattttttgactctttaatagaaacctatattgtggtgccttttgctgtacgctaatctggggctcctggagagccgtctggggtgcagtgtgagggtgggcgcttgtaggatcccaaactggtgggggtgagaaagggcagggaaagaagagactgtgaggttctaatggctctgaggaaagtggacaatgaggaagaaaatgaagataagatgtaattgtattttccccagtcctgagcagagaaggcagggatgttagccttagagctggaattgagattgggttatctccaaggacactggcctccccgctacagcaactagaatggggaagggtcctccccagccctcacagctgctaagggaaagaggacagagaaggctgtctccccaccagccccctgccgagggagggggcagctctaccaggggcccaaccttcagggctcctcctccctggcggcctccaggacatcctctgtcctctgcagcgccttcgtttacaggtcgtcttttctattttacgcctgcatgtcctttgcatttcggattctttagattgaatgcatggtcacgctgggacccagaagagccactccgacagtgtattcgattccccttttagcaataaagtaacaccatgtccttctcacagcccagctcccaacccacctatgacttccatcttccaatcctgccctccccagccagccctcacaactggatccaatgctaatttgtcaaaaa

SEQ ID NO: 25385 - DNA, 1203 bp, Mus musculus
ttttaaagagggaggggtaagtcttagaccaagacataatccactaatcagagtgaacccaaggctcataaatgaagatttttctgtgaaagggtacaagatattgctgtagaaggcagcctgtgtggctgttacatagttggtctcttcgtttctctttctctctgcttacatctttagctactttttagttttgggtatctttttgtctgtctgtctgtctgtctttttgtgaccctgtcttcctaagtagcttaagcaggtctagaattgtcactcctccaacctccacagcccgcctgtttagtttagttgtgtgctggtttcctggtttcctatatccagcctcttctcatggattttattgactgccttacctgatgcttccctcaccctccttcctgctcagtccctctgatctgctgctcactcttaacctaaaggaagcagccattcctcagcctcattaccccaaacatcaggaaaaaaatccagaaagtttgacaatgaaacccccaatccttctttgaactttagatctctcagtctctattggaaggtgggagtaagacctgggataggaggaacatggaactgtaacagataggccagcatctccagtgaggttcatctgactcttagtaacatgcatattaaactgtcctggccagagactgacattgatcccgtccagatggcctctgcaggacctgggtggttcagaccaacactgagaagaccttaagctgtggatctggacacacctcggtccttaaagctttaaatgacctcttcactgagatactctaaagccaatgtctttttcccttgcaagctcagtcagggcttaaggacaaccatttgccaggaactctgcttgccttacttgtcaatctaaagaagctgattcctctgaagtgggacctagaagtatgggggaggcattcttggagaagtctcacatgtcatccacgctagccgcacctgagacgattgcatgcggatccggaagctgtgcttcccgcttctactcagggtagcgcaagacatcacccgttgttgctggttggaggaggcacatgagtgaccccaggaggagatggtgctgcagtctccactctcataaatggcctgagtggttcccatcatgcatgtcgtgtactcactcagcagagagtacggtggatgagaattgtagggaaa

SEQ ID NO: 25386 - DNA, 6283 bp, Mus musculus
ctcagcagggcctggttcatctgcagagctggccgacaacccaggctgggctgagcgctaagcggcgtgccccccttcccaaatctcagaagggggggctgccaggcagtcgtggtcccagagggggctggtcgcaggtttttgggtgaatgtaggtttcttttttattattgtttgagagtaagggcatagcctacgggaataggcactgcgggcaccccggccctggtgcggctactgtcctcagcccagctcccccctctggtgagtgcgcccgcccgactgtgcggggctgcggttggggggagggggagcgggatcatctgaggccagagccgctgccgtgcgcggggagggggagcggcgggagcgaggggagggagaggggagggacgggctaggtgtctgctgctccgcgccactgctgctggcgcttggtcctcatccccagcagccccctctgcagctaagggcttaccaccgcagcacctcttttgcttcgcctgcctcttcggctctgcggtaggagacagccctgctggggggtgggtgacactgtctgggtttgggtgtgggtcaggcccacaggggaaagggaggccgtgactcggtgtcccctctgcatcctactctgctgtgcagcgaaggcccctcccccacatcctctctttggggtcactggaaagcagagccaggcctgatctctgtgctcaatacggcatatcctcccctctcccccccccgccccccggtcccccgacttctcaagtcgaggctgctgagggtctggccaacgggtagttacggcggtggcagcagaggctgcggtggcaccagaactgcgacgcggcgctcccgctccccccctccagagaggggtgtagggcgagggccggcgggtgggcgccgcctggcgggcaggcgggcagggtggctggcctggggaaggggcgcagtcacgtgccggcaggcgggtgggcgcgtacagtagggcgccccgctactgtactggggagtcagtgccctgttaccgggtctcgtctgtctcgtctctcccgcagatctcgcgagagtggctgactggctgtgggggttgcggcggcagcaggcggagccggggagggaaagcagcggcggctgaggcgactgaggcggcgggcggagcggcaggcggcggcggagcgcagcatcatggcggaccgagacagcggcagcgagcagggtggtgcggcgctgggctcgggcggctccctagggcacccgggctcgggctcaggctccggcgggggcggtggtggcggcgggggcggcggcggcagtggcggcggcggcggggccccgggggggctgcagcacgagacgcaggagctggcctccaagcgggtggacatccagaacaagcgtttctacctggacgtgaagcagaacgctaagggccgtttcctgaagatcgcagaggtgggcgctggcggcaacaagagccgcctcaccctctccatgtctgtggccgtggagttccgcgactacctgggcgacttcatcgagcactacgcgcagctgggccccagccagccacccgacctggcccaggcacaggacgagccacgccgggcgctcaagagcgagttcctggtgcgcgaaaaccgcaagtactacatggatctcaaggagaaccagcgcggccgcttcctgcgcatccgccagacagtcaaccgggggcccggcctgggctccacgcagggccagaccattgcgctgcccgcacagggtctcatcgagttccgtgacgctctggccaagctcatcgacgactatggagtggaggaggagccggccgagctgcccgagggcacctccttgactgtggacaacaagcgcttcttcttcgatgtgggttccaacaagtacggcgtgtttatgcgagtgagtgaggtgaagcccacctaccgcaactccatcaccgtgccctacaaggtgtgggccaagttcggacacaccttctgcaagtactccgaggagatgaagaagattcaagagaaacagagggagaagcgggccgcttgtgagcagctccaccagcagcaacagcagcagcaagaggagaccaccgctgccaccctgctactgcagggcgaggaagaaggggaagaagattgatcaaactgaatgaaacacacacacacacacacacacgcatacacatacgtgtacacacacacacacacagccacacacagagaaaatatactgtaaagagagaaaataaaaagttaaaaaaaaaaaaaaaactccaagggagcaccacccacagaacctccaccaactgacagtttctcttcttgacttgccacccatcgctggatgttgtccactttatccaccatataaaacagtaagcagctgctaaaacaaaaaacaaaaaaatatacaaaaagtaataacattatatgaactgtgtttcctacttgattaaaaaatataaagaactgagtgtttatttccctaattaaccaagaacttttgtacacgtttaagctattattattaaaagtgtttgcaaaatggtcaagattataatattgctgaattatataaaaagtccttttcatgttgagctaacatttgactttagcacaaaaaaaagagatattttagaacacgtaaaataatatttttagtttttctcattttgttaccaaatttcaaaccttacatggaggttattatagtatatttgacatcctatatacctgtgattagagatgtgtatatatatgagggctaggcatgctgtgtgtctgagctttgtctaaatgttatgcagaagtttgtagagttcaaggtacgtaggtttaattcatgcaaggtaaacaataagtgctctcttttatacaatatgcattgcatctggaccttaaacatataaaatggtcagtgaaacttctgtgaacatgaagaaattattaaaaaaggcatttaaatgaaatttgctaagttgtgatttttatggttggaaccaaagttattcaaatagtaaaagaaaaaaagagaaagaaaaaggaaatttcccataatatttttctgcatctgtttgctttgactgagtagatgttttgttattattgtgtatatgagatgtacttgtattgttcataatatatattttttattatgtgtagaaagattttaaaaacctaactaacgtgcagcaatttccagtgaacctgtatttggatatcaggtagtgagtctatttgtggtcactagcactgtctcctaaacttgtgagaggtctgaagctatcctttgatttttgccagtgctattaacttatgtagacctgtttaaaagcaaagcaacaccattatagttatcctactgagccatggattctgagtttcatttcaaaagtgaaagccaagttggtgtatgtaaaggatttccatgtagctgtggtgctagttattactggctacattatatgctaagtgtatttgtgttcccaagtgtacacgccttctgtcaaaagtatgttctattatcactcatattcaaagtgtagggtatgaaaacgcaagcttaggagagcactttaccaagctggtgtcctccactgaaattgtttgtaacgatagtcttttacaggttttcatttaaagatgtttatgtgcttttaattgacaactaacttcttgctgctgtatagtaaaatattaatatattttttatcattaaactgctgcatgactatcatctttgagtgaagagaaaatgttataaaaaagatgccttaaatacagtacattttggtttggaattctgtagaaagtattttggtaaaaaaagaaaaaagaaaaaaagaggatcttgtatcttgtctgacagagagagttctggacatgcaattgtttcttggcaaagccagccatctagctctacctgctgtatgtagaagaaaccacctgtaggactgggaaggtgtcagcacctctcccattggacagtatcggcctaggaaggcagaacagttatcttttttgaaggattttttttttttcctgctggctctttaggttttgatttgatagttttaagctttctggttgagtgtgttgtctttgtttttgagatctactgtatgtgttgaatagcaagctattttcattgtactgtgcattttcccattgtttgcttttcatattcatacaatgttaaatatgaggtgaccgtaaaatagttaggagtttctttacttacaaaatcactggaaattattaaattgctttcccctccccccaaggtgcattttttattattttcatatagtaaagttgagcttttacagtgcataatgtgacatttggaatgcttatcaactgcatgtaaacattaataacctgcactttttgtcttaaggtttgttgagctgttttgttcactgtactttaactgtgatatggaaaagattgcattctctgtgctgtttctaattaggaaagagaattgctttgattttgtctcttgtttactatagcttcttaaagttaagccttgtgctacgagttgttggagtactcctagatcagtgttttgtagtagccagcagtcagtagtgcaagtcaacaaaaacacagcaaacttaggcaaagtgtcctttctttgagatgcaagttctttcgtaaggttttctttagggtcagttacctaaagtaaaacctttcttacctgtagacttcagattctgcttggaatcctaccggatcaagaagcacatgtattgtgcagttgtctttacactattaacagttaacacaatcttactaggactttgaatccattgtctgatttatggtcagtgggtttaaaaagaaatccacatgcagatcttttaagacttaaaaagtggtcatagagaagactgagtgactgtaaagatgctctttttgtttaaagcatctcacttttctctcccattgacctcctaacctccccttgcccttctcctgtttcatccttccccctacatttcccctcccaggtgctcggtactttaccaaggttctatatttcagtgtattatgttaagagtctcttcttgtttttattttactagtgggtagccccagtttgtgctgaaaaaaaggggggggtatatttgaccatatgtgttactcattgacaacagtatgatcaaatgtgccaaaaacaagcaaacagaacttaattcatgacaagtatgccttatttttattgatctgctttgtcttacaattaaggtccaagagcttggttaaactatgttatatgcctaagtaaaaaagaaaacttgaaatgcattgaaatattgatgttttttaaaatgagagacactgtcaagtaatttgattcaaagatcagccaccagatttggagagtgagtgagtgagtgagtgagtgagtgagtgagtgagtgagagagtgtgtgtgtatgtgtgtgtattggttgtagtggtggtagtgatgatggtatttgtggcttttccccccttttaaattaccaaatcttattttaaagctaccttttatttgtgcctcgtatttatcatgctgatgttagaagcagcagtcatccagccacagagggagctaaagttaactaaccagaactgtagaaatcattcatgcctttgacaacaaaggaagttcataggaaagccatgttggcttttcctctactagacacatgttggaggtagatgaatatttgccaaatgaggggaaaaaaagacaaagtagtcaggaaagacaaacggttttccagcttctcaaaagccatggaaagtagaaaccaaaaccaatggaaaatttaaaagaccttgaaagtctcactttctagtcccatgcaggggttaaaatttgactcaaaatgaaaagtctatcaatttttggttttagacccttacatctagagatggttaactattccagttttttgttttgttttgttttattttaggtaatggagaaagctgctagtgattttaacccctgctgaaaggagacagataatttcatttgggagcaaatacttattgccttgagaaatagcactgtaatagtttatgttaattagtcatagaataacctttatccctttcaagctatgcaaattattaaataggtataaattagaattgaattaaagagagttgattatattgcaatcagatggcattcacaaacttaactggagcatatacaaataaaatctattagtttaagaggttttttttagtgctgacat

SEQ ID NO: 25387 - DNA, 1153 bp, Mus musculus
atggcctggctttggggtgttagtaagtttccatttagcaatgatatctgagtcttactgggcaagtgcttaagaaactggaagtaaatagggggcagttccctcttgtgtgtagctttctataagggtcatataacttctccttggtttatgtcacatattggtgtttcgtgaagtgagtgttctttttgaaaatttaagatggatgctttctgagggatggtaatagctaaggatccaggactgtgacttaaccattggcagtgttatagctaccttgatacactctactcagagaacaaagagtattcttgtgaatgtgtgttgctgtactcagaattgcaaaaaggaaaaaaaaaaaaaaggaaaggaaacaaactgagttttctcaatggaacagagagatgtatttttggctagaattgttttttataagttaatgatcttattctcttttcttttcttgttgtttttttacacacctcatacttaaaaccagcaagtaagaggtctcttttcagattattttggaaggtctgaatgtgttctggatggggtgttgatcgtgacgtgttcttcccgtcgtgttctgctggtcactgtggctcatagaattttcaaattctgttgaaaattcagtggtgtatttgaaatgagactatcttctacaacatggtatggatgtgtgtggctagattccatgatgtgacatagttgtggagccatagctttgatttaatttaaatagaaagtttaaccatagtccagattttaggtttatgtacaggaattgtgccaggtacttgtctaaatgtggaccatttttggaaatgaaagttaatgaatgtggatttgactctagataattctatactcaaaaatacaagttaaaggctcacatcattagagttacctacatttgatggccttagctctttaaatgtggatggcattcagcattatatctgtgaatttccttaggaaaagaaaggttcagtctttataccttttcttggaggctaaatttaccacatatggaagtaagaaaattgtagcaagtggctttatttttttagtggagtttaaccagcttaattaattccttttcctactttgaatcacttatttcccatgtataaataaagggaaagat

SEQ ID NO: 25388 - DNA, 1128 bp, Mus musculus
attcagtctggtttgccaatccagcctgattgaaataagtaaccaatcacttgcaaactgaaaaactgtccaactcctctaaggttttgacaaaataaccttggctgatgtgggaacattcccactttgatttctgacctgacagcgaagattcatgtttgacatgatttcaaacctgacagtgtctgtttaaggagccatggtacagtttgctaattcaatcccagatacctgttgattacctgtaagatctagagttcaacgtagccagcagccgtatccctgagtgctctgtgcccatcagataacatgaagtaagcagagttgggacaagccacagctttgagtattgacctcagagcagagccccagattcaagatttgtatctgctttcttgggagtcactgaactgatgtcccacactgcgttacttactgtagatgctctccaagaggaggcccagagcacacatccgaattgcttgtggtactcagagagggggtgctaactctgatgccctggccaaattccagtttagggatgtgggtcttcttgtcattctagttggaaatgtgcatcactttccatttttcctgttgctctcagtgcaaactacacaagtctgttcctttgctccaatcccaagtctccaagatactggtatcacacgggccaggttcatgccttatcttgatacacaagagttggagaatgggagcttggcatcaggatgccttacactgggagggtagactcttgtgaggcttggggatggaacctgccctctttccgcatatgttagggagcgtgcactggttgggagcttccaaccataaggtgtgagatgaaaccaatttcccctcttttcttataacatgatgagaaagtcttttgggttttcggtagttggggaaggccggagttctgcagctttaatctgggtaactaaggctggtataatctgggtaactaaggctggtttgagcaagactttggtaaattaactgggttctcagatgccacagactccgagagaagtcaccattatttttagtggccgtgatggagtccccctgtagccattactttaagattacatgcagagttgctttattttgagctttttg

SEQ ID NO: 25389 - DNA, 1162 bp, Mus musculus
caaaactgctcttaaaaaggaatactactgcttctcaagtgcctactacacaccagtatatttcgtggattattgcactaaaccttcaaaactattctgtgggccaggaggaactgaattcaatgtccagcacacacaaaaacagatctaggtatggcagcacatgcctgtcatccaagaaccagggaggcagacacacggggtccctggagcttgctggccaggcaattgagcagaactggtttcaggttgagaaaccctgttttaagaacgaaaagacctttgtcctccatgcacaatcgcatgtgcacgtgcatgtgcacacacacaaattgtgtgaggtggtgctattaactgctcccacctgatcgacagaccacagcttgggttaagtcgcaagctgcagagctgggacgtagatcctgaaccccgaccctgtggttctctgtgttgtctgctactcgtgtgtgctcctgactggtgtggctagatatccacaactgggtggctctctacccctgcagtgacaaccggaagtgctgagctcagccccctgcgcgcctgccctttgaacccgtgacaagcttttcctggccacctccctgaaagtccttactctttccccagggcccagctgtggcctaacatcctgtgggtgtgtgtggctcacgcacggcaagggcagttggttcctggcagcctgtgtgatctgctgtgtctgcctttgcctcctctcatgtgaccactgtctaggcgcaggagagccccgttccactgggtcatcatggtgcttcccaggaaggccttttcctggacggcccttcttactcatctgcggtgctcaggcctttatctcactttctcagagaccagactctgcctcccagacccaaatgcagtcaaaactaccgttccctttggactttattacctcaaccccaagctgtttgattttggggggcagattcacaatggctctgcgcaccggcatctccctgcccagcacggaactcccatatgttaaatgagtgaaggaaatggaagcttgcctaggccccatgacctaagggagcccagaaggcaagacctgtccccccatcctagcttcctgaaccaattcccagcagaaaccaaaccagaagaacagcccgctcagcgcaga

SEQ ID NO: 25390 - DNA, 1144 bp, Mus musculus
ggaaaaagttgtttgttgttgtggtaataatttaatctcaatcctgctccacattagatgttttttgttttgttttgttttgtttttgttttgttcccagatgaaagacacaaaacttgtatttatgataagccttaaaagcactagagctgggcagatattcactctctaagctattatgtctacttccctaccaataaccctgagttagaatttaccatgcgctgggcagtggtggcgtactcctttaatcccagcacttgggtggcggaggcaggtgtgtttctgagttcaaggccagcctggtctacagagtgagctccaggacagccaggactgcacagagaaaccctgtctcgaaaaaccaacccaacaaacagaacttaccatgttacatctgagcagctcttaagtccaattagccagccctcatgcccatgttttcataacacctaccccatggctccctttcctctctccaccttcttctctttctcctggtttggtcttgcctcagaccccaagcccaggaaccgaaactccacctctctctcttcggcccagctataggctgtaggcatctttattcaaccaatagttttaaattaatgagcaaggttacacggcaccattttgcttacgtgaagatttcctcatccctgcaggaaaccgtggccagcattacaataaacagcaacagacccaacctcaacatgttgtaattccagtgataagggaaattgtgagttccaggtgggctatatactgaatttgagccaaacttgggccatgcagtaacactgtctcaaaaataaaataaaatgaaataagtgagaaatcaaaagaattgggctaaggtgagagactcaaactggtatattttgagcccttcaccttagtcactcccttttgttatggtctgtaccctcttcacagagacgtaattaataagaagctatatgagatttgaacagctccaaagcaggacatttcaattcctggatgagtgctgtactttgagatgtagcaaatttttaaaaagaagtgaaagttacaaacttttgctgaaataccatttatacttagagtcctttttgcccctcttcccaccctcagagtctttagaattagttacgaatcaact

SEQ ID NO: 25391 - DNA, 1159 bp, Mus musculus
aagatcaacttccaccagcctgcttttcccatgtgtcactgttctgggttgtggcagcagcagactcattagaaaagcagattgcagcctgactcatctgcctgcctgagtgagacgtgcagtagactgggctcacggatagtgtggtgcatgctgtctgctctgtacaccagaggctatgggtgcctgcctcagaccatagaaagccctcagaggagacagtccattgtagggcaggagctttgtcctggaatttcctggccttcatttgtataatgtcatgtacttactttaggggaaaaggtgctatggcctgccctctacagggcctttgtgctccctatacctggccaggtcctcccaaggtctgagcaggatgctgtagacaggtgagcttacctgtctcttatttggtagcatgtctgctatcactgtccacggaggacaccagaacctgtggctgtaacggctatctaaacctgctcacattggtcctaacccttctctctcatattacagcagaagaaatcctacctggagcggagcgtcaaggaggctgaggacaacatccgggagatgctgatggcgcggagggcacagtaggagctgctgggaagcgccttccgttctgatccctcacatcctgtcacggcaggggctgtgcagggtactgccctccctctgcccagcagccccatctctccatcaccctgagcccctcaggtcccaactgaatgtctgccaacccctgctcaggacactcttctttcctggggcaagccaggagctctcaacagagggaggactggagggcagatggagaaagctgtccaagcctgtcactaggcatgtgggttagaccaggttagaccaataaaaagctatgtctttactttatggcatgtgcttttctccaccggaggagagagaggcaagtgtctccctcagcttgtgtcccttttttcctcccctttctgtcctgggcctctgtgtagagcatggaggaagaagacgacaagttgataggtgtggtggacagaggcacagttggcttcagggttccttccctgttttctccccagaattctaaaacaaagttcagtggcgagcagcatctctaggctctggtcctgtctggccatggtgcgcccgtggccct

SEQ ID NO: 25392 - DNA, 1222 bp, Mus musculus
cagaggtgacgcatgcctttaatcccagcacttgggaggcagaggcaggcggatttctgagttcagggccagcctgttctgtagagtgagttccaggacagccagggctacacagagaagccctgtctcgaaaaacaaacaaacaaacaaacaaaaaaagaacttgagctggggttgactttttacacttgtaatttcagctactcatgaagttgaggcaagagaattttgagttccagactagtgtgggtaatgtggaaatactgctgggttgggatgcaaggagaaagtgttcgtctaccatgtgtgagagaccattggttgactctctagcacacacaaaaacaacaacaaacaaacacgtcacttgagatagaagttgtggtggtttatgccaaggaattagagagagattactagaatagtagtatgccacttattgacttgtagtttctatttttattttttttattctttgttagggaacactgcactgacttatgcttgtgctggaggatttattgacattgtaaaagtgcttcttaatgagggtgcgaatatagaagaccataatgaaaatggacacactcccctaatggaagcagccagtgccggtcatgtagaagttgccagagttcttctagatcacggtgcaggcatcaacactcattctaatgagtttaaagaaagtgctctgacacttgcctgctacaaaggtactttctatgttgaaatacttataattgtttttataacagcctcaaatatttgaatattatttgggttaattttgtattccttcttcacctatttgaatgaactttatattttttttttcttgtcgtataaacttaccttataagatataaaggccattttaacttgtatttctgtacaattcctatatatatatttctttattatttttgtttgtttagttatgatgttaaccaaacaacttgcagattttaggatttctgttatttaatactctttgtcgaatttttcccttaaagagttataaatagatctactgatagacagttgatgtagaaatcctgaaaaagccttgtgtggtggcgcacgcctttaatcccggcacttgggaggcagaggcaggcggatttctgagctcgaggccagcctggtctacagagtgagttccaggacagccagggatacacagagaaaccctgtctcaaaaaaaaaaaagaaaacctga

SEQ ID NO: 25393 - DNA, 1189 bp, Mus musculus
cctcaccgtcttcctctggaatcaacataaagttcagaaaccatgtctcgaagatatgactccaggaccacaatattttctccagaaggtcgcttataccaagtggaatatgccatggaagccattggacatgcaggcacctgtttggggattttagccaatgatggagttttgcttgcagcggagaggcgcaacatccacaagcttcttgatgaagtcttcttttctgagaaaatttataaacttaatgaggacatggcttgcagcgtggcaggcataacatctgatgactaacgagctaaggctcattgctcaatggtacttattacagtatcaggagccaattccctgtgagcagttggttacagcactgtgtgatatcaaacaggcgtatacacagtttggaggcaaatgtccctttggtgtttctttgctgtatattggctgggataagcactatggctttcagctctatcagagtgacccaagtggaaactacgggggatggaaagccacatgcattgggaacaacagtgctgcggctgtgtcaatgttgaaacaagactacaaagaaggagaaatgactctgaagtcagcacttgctctggctgttaaggtgctaaataagacaatggatgttagtaaactgtcagctgaaaaagtggaaatcgccacactaacaagagagagagtgggaagatggtgatcagagtcctcaagcaaaaggaagtggaacagttggtcaaaaaacatgaagaggaagaagctaaggctgagcgggagaagaaagaaaaaaaaaacagagagaaaaggataaatagatagaatcacggattttataaactccttagaggcatcaattcacttaggagctgtcctggccttccaccccggaagtgttttcttgtattatcttccttaccttggccatcggggaaataggacattacatactgaattgggtccatgtctgtccagttggatgctttattgtaatgatggacatctttataaacatcttaatctcaacacataatttttggaataaaacttggaaagattaaaaaaaaacaatttcattacttaggtaaatgtagtaagagtttgtacactaaccatactaagactaccaatcatacaagcgcgttcagttgggtgaagtttgataataagtccttgttagaagctg

SEQ ID NO: 25394 - DNA, 1203 bp, Mus musculus
gttacagagtgactatattttgaatgtgtgctcatagaaaggtatcctgtccgtccctagaagggtaacccttcgcctaatgcccctaatgacagtaacttagaaaaaaaaaagacaagagttatccctgacgtctctgttcaaaactaaaatggttaaggaacaggaatgccacgccgactgaagcaaccctcgctttcaactcaccttgtcatccgccatctttccccgccgaacttgttgcgcacgcgcagccccgcctcctcagggcaaaggctacttccaattttagaggcacttccggggcatttcgaggggtgggggtggggtggggaggaaggcggggcgtttttggtgacggctgtggcatttaaggcagcaaccttgctccccatctgatcttttgccgtgtgcgcgcacgggtaaaggtcggaacgtgatgatctcatgctccacgcgatgatctcattcgccccctggtgcaccgtgtgcaggatctcctcgcccggcttccgccgtccgaggaactcatagttactaacctgtgcggagttcgtagtgtcagtacgcttcgtaggacagcacgtaccgaaacacgcgaggactcgggaaagcagacgcgccagcagctctgccctcccccaaggccgtccctatcccgcccagcgtttgtttgcgcggtgccagttggccgggccggcggtctccggcgcagagaggctgggcttgtggcccctgcagctccggaggtcgcgttgggctgagagcacaggccagcagaggctatgctgggcaaggattatatgctggccatcattctggtcaactgcgatggtgtgcaccgagggtccggttgggaggaccaaaagccgaggggagatgagggatgaaggaaggctacccgaggttcaaacaccgggtggtggtggtggttggcgtctcggggatgagaaccagggaataattgaagcttgatctttgcatgtgctatatttaagatgagagttgatacctaggtttagggctgtctcctatgggatggagcaagggttataacggtagtgttgggagctctcgaaataacatgtgcccttgctttaatcccttgttcctgtagatgacttgtggggggaccaaaatctggagggggaaacaggcctaccccctggctggagaaagatccgtgatgctgcaggaacttat

SEQ ID NO: 25395 - DNA, 1128 bp, Mus musculus
caaacatgaagcaaggagtaaggcggttagtttgtagtcatcagagaccatactaggaaaagaagctggggaaactgaggggctcaggttccctggaagcctctttggcattctggccgaatggggttctggttagagtcctctgaagctattatgtgatcaggactcctacgttctttttcaagctccagaattttgagataatctttagagaagagaacacagctgtcagtagtgaggagcaggtggccgaatgccctcagcccagcttagctcctaggcagagaaaaagagagcacacctgatttccttctttgtttttcctcctccgcaggatggctccctcttgtcctccccattcttcaagggcttcctggcaggatacgtggtggccaaactgagggcatcagcagtattgggctttgcggtgggcacttgcactggcatctatgcagctcaggcatatgccgtacccaacgtggagaaggcactgaagaactactttaggtcactacggaaggggcctgactagaccctttggggaaagcaggacgagcatgttgggcctgcaggtagagccctttctatcacagacactctatctggcttcccctgctattattgttcatgtgctaactccgtctattctgcctctttcatccctgcctttcttcctgcagagagtggacagtgctttgtcagcctgcaccccagactccttccctccctagttccatgggactgaccccaaaactatgggccattaatcccctcttgaagacctaactggaatgtgcggctgtctctgatcctcagtattctctctggtgatgtaccacagttctatactcaatctcctacaaatgtgtcccagcccctctgtcccttgctagctacccaggccacctagggtctggtgtgggccatgagtgtagaagatgggggcgtgccaggcctagcccgcccaagacaggctcgctggaccctgttgctcttcctgtccactgccatgtatggtgcccatgcaccgttcttagcactgtgccatgtggatggccgagtgcccttccggccctcctcagctgtgttactcactgagctgaccaagctcctgttgtgcgccttctc

SEQ ID NO: 25396 - DNA, 1375 bp, Mus musculus
gggcagtgcttgtggtgctgaaccaagcagtcaatgggctgctcatgtcggctgtcatgaagcatggcagcagcatcacacgcctcttcatcgtgtcctgctcgctcgtggtcaacgctgtgctgtcggcggtgctgctccagctgcagctcacggccatcttcttcctggccgcactgctcatcggtctggctgtgtgcttgtactatggtagcccctaagtccttgaccacctccactcacttgtgactgtgtagattaaatgcaaccaccagagttacctcccatccccctgtaatccccagcagccccgtaacaagtgccttgtaagagaagctaaggtgtccaggttagcctttgcgtgttcaggtgggagagttacccctaggaggcataaagagtgggcttggttaaggaaacgcctaactgcactcctgaattctttcatactcaagaggtgggatccccaaacccaggcctgtccttgaagatccctgccttgtcctgcatgtacatggctgcttcaagtgaagcttcagtcttcttacctgctgtggtcactcctgaagactctgtcccgaagtttggtgctggctgctccagcccagcatgacttccatataaagatgcttagtttgccccctccacagagctgttcccctcacccacctgttattctggaggggtcagaggaggccagggcttgactcatctcagggaacattggccctgggccctggcttaagcctacactcctgacccctgtgctaactcgagagccctgttgaagcctttccctctgaagcacttaggagctactgctctttccactctccgtggtgtcctcgcttccaacagctcgggagggctctgcagagtaaccagggaccaggtccagaaaatgtttatagccaatcagtgtctaactacttcagcaataaggtcttaataaagtgttctagggtgtggggtgcttcctacaaccatgtacagttgtcctgtcttctgtgtttcctactcccctcagtcatgattttactgagtttcctaagtggttttggaggaacgtctagagtgggaggaaaggattctcccagctgtcgccagtgtcattgttcattttgggagctcggtggatctgagatgtttctgtccagttatggtgggacatgcccgtgatcccagctctgtgaggcaaagcaggaagaccttaggcttaaggtcaggctgaactgcttgatgagaccctgtctccgtagaaccattgagagggtgtggtgacacaaacttgtgactctgcttgagagatagaggcaggactaagagtacaaatggagctggtttagtggttaagattatatgtttctcttgtaaa

SEQ ID NO: 25397 - DNA, 1234 bp, Mus musculus
tgtgggtggggagagtcacatcctactacaatattgttgtaatcaagactaaactaataaaacaagttttctactaaagcacacagaaggacagacagaagtaactttaaagcacacagagggacagacagaagtaactttagtgtgtagtgctgtatgtgcatagtaccacacagtatgttaagtgggctatagccagccaaaaagtgaacagtcagcgaaagctagacccctggtcagtagttaatgcctacagtgaccttaaagcatcagacacatttcttcccatacaaaattctactagggactgggtttaaagctaagtacagcaaaaccactttttttttaaaggcaggattgtatataaccatagccagcccagaactggctgtgtagccatgagccactatgttcagtgaaccgtacctctttccttccttatcctaacaacttcgaaaaaataccctttataattttgtgtagcctttataatttggatatgcaggatattcatttgaatcccctttcctcagcttttggccaagagaagacggtgtctctgaacaatctgagtgctgatgaggtaaccagagccatgcagaatgtgctaagcggcaaagcctgaaggtctccactgaggactgtgagcgagagcagctgaacctgctggactgaagacagtgtggggaaatgtgtgctttgggtccttataaagcttacgctgtacagtgtcccttcagaatgtcctcttcattaccttctccctcttactgcgcaacactgaggcaaagtagttttatataaaaatactcctttatttctcctcaaaaaaaaaaaaaaaaaaaacccaccaggtgccagctgtgatgtcgtacgtcattagccaagttgctgaagagcatgaactaagacaatctcaagtgcaacaccacactcaggtataacaaaaagctaccagcttctaaagtgaagtaggagaccctagggtaaatacgccgcggggtaaagggtgatattgagcagccaggtcatccatgggtagcagctatctgctggagcgcgtgtatcctctcctgaagctgagtttcctcctggagcttttctagggcctgcagccctgactgctgcaggaaggctcgggcagcctgaggagagagaaggacagacatttaaaccctaaagcccaaatcccggagccccatgggccagcccacttcttagatggtgcattcct

SEQ ID NO: 25398 - DNA, 1122 bp, Mus musculus
tgtgtagtcttggctgtcctggaactcactctgtagatcaagctgtccttgaactcaggaatctgcctgcctctgcctcctgagtatttggattaaaggcgtgcgtcaccaccggcatagtggactctttcttaggtgggagggtttcagttgagaagagacattgacagatccaggaataggtggtggagcagtcatggaaactgagagaggtcatctttgagctttaggtggacttagatcactaacagcatgcgtataaactactgctgtccttttacagatcattgagaagaggaagaggatggaagcagatgggtaagcggcatccctctttgtctttgggcctggtgagaactgttcaggatactgatcctatgctgatctacttctcttttgatttcagggtcgaagtgaaaagaccaaagtactaatctctagttccagctgtcaccacgtggctgttcttagttgcttgcttctacaattcctcagacggttgcaaactgttgttgtttgtgaaagtttataaatgtttattgtataactctttatagatctgtgtcccacatgctaagattaatggcaatgcaacaccatgtccagcatgttccattaaatgtagttaaacctgctgtcttttctgtgttgggcattccttcttaagggtcccatgaagttccggagttccagaagttgtattgaatgttaggtctcatctgaggtgcctatcagcatatcagagctgacgttggctgccagttctcccaacatacctcagtccctacctgttccaggatcctcctggtgtcataccctaccgtttacctttaccctcaactcctgggcttccctttctttcagcttctctgattcttatataacccatccattttggttacaactctttttggccacttggcagctgaaccaggtaactccctccctcctgtcacctccttacatggcctgggttaggatcttgttcatttcacccttccaaatgcctctggcatgctcttccctcatctacactaaacctccaccgtatctaggaacagtcaagtcaagtgttttcatttcttcttttcattgagtctgctgtgtttttcctgtactgat

SEQ ID NO: 25399 - DNA, 1202 bp, Mus musculus
aaggtgcctgctgcatcctcccccctcctccagagtttgtctctgagaacaacagaagcctttgttttcttccttggtcattttgcaggctgagctgctgtacaagaagaacccgaagttactaaaccagttgcagtactgtgaggaggcaggcatcccactggtggccatcattggtgagcaggaactcaaggatggcgtcatcaagctccgctcggtggccagcagagaggaggtgaggagggcgtcagacgctggctggcccaggcctgtttgagacctgagcctcctataggactagcttataaggaacccgagggcttaggctttaactataattgtggcatttaagatctctggggtgcctaactgggcacatgtcccagtgaaccaaacctggtaactagaagtaggcactcagggaacagctaagaggaagatattcaaaccttcttcctctgttgtggccaggtggatgtccgaagagaagaccttgtggaggaaatcagaagaagaacaaatcagcccctctccacctgctgagctgagcaaaccagtagaggaaacaggattgatcttaactgaacgaaaacaaaactgcatatgtacttaaacagtctgcatatttgccatccagcagaagactgaagggtggtcagaacagaggctttttgttttttgtttttttgtttttgtttttattattatgttatcagtaatcactggcaaaaaaaaaaaaaacaatggccaggtactacactgtcggggattataggtggactaaccacgtctctgcctcctaaattcctgtatggacttgagatggcttcattgaaaaaccacacggcagatgaacaacctatggccaaaacgtccaataaatgtctctaccgctaacctgtctgtgtccttgatgcctagcgctaccttcctctggtcctgacactggtataaaaaggaggaagccttctcaaactcactgagtcttgctagaggttcttgtttccagtgtccattcggccccagagctccctccactccgcccagttttggcgatggaactcctcccacccacggtcctaagtggggggttcgagatttccaagggcgtgcgcagcgtgcaaggatgactctttgagaggcggggtcgtgctcagagccaatgagaacttgagggggcgtggagggcagggaatcttcca

SEQ ID NO: 25400 - DNA, 1188 bp, Mus musculus
tttttattttatgtagatgagtgttagtgcctacatgtgcatctgtggctggtccccacagaggccatcagatcccctcagatctcaattacagatggctatgagctgccttgtgtagtcagtgctcttaactgctgagccatctctccagtcccattatgtgttttcttggattttcattcggttttgttgtgtggttgtttgttttgtttcgctttgttttttgagacatactaagctcaaactcatctaattcaaggctagccttagccacctggtccttctgtctccacctcccacgcactgcaattacaactgtatatcatcacactaagcttgtcatccaagtcacacagtcggttcatttcttacaccttctcagaactatcccatgtccagctggtaggtcagaaggctgccctccttccctagttgacctcaatgagttggacttagtctctcaggatcccaactatagcttccatgtttgttcctcgatagcatagtccagctctgactcttgcctgcctctctctaggcttcagaggaaaaggtacggaccacagagacgcaggtgcttgtggcatctgcacagaagaagctgctggaggagagactgaagcttgtctcagagttatgggatgctgggatcaaggtacaggggccatccctaggctggctgcaaacttgggagtactagacacaaactaatacaagtttacatagtgccttcttcccattgtttcttcaaatggagcaaagaacaaggtgcctcttacactacagtgtgtggtcttcatgtgggactccgaacagagggagcagggtctgtctctgactctgttgcctgcatttgggaccctttcctcctagtgggttgcttaatggagccttaataggagaggaggtgcctagtcttactgccactcgatatggcggggctgtttgatatccatgaaggcctgtcctttatgaagagaaacaggagggatggaggggagaagtgaggcatagggaggggatactgtggtcaggatataaataaataaataaataaataaataaataaataaataaataaataaataaataaagcctaaaaaggattgcttgattgagagagctttgtcaagtatattctcccaaatgttcttatatgctgttaacagcctttttattatcaatacc

SEQ ID NO: 25401 - DNA, 1199 bp, Mus musculus
agtttctttcctgaaaacagtaagatccttagaaaccagattgacccatgtgctgtttcttcccatttgtcagctactactgcaatgtctgtgactgtgtggtgaaagactccattaacttcctggaccacattaatggaaagaaacgtaaggcatggaggtagttggtggctggagctgggttgggttttaaaggtgtgctggagggcaggtgtggtagagtggttttctggggcctttcgtttgttcgtttgtttgcttgcttgcttctgagtatccctggctgtgtgctacctgtgcatgaccacagaggccagaggaggacgttggctggccttgatgataatctgcccagtaaataggagcaggtgaggctgagagcttcttttagccatagttatttttgttgtgtactttattatgaaaaggtaaacaagtaaacaaacctaaaaaagccagggcgagactttcccggggggggggggggtggctgaggatgttataatgacttgtctccgttgttaacctcacccagatcagcgaaacctgggtatgtccatgcgcgtggaacgctccactctggatcaggtaaagaagcgttttgaggtgaacaagaagaagatggaagagaagcagaaagattatgattttgaggaaaggatgaaggagctcagagaagaggtgaggctctgctaaccctgctccccagcttggagtgttttccttgtggaccgagggtggccctcttcctccgctcactctcctagctccagttttgttcctgggtttctttgtactagggcatctttgttcgagatccatgagaaacagctcaaagcctatccagttttctttggctttttagattagatctcttggggtggggagggggggcaattattcattcattgattttttttttttttttttttttttgagacagggtttttctgtgtagccctggctgtcctggaactcactttgtagaccaggctggtctcgaactcagaaatctgcctgcctctgcctcccgagtgctgggattaaaggcatgtgccaccacgcctggcgattttgttgttttttttttaaagacaggtttgttttagactaattatgggttcatatccaagagaagaaagttcaaagcctcccattgccatcctgttcccatgcttgcacacatagctttccctaaa

SEQ ID NO: 25402 - DNA, 1100 bp, Mus musculus
ggaattcaagggcgagatggggatgagggcacaggtgacagttatacaagtcttgtaaacagatgaagctccctttgctggctctacactctcaataaaggggtccactcacaagactgccacagtgacttttctttgatccatgtagttcctcacctgtgtagcatctgaagcactggaccccgcaaagtgtgcactccatccattactgattaagtcagcttttcgcttaatgagttctcttgggatttggccactgggattgttgcataaatactccatatgttggctcaactcctggcttgggaatttaaatacagtgttgagcatggtggtgcacagctgtaaccccagcacttgggaagcagaagcaggatggctgtaagatcacagccagtctggtctgtataataagaccttctatcaaacctcacagttgcaggccaattgcaattcttgaatgctttccttggcaggattagttacaaatcctagagagattacccttgtggagtggatcattttatattttcaaggcaggtagggcaaggtctcagtgaagggagattctaacaatattcacaccttgggaagtcacccattcacctcagtaatggctaattagtgttttctctagtgcggtgagatcatctgccatttccattataatcgtgtgttccaggttctgtaaactctgggggagtggtaaatggaatgacctggctaggttctatgggggttatggtgttaagatggtggattgagaggtgaagacagggtggggtgggggatttagaacagaacaatcctgtataactcaggaatctctggaagagaagtttgtaatccatggagaaatttgtacttgaggtgagtgcacctgttgtcttattgactccatttattcattgagtgttgagaagacaaactttgttttatttgagacaaaatctattatcccctgttccagtctcccgtgtactttgggattacaggcatgcatgaccatgtctggttaagtcattagcatcttctggaaccaagtgtcaagaatcattagtagggaatttccctctgataaatgttacctgcaatatcca

SEQ ID NO: 25403 - DNA, 1289 bp, Mus musculus
gttagttaaatgaaaagaacacacaacattcatagcaaaacatctaaagtcctatattgtgtctgagtgaattcacactgaaatatggtggctaactggaaagataggaattttgagcaaattagttgatttcagtatgtaaaaggcatattgacattatatagtgacaggatacatatgaatatacatctgggagagcctctttaagcagcgaatttccaaggtatgtctggaataacagtttacactttgcaaagcttccacttgggtggatgaggcagtgactgaaaaacttaaggtaacagagatgagggtggagggtggtctctggacgagcgcggagctggcgtggtttagtggtgcgggagaagaacggaggttacacccggactggatgagggaagcgctctgctcccgggagaggcgctggagtccacgcaggcgctgtgggtatccaggaaggcgtcagtggccggaacgggacccgattggtctgtcatctcagaactttcaaaacatccaaatgacgtatgtttctctcacagtcatgtaaatatatccaggaagagatagacgggccagctttagctcagcggttacttcgacagtggttcagttcattaccagctattcgtagcaggttcgaacaacacaaccaaccacttacctaacccgtgagtgtttggttcgagacccgcgggcgctccctggcccttttgccgctgcgaatccgcggaactttggctacttttgcatgttaaaaaccctcagaacttcttgaataaattgcagtttcaaatactgcacattttatgtagttccagaaaaaaattgggggtggaggggttgtggggctcaacaacaacaggagaatttaatttttaaaattagagtacttagtaatatttttgttccaatagttaggtatacttgtatcttttatgtcatattcctcttgaaatcgggaggatttttttcatttagttaaaaaaaaatatatttttttatgtgattgtgtgactgtatatcacatatgtactgtcttaggtgctgggaaccgaattcagcttttaacagctgaatcatctatccagcctcttttgagtttaattgattttctgcgatactcctcagagttaaccatttcgggtgagctcatgtaagaccttttcagtgtgaagacacaagttttatttccaaaaacttttctgatgttaacactttgaaagtatttcttctttgggagctgtatctactacgttctccaaggacctgcttattgctttctt

SEQ ID NO: 25404 - DNA, 2131 bp, Mus musculus
atctcttctccaggaatgtctggccacaggcaaggccatgactcactagagcatgatgagcttcgagagatattcaatgacctcagcagcagcagtgaagatgaagaagacgtaaacatccttgacactgaggaagatctggagagacagctacaagacaagctaaatgaatccgacgagcaacaccaagaaaatgaaggaaccaatcagttggttatgggaattcagaagcagatagataacatgaaaggcaagctccaagaaacccaagacagggcaaagcgccaggaagatctcattatgaaggtagaaaacctggctctcaagaacaggtttcaggcagttctggatgagctcaaacaaaaagaagaccgcgaaaaggagcagcttagctctttgcaggaagagctggaatcacttctggagaagtgagcttgttgactttagtccttagactagtcagctcaagaaaaaattattttcagagtaaggtcttgaaatactttttttttctttgaaatgttcttattccctgagttttgttgaaaattttttgattgtttttcagaactatggtggtgggttttcattcttaagaaaataggattacatagacaggtttgttgtagggaagatataagaaagatgagtgaaatgaaaacacttgaacttttaatcacaggactttattacaatttgtttcctaaaagtttctagtcctttttttttttttttttggtgctaagatcagtaataagctagcctacaggcagtgaagttaatttcttttaaaagaaatatatttttttttacctcagcaagtttccatgttacagaaatgcaagtttttcataaaggttgtttcttatacaataaaagctactaattttcactgtttatgatgttgttctatgaatactgaaagttgaggtggttcatggagtttaatgactgaatggtgtagatcaagataaatcctgttcttttgtttttaggaaaaggaaagcaccaggtaaggaaatggagaaattcattgttgcattatatattaaggttcaggtccacccacttcatctggaggtttatgaacactgggtctagagccttcttaaactatcctagtttttatggatggatatctgtatctttttcttaagcactaaggttatctgtaaaatattggaagcagttatcagataaactattccacatgcttagattaagattatattttaactattgccaatttaactgctacaattatttaatagactgatgtttattcatattgtttcattagtatttcccagtatgaaaacctgtgtcctggtctgggattttaaaatttcatatacagagaaaaattctgtgtgtttttttaaatactaaaaagctgcccctaggcaaactaagtatgaattcagaatggaagtcatctggcccctttcattgagaacttgccttctgtattgctgttgacggctgccagagcctctgaagccctaactagtctgaacagcttgaggtcaaggcataccagtacatatcagtgacttgattgtatgatttttgggccgtgtaatttgtagcttaatccgtttgcttctattttcttctctctgaaatggaggtgatagtattaccagccgcacagggctattggactgacttaaatcataaggcaggcttacttagaacagtacctggaatatggtgagtgaagagttaacaaagaaacgttaccatttactaaactggatcataaaaggcattaaagagtgatagagaatagtaaggtgtttacaaagaaattttttatttttgactcactctgtatctcaggatggccttgaactcagttctctcaatcaagtgctgggactgtaggtgtgcatgggcaggcctggcttaggcaacagctgttttaattaggttttgtttcaaattcaacaaaggctcaaaccgtctattttggaaaaggtttagaatatctacagcataaaaattgactcaacttattcctgtagttttcttgtttgtttctggatatttttataataatactaaaaatggcataaggagtaattatctgttaataaaatttaaaagatgaagattgagatctaaatcc

SEQ ID NO: 25405 - DNA, 1143 bp, Mus musculus
gtgcatcagtaagtgtaaaaaaaaaaaactcaccaattttcttaagagccagttagtttaagaggtaaaatgatagaagtgtatttatcagtggaaagggataaaaaggaaagagtcactgtctcttcatatttatgcctccttcatttcatacccaggactgatttggtaggcctttccttcctgctctgttcttgcttccacccgtttctgtctctcttctgagacagggtctcactatgcagccttggcaggcctggaactcacagagctcagcctgcttctacctcccaaatgctggatgaaagatgtgcatcatcaccctcagtgtctaataggctggtcttgtctgtagggtctcttctgtctcatccttctaaggcagaggttctcaaccttcctaatgctgcgaccctttaatacagttcctcatgttgtggtgacccccaaccataatgggatttgcacatccctgggcattccttccagagagcagtgctccttgctggccccagttctgggtgagcttgggactgagttggcaatgctgttctcacctccagtctaccctttaaggccaggggtggagtgggcaggggatggccaactgtgtgacagacgctggtctggtcagtgaatgacgtattgtaaatgttataccctgttgggtttggggctatgcaaatctttctttaggaaggagtaaagttagctttgaggagcacttttcaggctcatgcttataaggtttcttaggattggtctatagcagcctttgctgtgatctgacttaacctcctactgaatcttggcctttgtttattgatgtcagtgttgaggaggagttcagttctatctgaatggaagctgcacactcactgcaaggcccccaagatctccaggaattcttcagtttatgtctccatggtgctcactcatgtctggctctagcggaatatcaacttctgcatgttcaaagactcaaggcagtccttctcaagattcctttttaacaattttaaatttatgtgcgtgcatgtgtgtttgtgtacgtgtgcatgtgcctttgtgtgtgtatgcgcgcgcgcacatgtgtgtgcatatgtgtgtatttgttgtgcatttgtgaagctcaaatgataa

SEQ ID NO: 25406 - DNA, 1167 bp, Mus musculus
ttgaatttagccaaaagaatcaacaaacccagactatgagcatttaaaagactactggtctggatgctttaaaaatatctatttcattttttaaaaaaagaaggtagggaaactgttctgattaaaaccaagggcagagacatggcaaccaaatgcaattcatgccccttgatcgaattctgaatttaattttaaaattaagattaaatttaaaagaacagattaaaaggacaatactgagagcatttgggaaggtctgatagtagactgtgtattattatactaatattaaattcttcaaatatgatcactcttttgtgattttataggagtcctagaaggtatgtgttatatcaaatgttctgatacctatagtgcttgcccatggttcttggaggatagaacccgtgtgtgtgcacatttgtgtgcaagtaactagtgaatttaggtttgtttggtttaaaaaaaaaaaaaaaaaaaaaaaaaacaactcagtatgcatacttcaccatactagtcttttgacttttggatacctttgagacattttaaggtggaaccctgaaaggttaaaagtgagtcaccaagtcggtggtgatgacaattccctttaatcctaatgccccagagacagaggcagatggatctctaagttggaggctaaagaacaagttccaggacagtcagggctacacagagaaaccctgtcaggaaagtacaaaacaaaaccaagtcacctaggagacagagggtatggaagtcagctctcaaggcaagggggtggggggtggggggtggggtaggctgtcttcagaaactgaggggtggggggtgggggtggggattggttggggaagcaaagtgaacactgaacattttggcttcctcctccctcggaattctggagagttcctgagatgctcagaagcaaggttgccatggtgagatttaactatgtatgtgaaactcactcttgccccatggacaaagatggagggtgtgagggacaccccctcccacaacccccagaggacagaaattcacacaggtgtcttcatgaaagccaaaggaaaacccctcagtctggtgtgactgagctcgtgaaggtgtgggagagcacagacgggagcaggtcaggggggcgccctggcagtggccggtgcttgg

SEQ ID NO: 25407 - DNA, 2755 bp, Mus musculus
ctctagtctaggcactttggaagcgttttctcttttacttcttacccaaagtggatactttctagcttaccttcattttatggatgtgaaggtatttagaaaatggatggatggtgcagggaggctgggtagacttgttgaggaccgcaggtccctcttgacttcttcttcagctcctttacacacagagacagcctgggcgaccactgtattcccagtggttgggtccaggcattcactaactgtagtgcaaggttgtcactgaccccatctgaccatctgctcttcctctttctctgcagaagctgctgatgggagctctaccctgggagggggcgctggcaccatgggtctgagcgctcgatacggaccccagtttaccctgcagcacgtgcctgactaccgccagaacgtgtacatccctggcagcaatgccacgctgaccaatgccgctggcaaacgagatggcaaggctccagcaggtggtaatggcaacaagaagaaatcgggcaagaaagagaagaagtaatatggaggccaggccttgaaccacaaggcagcctccctccccagccagtccagctcgtccttacttgtacccaggcctcagaatttcagggctcaccccaggatactggtaggagccagggccatgctccccgttgggaaacagaaacacgtgcccaagccaacaccccctctctataccctagggagttgaatatgcaaagagagttctgctgggacccccctattcaatcagtgattgtacccacatgggtagcagggtttgtgtgtgtggacatacacacacacacacacacacacacacacaaaccatgccacactcccttagttacagctgaactcctccatcttccaacccaggcaggcttatccatctcctgccgccctctccccaccccacccactccttcagtccctctctttgagcaaggtagctgggctgttggggtgaccggtgagctaagccggctcctagttctgaacggtagggagagtattacaatcttttggcctctccttcagttcagctttcccccaaagcatggtttggtaccagtcttctcttttccttccagagcctgagaccaatgcttaagttttgggggaacaggcaccctccctctggtactgatgatgcttgctggattttgggaaggcattttgctactaagcctcttttcaatgcctggggacaactagtcttttgtttttcattgtttgatgttcccactgcatgctgtgacttccctacacctcaaagaagagactcctttgcatgtctggagacagtagggggtggtaaactaaagggaagttgagagtgtatactgctgggagtggggcagtggacaaaacagcctgttaatagggtcttgcaaggggctctgtatgtacccaggggactggctcaatcctcacattctagccatagacaaacaccaggccagacccctccattctggttcagcctgggcagcttgggctgagccaccaggaccaatggatttaagctgacatttcagtccaagacgacgacttctaagtgagtttaagaccagagaggaaagaggggcctctgtgggtgctgggtactccagaggtgcccttggtgggaggaccagtggtcttagcaggaaggggggcccagcaaggtcattcttggaccctgggtctagtccagtagctagaaaaagggaccaagtggccataaagtcccagccaatgatggggcttttccagtgggcccctgtagacctcaagcccctggcctccaccttaccaggtgccatttcttctcagaaggccactgcccaggcccccaggccgcccccttgtggccagagaacggttaaagccccccagtgcctccttgtgcatagaacttcctctgccctagcccttacagtagtgtagaagatccccctcccccgctggtgtagaatagccaatagtatagtgtggtgtgcttttacgtgatggcgagtgggcagcgggcggtgggctgtacacagccgtctgtcctttgaatctcaatctgcctgcgcggcccgtgctgtgttttgtgctgtgtccacacgctgcggcgacccctccctgtactgacttctctataaaaagcttctcttcgcatagtcacgtagctcctgcccatcccccttccgatatctctcgcaagttttatactctaatatttatatggcttttttcttcgaaaattaaaaataaaaaaatggtttcttctgaaagtgtgaccgcgtctgtttaagagatggaacacagaacatgtgggtggagtcgagttgcttgtcttaaataatagactcaaagggtcatagttgtttgtgtcttggctttgtctcgatctatttttgaattgcgtgtgcttgtgcagtgtgcatctgactgtccaatatggagtgcatgtttcagattccctggcgtctctaatagtatgtgatgaactgtaatggtgcttgtggatcagtatgcgctggcggtatcgctggagagtccattgtgggggtggggagcttgaatgcgtgcgcaactgagtgcagatttattctcagggctgtctccaggcagaaaaaggagaccctgcatggaagggagggggcgggggagcaggagcgtgagtgggggtgggagggcgctggggagtttttcctagttcccgccccttccccactagctacctcccttcagctataggagggggctgatccag

SEQ ID NO: 25408 - DNA, 2755 bp, Mus musculus; identical to SEQ ID NO: 25407

SEQ ID NO: 25409 - DNA, 2755 bp, Mus musculus; identical to SEQ ID NO: 25407

SEQ ID NO: 25410 - DNA, 2755 bp, Mus musculus; identical to SEQ ID NO: 25407

SEQ ID NO: 25411 - DNA, 2755 bp, Mus musculus; identical to SEQ ID NO: 25407

SEQ ID NO: 25412 - DNA, 2755 bp, Mus musculus; identical to SEQ ID NO: 25407

SEQ ID NO: 25413 - DNA, 2755 bp, Mus musculus; identical to SEQ ID NO: 25407

SEQ ID NO: 25414 - DNA, 2755 bp, Mus musculus; identical to SEQ ID NO: 25407

SEQ ID NO: 25415 - DNA, 2755 bp, Mus musculus; identical to SEQ ID NO: 25407

SEQ ID NO: 25416 - DNA, 2755 bp, Mus musculus; identical to SEQ ID NO: 25407

SEQ ID NO: 25417 - DNA, 2755 bp, Mus musculus; identical to SEQ ID NO: 25407

SEQ ID NO: 25418 - DNA, 2755 bp, Mus musculus; identical to SEQ ID NO: 25407

SEQ ID NO: 25419 - DNA, 2755 bp, Mus musculus; identical to SEQ ID NO: 25407

SEQ ID NO: 25420 - DNA, 2755 bp, Mus musculus; identical to SEQ ID NO: 25407

SEQ ID NO: 25421 - DNA, 2755 bp, Mus musculus; identical to SEQ ID NO: 25407

SEQ ID NO: 25422 - DNA, 2755 bp, Mus musculus; identical to SEQ ID NO: 25407

SEQ ID NO: 25423 - DNA, 2755 bp, Mus musculus; identical to SEQ ID NO: 25407

SEQ ID NO: 25424 - DNA, 2755 bp, Mus musculus; identical to SEQ ID NO: 25407

SEQ ID NO: 25425 - DNA, 2755 bp, Mus musculus; identical to SEQ ID NO: 25407

SEQ ID NO: 25426 - DNA, 2755 bp, Mus musculus; identical to SEQ ID NO: 25407

SEQ ID NO: 25427 - DNA, 2755 bp, Mus musculus; identical to SEQ ID NO: 25407

SEQ ID NO: 25428 - DNA, 2755 bp, Mus musculus; identical to SEQ ID NO: 25407

SEQ ID NO: 25429 - DNA, 2755 bp, Mus musculus; identical to SEQ ID NO: 25407

SEQ ID NO: 25430 - DNA, 2247 bp, Mus musculus
gctgaccaaggatgatgccatggctcctggtcctgttaaggtacccaagaaaagtgaaggagtccccacaatcctggaagaagccaaggagctggttggccgtgcaagctaagctgggctttatggccattgctgctcctaggcgaagcccagactgtcgacctgcagcatgggcctaaatggtcaaggagatagtggccactccaccacctgaccctgtctttctgtctggcctgctgctctctgaacaccacatacagcttcagctgcctggaggccaaaaggaaggggcagtgtaggagtggcctgagcccagcccagccagccctggctgttgtattaccaaagcagggtccgtgtttgctgccttaaccctgtctcctctatgttacccagaggtcctggtctcagacagaacccagcctgctttctcagccccactctctagtgggccttccctaggtcaatcttgctgcatttgtgcttttcttttgtggtttctctggccctgagaatagcatgggacttgtgaacctttgggctaggtcttttcactgctgtcacctctgcttttcctcctggcaattatttattactagtgctgtggcattgggagctgcttctgcaaaagcaggaagcaaatcccacccttaccccaccttcctgggaaaggtctcccgggcaaagggtctcaaccactctccccattcgttccactgtggcccaggtctgagccataggcaggtagctagggcatagtgacagcgtggggtctgccccctgcccgctgccatgctttatgcccttgcctccctggtccctctgcaccagccccctcacctccaccctgcaactgagccctgctcccccatgccttccccagagctttggtgcatccatttggagtgtgggctgtagtgtgaccgtcccaacacctcaccccctccatccaagggattgggaggtggagcctcctggctgagaaattgttttgcaaatggatctatttttatatgaaaaaaaattttttaagaaaaataactttggtccccttccccctccataataaaagaggctttgatggtagggtcaagcattcctggggtcggtcagtcctgaacatggcctaaatattgatcccattcctcaagactaaatcgtgaggccaaggcagacccttccctagtcagttctgaggcaagagagatttctctgggtgggctgggccacaccatagggtagcaagatgctgtgttttcatgaatgtattaaattatcaagccaaacgtgcagatgctgggcggacgtggagaagtggcccagggtgcctgctccccatatgaacagtgagcccgactgggtggtccacactgcaggaagcacaggttctctggctgagggtcactgtgtggcctcctccgaggcccctttgagcttcccctccaaggcgacagagaaggaaggacactgtccgggcttgacactgaattggagttgccagagcatgggggagttagggcacacaagggccagtacagggggccttgtggccagggatgattgattgggatgctagaacttgtgtccaaaggaacagtggaagctcctgggctacgtcctgggaagactgaagtaggggttggctcttccctgagctgccaccttgctcgctgacatctggggctttgacccttttctttttttaatcacttttgctaaaatgcatttaattaaaaaaatttttaagtagaggggataaaatgcaaaccccttgcctcttgggcttttgggatgtcatcacctccagtttgatggatttgtttccaactgtcaataaagcattgaaacagaatctccctctagcctcctttgtaaaattctgcactggttcttttcacacgagtggtctgggcttctctttggtgctttcccactctgttgttgacctgtcaagtcaggcagaagctaaccagtccagcagtggagcttgggcatggctcagctccatggtggtttctgtgagtggcagcccccgtacagggctgttttcctcttttcttccagctgcttccattgtgacccttaggcttggggtcctaattttagctcacctccaacttcccactcccctagctcctccagatgccacagttttctggccagtaccaatgtcctccatccccaccgagttaaaggtgcttaaccctggcactggaatcctgagcctgcccaacctggatcagaagt

SEQ ID NO: 25431 - DNA, 1170 bp, Mus musculus
cctgtttctttagtttttgttgacctgggtctgtttctttttggtttttgttgttggtttgtttcgttggttggttgggttttcaaaacaggatttctctgtgtagctctgtctgtcctggaattctctctgttaaccacattggccctgagcattcagagatctacctgcctctgctgggatttaaaggtgtgtgccatcaccacccccagcatgggcctgcttcttggtcttggtcctttactccctggctgcacagctttgtgaaggatgcacaggaacagtataacaaactacggatgatgcactccaacatggagaccctctataaggagctaggtgactacttcgtctttgaccctaagaagttgtctgtagaggaattctttatggatctgcacaactttaggaatatgtttttggtgagcaaggggaaactgctaatttttcgtggggttcctaatgatccctggtaggtttacgtggtttcacatgtcctccatctggtttcccctccccttctccagcaagcagtcaaggaaaaccagaagcgccgggaaacagaagaaaagatgcggagagcaaaattagccaaggagaaggcagaaaaagagcgactggagaagcagcagaagcgcgagcagctcatcgacatgaacgcaggtgactgtgggaagggttagcgctggagggaaggctcaagcgctctctgtctgggttctcagggctaaatggagcttgtgacaaatggcttttggcagcctctgcctccaaactctgggtgctggattttatcgtggcttccttccctctcctttgctgggtcgtggattgtgtcttatcacccttgtgatctgagaattgctgccacactttacacttcacttctgcctgtcaaaacaaaaacaaaaaacattccctgacctgttttcattcctgctgctaaatattttgggtttccaaaatgtttccctgactcctcccatcttgtagtagctctcctttccccctatttcaccaatatgccattcctattaccgcatagaatgttgaatgcacacttgagatcataaatgggttgagcttctagaagggggtgaaaagctggccactctttctccagcagaagcatgtctttgttggagcatatggtctcaattactggccctc

SEQ ID NO: 25432 - DNA, 1149 bp, Mus musculus
tgaaaaattgagatgcggtgggtagctggagagatgagtcagcagttaagtgctctggctgttcttcaaggtgacctgggatggattcccagttcccacgtggcagctcacaactgtctgtaactccagctccagaggatctgacactattttctagcttccaggcagtgcacacacatggtacacagacagacgtgtaggcaaaatgctggtacacatacagtaaaaataaataatttttaaaaattaagacagaccatatcagcttacaatacctaaaatatttactttggttcttcacagagagttagctgctccctgtaggtagattctgtttaaggaggaaacgtattactgaccattgaagaaatgaaaaggagatgttggagcacttacttatcgtagagtggctaatgagattagctttgaaggagtacagttaaaacagaggatgggatggccatcctgccaggacagctgtgactcagtaatgtgggaggtggctttatccctaaccatggttttctaattcccctccctagccaagaaggatcaagaaggtggagaagaaaagaaatctgttcaaaagaagaaagtaaaagagctgaaagtgctggattcaaagacagcgcagaatctctgtgagttattctcgtgaccccagtggctagcactgtgcagctgttcctatagggacttgtgtccctgagtctaagatcccttgtgtgaaactcctcctgttaaattcctgcttgactacttcagtagcacagcagggtagcaagttcccgcttgacgtcgaggaagcaggggaagaggtcggggtgtgtctagtttagcgctaagacaaggcggtctcagattttaaccttggagtcccctggtttgttttattttactgaggggtaggggcggtgggtgttgacacgtgactttgctatggagcttagctgcccttgaactggtctcctcttgctggggttgggcaccaccatgcctggcagacttctttgatagttctactcctgtgtcagcaggaagtctagtagcacagggttccagcctcagtctcggggcacaaccttctgctttctagtaagaaatgagctgctgttgtggcttcagttaaaactacaattatgggctggt

SEQ ID NO: 25433 - DNA, 1190 bp, Mus musculus
aatattataaacgtatatgaaataaaaataacaattcactttccccctgaaattctgctttgaaaaaacccattgctaatggcttagagttcatatatagtttttttctaagcataaacattctatttccttgattcttagaaatcttgcagtcttagagctgagatgatattatagtttatgcccataaaccatttcatatatagaacaggtttttgttttcttggaagtgttggtttaggaaaagtaaaataccgcttttttttcaaatacccctcactaccccacctcccgtacccgctgtaggtttttaaaggtaaaattgttttgtagtcttagactgacctcaaactcatagaccaggttagacagatctgattctcttgtctcacccttccgagtcctgaaatgtcacgtgtgtgccaccactccggcttcagctaggttatttttatctaacaggttttgaacgtcattcttttttattggcacttaataggtttaccttattcttcgtggctctgtaaaatattatacgtaggtgtataaaataccacatgctgaatctgccttctgtttcacttatttaacatttctgcaatttctagactttaggtacattgaagcaaattctgaccttgctgtggatgataagaatttttaccattaccaatggtgtcataataaacatttctatgcatatttctgttatatttatgcatttatgttgaatagctttctagaagtggaccgcatgtcatgtgcattggatattgatggtgctattaatatcagatggtccttaaaaagtcagagtaacttatatttcatagctcaaagattttaactttgtattcatgagtaggagtctaggaatgagttttaggaaattattctctcaaaagatagtcagttgcttttatcagattctggtatcagttgggggttaagaaaataatttgagaaatctgaagcactggtgatgtcttgtttcctagttggtttgttccctgtcttatctctcatgtctgtgtcagtgcacctgggcaattctctttctgttttcttgggcaggaatgaacgagttctagaggcaatgacagagagagctgaaatggatgaggtcgaacgcttccagccacttctggacggattaaaaagtgggacctctattgccctcaaagtatgta

SEQ ID NO: 25434 - DNA, 1197 bp, Mus musculus
caatggttttctttttagaagggttttaaatttttaaatttttgttttttacttttggagatagggtttttctgtgtagctgtggctgtcctggaactcactatgtagaccaggctggccttgaattccccgagatctgcctgcttctgcctcttgaatgctaggattaaaggtgtgccaccataccagcctaaagaggcttgaaaccttaatacagcattgctgtctcttacacattattatagatagggataaagttggtgggctgtgtagttctaacaaaaatgatttcttcctttcttatcataaaaaccttggctgtgtaaactaaaagtactaagcaggtgcaagaaggtaaaagattggctctttggtgtttggcttgttaagttgcagatcgtgttgtgttaacatgtggattgcgctaatgcttctttctctttcttagctggagagatttaccagcatgaggattaagaaggagaaagaaaagcccaattctgctcatagaaactcctctgcatcgtacggagatgaccccactgctcagtcattgcaggacatctcagacgagcaagttcttgtcctctttgagcagatgctggtaagccaccgtccaagctctgaggcctctttcccagcacgtgtttatgggcatttgtctgtcggcctgtggtggttgtttttaagtgtgtggtctcctaagttgatgtttactattaaaaaaaaaaaaatctaggcccaatgaaataatggttaaatatgcaagtacaagtccacaagattggaatctgtgaattaaacttgggaatatctgattactgactaccttgttaatgtcttcctggcagtatctagccacaaacacgccgtatgagtggaccaagccctgaggtagtgtggtgaccattttgaggctaagttagagaagaagtagtagggaagcattgacattgagctttgtgcgaagaatacactggggagtgcaataggcctgaggtctctgtttcctggggaaatggaaagagagtgctgaagccagcttactaatagacggcctctgaggattgtatctgaagtctgtgtagttgtgaggtgtatgcatgcttgtgacttaatttgcggtcgttagtgagaacagggacactttgggtggacaccctgacatagccagaatgagtgattagggctcagagt

SEQ ID NO: 25435 - DNA, 1224 bp, Mus musculus
gtccctgccagcaagaggagaggaactggctttggagaagactcccatagaaaagtggctctgaggagggtgctgggaggagtctggaacttgaagagtgggtttctaatctcttgttccttgttttacaggccagaagcacccaatgagttctatgatggcgaccatgacaacgacaaggaaagtgatgtggagatttagagcagcatggatgctgtgtccccaagagttccttgtcacctctgtggtgggaaggaaagtatggtttccccaggtctgaactgggtacccccagggtgtttactaactctggtgaagggtttggaaaccatatgtggttctagaattaactcccctttccctcaaactctcacggcctgatgattgtccctctcagggatgagacatggacaggtctctggaacgttatgggtaatgagccccagcaactgtcctcagcccctcttcccctcatttgttccttctgtccttccaacacagagactgttagagatgaaagtttggacggtactaaagtcacctctgacttccttctgggttcccctactacagttcttgcttccatgcaaggtgaacctgaggggaggaaggcgtggctctctgaaaccttaactgcagatgaagtacagtggcaaggaggagagggtgtgaagctctaactggctttatgtccattttactgttttggatctaataaaccaattggttttttttttttttttgtacctttctgggattttaattcttgctagttaccgatgtatgatgtgaaaaggaaacagatgatgatgtgtataataaaattgttaccattcactcagtactttattagttaggccatgtgtgtattcaccatggattagtttcctcaaatggggaattaatgggacatttctgctgaagagttagattactgacctgagaagggtaaagatgtcttcaggtatgtgagcatgggtgtttgagatgaggatgttagctggtaaagatgtcctgagataaaacccagtaagtgcttggctctgttggatgtaagcaactgctcacagactgactgaggaacaagctggatcctgtgtgtaccatgcacagaccccttcctggaggagtctccagtcgggcatggtaactgtgggtgttgtcagtggtacaagaaaggagtgacaggtagctcactgtcttttcactcagcattggaattct

SEQ ID NO: 25436 - DNA, 1103 bp, Mus musculus
cagggccagggcttgctcaaggcaagccatcaagacttgcatggaagccaaatgttttgtctacttccctgactgcagtacctggcaggcctgactcaaccccagaggtacatatctctctgaggttagaaggatgtcaaccccgtgcctgtggtgatccggagaaagaaagggcagggtagataggggaacctgcctgggattgtgctttccctagatggtccttgatcctggaacggaaatgcaccccggagccacttagcttctgcctcctccctcccaggccttcagggttctctccagcttgcctcactctgaaagatggacgatggtcatcctaagagagccaacatcaagagctgtggttttcaaccttcctaatgctcagtgcgaccctttaataacagttaacatgagaatggtatggtgaccctcctcccaaccagaaaattattcttgttatttcataacggtaatcttgctactcttatgaatcgtaaggtagatatctatgttttccaatggtgttagaccccctgtgaaagggaccattcatctccccaaaggtcgcgtcccacagtttgagagccgcagagctagaataagcttagagtcaaaaaaggaggaaacagtctgtctccttggaaaccgaatgaggctaggctaagtgtttgcataaagcgagagggcagtgctcgctagtgacctctagtgggggagtatcagaagagaactgcttttctaggggtcttaggaattactgcgctatgctgtcttaggagagatgggtgcagaggatgctagctagctagctcccacagttcagtttagtagctgaggaaacggggacctgagagagtttcgctcttgctgctagggagaggctaatctggaatggaaactcatcctgctaagtggatgttttgtggtccttcccaaggttccctatcaacctccacacacaggcgtgactgtctccgtggggttgaggccctgactccatgccctagtctctcccacactccccaacactccatctctcctagctcctccagtctcctcacgctccttgcttcctccccttcctctttggaaagcagcca

SEQ ID NO: 25437 - DNA, 1183 bp, Mus musculus
gccctggcagtactagtgcgctactgccggcagcgggaggccaagagcggctaccaggctggtaagaaggagactaaggacctgtatgcccccaagcctagcggcaaagctgctaagggaagcaagagcaaagggaagaaaagcaagtcaccgaaacctgtgaagccagtggaggatgaagatgacaccgggctgcagaagtccctcaagttcaacctaatgagcgatgcccctggagacagtccccgaatccacctgcccctcaactacccaccaggcagccccgacttgggccgccattaccgctccaactccccactgccttctatccagctgcaaccccagtcaccctcggcctccaagaagcaccaggtggtgcaggacctgccgcctgcaaacacatttgtgggcactggggacaccacgtccacgggctccgagcagtactccgactacagctatcgcaccaacccccccaaataccccagcaagcaggtaggccagccctttcggcttagcacgccccagcccccaccccacccctaccacggggccatctggaccgaggtgtgggaatgatagagcaggtgtgtcttacccgccatgatcgactagatcatgagggagcctcctgaggtaactgtgggaggtgggaacactgagctcagggtactgaggcctcaactaagaaccctgctgccttgcccaatatggaggcttaggctgagtagaaactgatagggaggcttcctcatgtctcccctccccatgagggagaagcatgtgccttatcagatctcaggatgctgaactagctactgggtctttcaggtggagctaatggacaggtaaataggtttggagacagaagggcacaggcggatgtgggagaagactactccaaacctgggtctctattggagaccagctatataggtgcttctttggagaggacacggaagacctagaatctgggtggggactctactggggaggggggcacctccccacttgtgccttctatatgtactgtgtattaacttcttcctcatccccaggccctgggggctggccccacatcccctaccccagccctattcatgtggccttataataaagttctctatttttggagttttggtttcttattttctcggaactgagagaagcagcgagagagact

SEQ ID NO: 25438 - DNA, 1143 bp, Mus musculus
aagggtcttgctttatttatcttgtttaatctttctggggtgttgttaccctggaatcccccattaccctaaagatttctgtctatacccttgtttaagaactacttcaagggttagaggggcaggctcagtggtagagggcttgtctagaatggtgaaagtcttgggttccacctccagcaaataactgcacagacaatgtccgtgatttcgggggctctcaggataagatttcctcaaacactggagggaagattgtggatgccctcttcgatccctccctgatggtgtgactgtcccttgtccccacagctcttccccgcctgctgggacctggcttccgtgggataacgcccaaacccaccagttcagatgggtctcagacaacctcccctaccctgccgctcactaggctcagctttgacaggtaagagactgacattctgtcacatgtggcctcctgttcccaacgtgtacagaacttaatagtctctaattgcaccatctagatcaggttcccacggttcaaagaggagcagggacccaaagtgctgtggatggaaagatgcctttcactggatgtctgctcatgtctccccaaacacactgcgggacgccatctcatgggtaaggcttccccaggcctgaacagagtgagcttgcatgggtgagcatcctagtctagaaacaaggctaacatatattcatatggtgaggcctgtggcccccagcacgttcatggagacattgctgcccctctagcctctgccatgtgtttattcttctccatttgacagacatttatttaacacttctgagtagagaacaaggaaaataataattcttaccttcatggaggttagcacaaatgataataaatatctgctagatagcatgacttatcaaccttaactgttatgcatacattatcttgtttaatattgacagaagtcttgcaagggagatttaaccttcattccagacacaaggacactcaggctttggaatgttagcaatatacctgaggccacatggctcttaagtggtagaaccagacacgttcaagctgtaccacgtagtcagcgagtatatcttgtagaatcacctgattcagagtctaaggcataatagctgctcaataaa

SEQ ID NO: 25439 - DNA, 1145 bp, Mus musculus
tattataggaagtacagttaatccaaaagaggaacaggagggtgtgggggaagagaacacaggtaactgccacatgttcctacccagatacaagtgcagtgagagcttgcaggctaggatgcttctgtgccgtgttccctttctaatcacactccagaccacctccaaggaagggtaggctccttaagagaaacagtccccttagaaccaggttccttctgacatatgagctgcagagtgattctaaaagcttaaacagcaacctggctctgtgtcctgtggcagcctcttgtcttcatgctacttctagattctgattttgatttactctggctcctgttcctggatagttgaacaatttggtgagaatgttggtactgttttgtaagtaagaaagaaatttcaggaagttatgctaaaataagcttcagcaggtcaggagctggtctatcatcatcttttcaaattcagcatcctcatgtgctctctcccagctctctgctctctgcaagcacctagacaacctgtgggaagaacaccgaggcagagtggtgctgtttgcctggatgcagtttcttaaggaggagaccctcacctacctgaatattgtctctccttttgagctcaagatggggtctcagaaaaaagttcagagaagggcaacagcccaggcctcttccagcacagagcttggtgtgggaggagctgctgcggcggatgtagaccaagaagaaactgtggatgagagagctgtacaggatgtagagtcattgtcaagtctgatccaggagatcttggacttcaatcaagctcggcagacgaagtgcttcaatagtaaactgttcttgtgcagcatctgtttctgtgagaagctgggtagtgattgcatgtacttcttggagtgcaagcatgtatactgcaaagcctgtctgaaggattactttgaaatccagatcaaagatggtcaagttaaatgcctcaactgtccagagccacagtgcccttcagtggcgactcctggtcaggtactgtcctcttgtccatgtcatgtgccctccaggttcttttcacaaagggaatcatctcagaaatgtttcttttgtttcctttctgtatatcccagactggactaaactcatgatcct

SEQ ID NO: 25440 - DNA, 1764 bp, Mus musculus
atgaaattgaggaggacgacgatgatgaagacgacgacgacgactagttcattccttctgctcacaatatagaagtggaatggtttgccctgatcttctgtcaagtacacaaagagatcttgcaggatatttaggggccgtctattcactcttccagtgtagaaggaagaacagggttatattttcctttggttctactgattaaggcacatacattttccatgtaacataatctgataaaattatatgccaaaggatcagaaatgaaaactataggagattaaatattataatatgcccaaactgtgaatagttaaaaagtaaatatttattttctcccccaagctttaggttagggagagggtcaagagtttagcttttagaccatgtccaagcagcctcacgttgttggagcactctcagttccatccctcagctggggacagtcacagccccagccacactgtcctgggagcctgatccattctctgtacactgctcactcccatccgtgctgtggaggagcctgtgctctgtaactgaccagttgtcccagtgtcgttctgttctagtgcttgccagaatagaagtctatagtacattaaaagtatttttagtgccacaatccttgtgggtcacttgatatttatgaatagtgtattgaatccactgttttagagccaaatgtagaatttaggattctggctcagaattcctccagatacagagtcagagctgtgtctgccccattgtgttctcaactttctccctttgcctcccacctcttgtgggcaaggacagttttaatgttgatcccagcagtgtgtgtctttatttcctcactagagtaggaaaaagcccagtgtattcctcatgaatgctctctaaacctgtgaagagcatcatggctctaccctgaccttccgaaccctcgggtcctctctagtcacctacagcaactgggcttccttccctcccttcccctcccctcgtaaacagcagtgtctcgagtgataatagtagcttgatagctggattcctaattctgagttttattggctttttgaaaaactgtcttcttcatgattcggtaagtggcttggtagttacttggtggatgttttgaagggacagtaattcacctgtagcttgtgaacatgtgttttctactttgacactgaaaattaaggaattgcttaactgtcagctcagactgcttctggattgtcaatgaggatgcttaatctgaacaataaagtaatttaagatcatcctgtaattgaagtagacacggtgtcctgttgatcctgtcaccagagcactgactgaaattagaactgacttgtgtttctgtctgttctgctggttgggctgttttgttgttgggtttccttctagagatcgacccaagacctcaggtgtgctgagtctgagtctgccactaagtgacacacacgcagacatttaaagagaaaagagagagtcctcctttcttacacagggcacatattttgaacatgctcatttcacgggctttcatccacacattttatatcatcactgtagttaaaaaaaagataagtgggccgggcggtggtgacacacccctgtaatcccagcactcgggaggcagaggcaggcagatttctgagttcaaggccagcctggtctacagagtgagttccaggacagccagggctacacagagaaaccctgtctggaaaaaacaaaacaaacaaacacaaaaagtggaaggtaagaaaa

SEQ ID NO: 25441 - DNA, 1163 bp, Mus musculus
ctaacacactttttgataaatgatagcgatcattgtagctattgtgcagtttgttggtgaaatcttgaaagtgagacaaagcctttactgtcatgaaggaaacagcttggtcgtgcgtggctgttagcaagcccacagtggtgagcctgaggcttagttattcacctgatgatctttgtttcctcttttggtacaaaatcctcaccctcaattttaacatagaccattgggttttttagattattatttttgaggcagctaattttgagatggtataagtttagtagaattcgggggggggggttgtattgctgtgtgtgtatgactgttttgcctgcatgtacgtctgtgtgcctgatacctatggaggacagaagatgctggcagaccccctagaagtgcagttagagatttattgtgagctcccatgttggtgctagggattgaagcacaagtgttcttgtctgcagagccatctctccagcctcagtaaatttctttgccctgtgacataaatgattcctggaagactgctgtgtcgtggaaatgcctgatggaatgaagaggtttatctcaggctgcagaggtggctcagcgggtaagaggctgctcttccagaggtcctgagttcaattctcagcaaccacatggtggctcacaaccatctgtaatggggatttgatgccttcttctggtatgtctgaagacagctacagtgtactcacatacatgaaataaatttaaaaagaaaaagaaaaaagaggtttatccctacctcaggatcaaggcctgtttgacataaggtctgaaacttgccataaattgacatgagttttgggagaccttttgagtttggagaggctctgactcctgatttttttttttttttaactgtataatgcttgtgggtctagggctgattaaagaagataactttccaaataacttttttcttgaaatgtgggccatcactttttgtgactttggcctgcctctgtcaactgagatgcatattgtttaatctatttataaaaagaaacttcattttagattcacggaaaagctgcagagatgatggtgtacgcttataatctcagtgctggggaggcgagattgggagagcaagagttcaaggccagcagtagctacagagtgagggagtt

SEQ ID NO: 25442 - DNA, 1572 bp, Mus musculus
tggttgctgggatttgaacttaggacctttggaagggcagtcagtgctcttacccgctgaggcatctcgccagcccatatttcctgttttttaagacagggtttctctgtgtagccctggctgtcctggaactcactctgtagaccagctggtcttgaactcggggatctgcccaactctgcctcccaaatggtgggattaaaggcgtgcaccaccacacttagctcaaaaagattaatctttactccattcccatagtggcagggttgacagagggggaactctgtcactccccagaaactaacagtgtttagtgtttagagatcacagagatcgagggctgctctgagccactgtgttcctcttgataactgtgcagttttgcctctgcctactttgaccactgcttgctttacatttgttgcaggtttaatgcttgttcataacaagctggtggaccccctgtacagtatcaaggagaaggaaattcagaaaagccaatctgcgaagaagccatacagtgactagcctgtgccaggacgtggtattcagtacctcagagggataggcaggtctttccagaaagtctctgtaggagagagagtagaattacttttcagtccactctggctgctgcagatctgtggcttggtagatacatgttaaggagtttggctatggagaacattgttgattataattttcccctttttttttcagtactgggggctgaacctggggccttgtacatgccaaggaggtgccttgctaactgagctatgtccccaactttctgccccttttcataatggttttgtaaccatccgaagtctccatcactgactgtaattatattcttctgcccctgtgcacatgggcagcacacgcctgtcgagaactcctgtctgtatgtgtgctttttctagagttggcagggattagggcttgtgcactttggacataacctttctggagacttgagagcccctcttctgccagccttcccactgagaattttcattttaaagaatacacttccagaacttgaattatgcacaaggaagcagcccttcctgccagaaccaagaacctgggggagaagcctgtcccttgttcccattgtgtggattgtctttcctgttgtcagtagctagcctttctgtaaacaggccttctgggcatgtggggctaagatggctttcacaggtaaactcaaagcttccaaaggccagccttgtcttgttctctctcaagattccaacaagagaaaagtggaaaggcctcctgtctgagctctgttttcctcaacagattcttacacactccctagtaaggagatccgcgtgggtcacagacacgctatgatttcagtgtttttacccaaggtggggagctgacatctgcacatgcgctgtgctctgtggcctcctcagagctgagtgccaagattatacatgctactgctctctcctcgcttaactcaccccagcactcccaccttcgggtttatatcctctgtcctcagcatcagaactaaacccttcacccccctgtccttcaggctcccttccc

SEQ ID NO: 25443 - DNA, 1146 bp, Mus musculus
cctacgtgtttttttccttaactatttaaattatcaggtttagtggtcacttaggagtctgggacaggaagattctaagttcaagaatagcgtggtcaaagtaaaaagtgaaaagagggctggagatacagttcagtggtatagttcttgcctacagtgcacaaggccctgagtttgattcccagtgccacagaagtaaatgcctgttaaattaatagtgatccaaaacaattaagaataaaggtgtaaagtgaggttttattttattttatatttacttgtttgtttgataatttataaacagagtcactgtgtagtcttggctggattggaacttgctctgtagactaggctgcccttgaactcagagatccatgtgcctttgcctcctgagtgctaggattaaaggtgtggtgaatttggcttttaaatatacactttaaaattatcctgagtgttacattcatttataaatatcttttgcttcagatagattttgttatttccttttttgcagcatattttgactacaaagatgaatctggatttccaaagcccccatcgtataatgtggctacaacactgcccagttatgacgaggctgagagaaccaagactgaagctacgatccctttggttcctggaagagtaagcactggctttatctgtgttgttttgggctgcttagttggaattcacttattttcattatcccactattaagttattagaattgtcttgattactgctgattttaagcatatgtattttcttttggaataataagcattttttcccctgaatatgatgcactaggcagaaaatcactgacctgttcattttcctgtatttcaaaggatatttctactaccacctctctttcaggcctccaggggtaggtggaaaggactaaggaagtacattggttatgccttgatttgtatacactttggtattagctgttagggatgcctatgaagagaggaaatacaaatgacatcattgaattaaactcatgagacctagcgtcatcccagtaaacattgtacctcaaacattccagatcatgtaatttgtaagtttagattcctcccagcttgctggacatggaagctagcagatttaagattgatgcagataggagtt

SEQ ID NO: 25444 - DNA, 1732 bp, Mus musculus
atccaacgtcctcttacggtctctgaagttactgtacatgcagtgcacagacatacatgcagataaaacacccatagacataaaataaatctttagagagagcatgccagttatttacagttggagaaggggcttgatgttaagaactgaaaattgactttattggctactatgacgtccatgtataataatcttcaaattaggttgaaatgccaaatgggtgtctccgagcctctcttctatgactgtaccttgcttttagccaacctaacaggctaactagagtttgactgttcagtgtccttctctggcagatgttttctggcaaaggcttcctgcactgatgaagtcccctgagaagcgagagcacctgcaggaagtgaatcaccaccagaatggaggaacagtcacctgctttaaaaaataaagtactgttgaaaaagatcatttctctctatttgttcctaggtgtaaaatgttaatagttaatgcagaattctgtaatcatcgaatcattagtggttaatgtttgaaaaagctcttgcaatcaagtctgtgatgtattattaataatgccttatatattgtttgtagtcattttaaatagcatgagccatgtccctgtagtcagtagggggcaatcttgctttattcatcctccatctcaaagaagatttgaaattacagattagtgtaagctatgtatacggctggctgtttgaaaggggttttctcaaaagtcaaaactttggttatgacagcatttctgcacatagtccatatttcctgttcaaattaatctagaaatatgtttaattgtactgtgtgtgaacacctggaagcaaaaccatagtgcaaagttcattgtagtgttaccaaaaaatgttctcaattagtaaataagcattaatttttcatagtctacattcagaaattaccttttcattctgtagttctgtgtagttcatataaaatggaaagggcaaagacaagattcagattaaatattaaatattattctggaagctggctagactctcagagggtcaggaacacagaattagtttggaacttttgagaggatccctagcattctgtactccttgctttcacaactgttataatgtagaatgatgtgcttgctgcccaagtgctagttcactttggttgctatattaaactgtaaatacaatagaacattaataaatgtctcttgtgtagcaccttttactgtagattagtgtttcatttgggggcttacattggctgattatgaaaacattttctaatcttacacagagtatatcctaaaaattaaaactttatgtgtcttaggggtttattgctgtgataacacaccatgaccaagccaggtctagtggtgcacacctttaatcccagcactcacaagacagaggcaggtgaatctttgagttaaggccagccagagctacatagagaaaccttgtctacacacacacacacacacacacacacacacacacaacccaaaacaccacacacacacacacacacacacacacacacacacaacccaaaacaccctaccataatcaaaagcagcttgtaaagggtttctatctgtttagagctccacaacacagtccatcacggagggaagtgcaggtaggaatactcaaggccggctgcagcagagggcactactgctgcttgtggttggtttctcgtggcttgctatcttacagttccc

SEQ ID NO: 25445 - DNA, 1211 bp, Mus musculus
tcttggctagcatttgcagcttttgcttggcttgagttaacatcacttccaaagtgccagctggttcccacttctagacctggggtggctgtcagttgtgcctggagccaaggatggcttccgggatctttcttaaggtgcctgggctacttggtaccattgtagggaaaggctggttctcctgtaagcactctgggggctgagtttaggctagcaacatcttccaaggtaccatcaatgctcctcaagccaactggaagagagcaacgagcggcctttctcagcgatgggaggcatccttacgactgataggttctttgagctagtgtagttctgcatcaatggggcccagctggatcacagcctcaagggaacaacacataccaagttggtcaggggcagaaccaggcaggtacccatcattctagagcagcttggtctccagtgctgctccaagaaatagtggaggcgtgtgggcagcacacatttgcactgtacaattgaacatccggggcttccccggcttcccaatttatgcatttggtgagtagctccgtgcccttccccgctctgtaatggtggatgtcgatcctgtgtttccattttgattgtgggtgactgtgctgtttcttagcttgcttttctcttgtgtcctgtggttgatttcctgttagcagcactagagctgtgcccagcaccccactccaccacattcctgtgtctctgtagctccccctccccgcccctgttcatcccaccacaaaagttaccacagaaggtttcctttgtaaaaaatatttattttgaagctctattttaatagtatttattttagaaagtctactattgtaagagttcttctgtttgtgaagaaaaaaaaacaagttaaaaactgaatgtactgatctagaagatatctataaatatatattgttaaatatacacatggctgccattctcttcctgtgtcgtgttcagttgcctgacatcccacaaatcccacactctaggctgcatgggcatgggcacacagtgggctgggcgtctagactgaggagaccctcaccctgcctctgggaagctactgaagaactttgtacttcatagtgaagccagctgttgccatgggatgcaaaagcctgggtgccctgtcctcttacacagggtatctgggctttggagttttcttcttctttttgagatctagcctt

SEQ ID NO: 25446 - DNA, 1099 bp, Mus musculus
agtgggtaggtacttgttgcatgcaaaaagctatcgtgtctctggtccttgcccccagctgttgtgtgggtgggttttttttgttttttttgtttttttttttgttgttgtttttggttttggttttttctttgtgtggtattttgtccccatccctgcctctgattcaagaaatagcctgggtcagaagaggtaccccaggtaaaattgagagagcattaggcaaaaatcatgtggagcatttctggttcttttgtgtgagcagcccctagggaggaggcaaggagtcaggtagctgtaagtggagtgtacctattgctcttttctcaaggattcacccccacccccaccttggaagctactagtagtaatagtaacaccttatgatttagaataagttaattgtaaccataggtatttattgattggaggaagggagggttttattttcagctttatttatgcaacatttactggcttgtaaaaggcaagtataaaatcctgcatcttcatcgtctataactaatccatacatatacctgcccttgccacattgcagtgttcttgcacagaacggaaggaaagatagaagacaaacccctgcgatcagcaaaccacttacactaattgaatgtattagaagctttctgaaggggctggagatgttttcctcgaatgaggggtgtggagggaccccccccccaaaaaaaaaccctgatagcgcacacgtgcactctttctaagaagcctgggagcttcacccagggtccctccctcaatttgtatccacaggacagctgacccagtggcaggttgcactttggtgatcttggtctgcatacgtctgtggacagttgagctatataagccgtgtatgcgcacatgcacacgtgacacttacatacacagaccctctaccacacagaccctgtttcctggcaacccttcccaaaccctgactttgtgtacatagctgtaaacacggatttggggggttttggtttgcttccccacctcaccaaccccttgttctggtttggaaatgatgtctacagaattcttcctccccacagaagttgaccttgggactcacttgctc

SEQ ID NO: 25447 - DNA, 1122 bp, Mus musculus
cctgccggccacaggctgcgtcaagctggcccagcgaggctacgaccgcctgagacgccccggttgccgctgcaagcacacgaacagcgtcatctgcaaggcagccagtggggacaccaagaccagcaggtctgacaagcctttctgacactttggatgaaaaaaacatggtccctcctgccagtctcctgagactgaccttgctcatctgtcctctcctaaaaccctagattgggaagaaaccggcagagaacactactgcctagccttgagtccccaaaaggatgaagatgtactttggggattttcacagtcttgaaactttgttaaacagcagtgacagtgttagggtatggtggtagggggcccagttttcctatttcagaagacggaagacagatgcggacacagggtctgcaagttcagccactcaatggccttcccagcccctctgcttcctctcattttgccattctctctggctcctgctggagccttctacctgggaggaacagctaatgggaggcaagatacctcgaggaagaccctccgagccttgacttctatctttgccgcctccgtccatgcctgttggccttggcctcttgggaaggtgcaccgtagccattcctgctgtatgcacttgatgtccgagaacaaaatcgccggtaagctgctgcctcccgtgagtagcaggatggagaaggaaccacctggcagtgtgttcctcctagctttcaatcactaacttgggggttgtccgctcatcacgccatcctccagttcacagactggcctgcctgctatgcgtcctgagcactctttctactcggattctttgtagaaactcgctgggttaagaaggccaggatgacacaagcaagaccaaatatcattttgccaatgagtctgaggctgtggtctctggatccagccatgatgtttttatatgtttaattaaactagatgctattggtgtttaaacaataataatacaacaaccttgcttccttttgggccacccccaggaagggctgatttcaaaatctgggggtaagcaacctcaaggagcgtttcccctgcacatcgagaatggcaaagaagaggccgtacctcccattg

SEQ ID NO: 25448 - DNA, 1158 bp, Mus musculus
acccaggattaggaggccatgacagcttccaaggcagttgtcttaggggctgcagtcctgctcaaggccatggctgtggctgtggtcaaggccacaggctagtggaggtaaaggagtggatcgctgggccgcctggttaaggacatgaagatcaagtccttggaggagatctacctgttctccctgcccattaaggagtctgagattactgacatttcctgggtgcatccctaaaggatgaggttctgaaaatcatgccagtgcagaagcagactcgggctggccagcggaccaggttcaaagcttttgtccctattggggactacaatggtcttgttggtcttggtattaagaactccaagaaggttaacactgctatccgaggggacatcatcttggccaagctttccatcgttcctgtgtggagaggctactgggggaacaagattggcaagccccacactgttccatgaaaggtgacaggccactgtgactctgtgctgatgcatctcatctctgctccccagaggcactgtcattgtctctgctccttcttgtgcccaagaagctcctgatgatggccggtatagatgactgccacacttcagccagaggctgcgctgccaccctgggcaactttgccaaggccacctttgatgccatctccaagacttacctgattcccgacctctggaaagagactgtgttcaccaagtctccttatcaggaactcactgatcatcttgtgaaaacccacaccagagtctctcttcagaggacccagactccagctgtggctaccacataagcggttttaatacaagaaaaataaatgaattaagtctgggggtgggggagaaagaaagaacgaacctggggaacaagccaggaagcagcaatcttctgtggcccctgcttgacttcctcgatgatggactatggctgggttacataagccaaatcaagcctttcctctccaggttgcctcaggtcaatgttttagcacaacaacaaaaatcaaagacagaagttggtccaggaatggtgcactgcagtgacagacctgaccatattgttttggaaagggctatgggagtgtttaaaactttgagcttggagaagccactgagcactcaaaacttaatggaattatctgtg

SEQ ID NO: 25449 - DNA, 1147 bp, Mus musculus
ctagccttaattgatcttctgcctcactcagcaaacatatgaagtgcctgcacttcctgggcattgcactagatgctaggatgtagcaatgacatttggctgcccctgtgggtgtggaggcacagtactctgtggcaggcatggcattatttgtgtgttaacctcacacttggggaatcactagcccagagtcccatagcttcatccactggcctgtggttgtggattttgcgtggtccctttgtgcccagaatggagcctataggaccaaacctactagaatttggacttgcatttttgtatctgagcattgaatctgaggaaggcattttgggtgactggcaatttgccttccactatttttgaggagcatgaattctttagatgggaagactcattgcaatattggggttcaaaggttaaccagacaggtgggtcagctctgagactgtggaaagactgatagtggcataaatatgcctgtctttccactttatgacgaactaccccccaccccactacttgtaacttctgctttaacagaacatgtgatcgacgtgacttcttaccacttgttttcagtgtttgtactgtgttattgtgaagtgcttgctgcattgcacatcatattaattcctctatagtaattttcttcaatcagaccatcttgatcactactgctaatgaaaagccagtgattgtccactgtagcttacaaataaatacatagctatataggagtatatgtaggtatgtagtatatgcatttgtgttgtagctagtacttttacaggtctctgggttcagatttcctttatctgtgagtcagaggtgataaaaaaggccttcagcagttggcagagtttagctacatcattttaatatttcttctactttgtgaatgatgacgccaaacagcccaggagtcagtaacctgctcaaggtggcttcaaggcattcaaatacaagttggcaaattccaaagacattgtacttaacttgaagcaacactgtcatctaggttagcctaaaccatagctcctcttgtgtttttctctcaaatatgccaacatttccataaaatgacttcataaaaacaaacctcttaaactctatatggcttctccatccttggtatgggcacaga

SEQ ID NO: 25450 - DNA, 1197 bp, Mus musculus
tataagtgagagagatacggtactgtttgagagcagctccttttctgcgtgtggcttcataccgttccaaactatgtagattttataatagcttcagtgagaattggtaacatgcctgtatgactcacaacagatcttgaaaactatctttaattactggtaggacaaaaagggacattctggttattttaggcactggcttggaacactgtatatgcagaagaaagaagacaggcaatctggggaaaggaaggggacctgggaagcactgccttctttaaggaaagacacaccaatagatgagatcatcccaaaggcacagggaccacagagtgtgagtccttagtgacgagtcaggtgagctctggtgagcttggagaagccagccccaccagcagagcaggcacggcagggatgggacaagcagggacgacaattccagctggacactggtcccagtattttgctccctcttatataccgtgaggcagtatcaccgtgggatgaaccatggtagcacgttttgatctgtcagcactcaaggatcatggtagccttcgggagctttaggttttggttggtcaccccaacgatcagctgtagttgaatgtgtttcttatgtgcctggtttcagtgttagaaggtgaaatagagtgtgcaaaggacactgcaaaccacttcggatggaagttttctcattttccagactattttcggtcagcctggtctatcaagatcggtaaccaggtcttcaggaaagggttggcttctatctaggacatgcctgaaaggattttattttctgataaatggctgtatgaaaataccctcctaaataccctgcttaactacatatagatttcagtgtgtcaatattctattttgtatattaaacaaatgctatataatggggacaaatctatattatactgtgtatggcattattaagaagctttttcattattttttatcacagtaatttttaaatgtgtaaaaattaaaaaccagtgactcctgtttaaaaataaaagttgtagttttttattcatgctgaataacctgtagtttaaaaacctgtctttctactacacagtgagatgtcagactgtaaagttttgtgtggaaatgtttaacttttatttttcatttcaatttgctgttctggtattaccaaaccacacatttgtaatgaattgg

SEQ ID NO: 25451 - DNA, 1196 bp, Mus musculus
acagtcaaggtttctgcgtcttcaccctcagtggctgctgcttctcaggcagattccaagcagcagaggattctccttgatttttcaaaaggctcagcaagcaatgcgcagcagcagcagcagcagcagcagcagcagcagcagcagcagcagcagcagccgcagccagatttatccaaagccgtttcactgtccatgggactgtatatgggagagaccgaaacaaaagtgatggggaatgacttgggctacccacagcagggccagcttggcctctcctctggggaaacagactttcggcttctggaagaaagcattgcaaacctcaataggtcgaccagccgtccagagaaccccaagagttcaacacctgcagctgggtgtgctaccccgacagagaaggagtttccccagactcactctgatccatcttcagaacagcaaaatagaaaaagccagcctggcaccaacggtggcagtgtgaaattgtataccacagaccaaagcacctttgacatcttgcaggatttggagttttctgccgggtccccaggtaaagagacaaacgagagtccttggaggtcagacctgttgatagatgaaaacttgctttctcctttggcgggagaagatgatccattccttctggaaggggacgtgaatgaggattgcaagcctcttattttaccggacactaaacctaaaattcaggatactggagatacaatcttatcaagccccagcagtgtggcactgccccaagtgaaaacagagaaagatgatttcattgagctttgcacccctggggtaattaagcaagagaaactgggcccggtttattgccaggcaagcttttctgggacaaatataattgggaataaaatgtctgccatttctgttcatggcgtgagtacctctggaggacagatgtaccactatgacatgaatacagcatccctttctcagcagcaggatcagaagcctgtttttaatgtcattccaccaattcctgttggttctgaaaactggaataggtgccaagggtctggagaggacaacctgacttccttgggggctatgaacttcgcaggccgctcagtgttttctaatggatattcaaggtaagtcagcactttgctgtttcttaagaatgatacatttaagatagtttgataaacttcattcttttatcagtg

SEQ ID NO: 25452 - DNA, 1186 bp, Mus musculus
ttttgatggggattgcattgaatctgtagattgcttttggcaagatagccatttttacaatgttgatcttgccagtacatgagcatgggagacctttccatcttctgagatcttctttaatttctttcttcagagacttgaagttcttgtcatacagatcttttacttccttagttagagtcacaccaatgcattttatattatttgtgactattgagaggggttttgtttccctaatttctttctcagcctgtttattctttgtgtagagaaaggccattgacttttttgagttaattttatatccagctacttcatcaaagctgttcatcaggtttaggagttctctggtggaatttttaggatcacttatatatactatcatatcatctgcaaaaagtgacattttgacttcttcctttccaatttgtatccccttgatctccttttgttgttgaatttctctggctaggacttcaagtacaatgttgaataggtaggcagaaagtaggcagcctttcctagtccctgattttagtgggatgcttccagcttctcaccatttactttgatgttggcccctggtttgctgtagattgcttttatcatgtttaggtatgggccttgaattcctgatctttccaagacttttatcatgagtgggtattggattttgtcacatgctttctccacgtctaaggagatgatcatgtggttttgtctttgagtttgtttatataatggattacattgatggatttccctctattaaaccatccctgcatccctggaataaaacctacttggtaaggatggataattgttttaatgtgttcttggattcggttagcgagaattttattgtgtatttttgcatcgatattcataagggaaataggtctgaagttctctatctttgttggatatttctgtggtttaggtatcagagtaattatggcttcatagaatgagttgtgtagagtaccttctgcttctattttgttgaatagtctgtgaagaactggaattagatcttctttgaaagtctgatagaactctgcactaaacccatctggtcctgggctttttttggttgggagactattaatgactgcttctatttctttaggagatatgggactgtttagataattaacgtgatcctggtttaattttgttacttggt

SEQ ID NO: 25453 - DNA, 1248 bp, Mus musculus
ttctcaccagcttgtgctacagacactggttacctcttgagtaaacgatggaacaggtaacactgtttctcacagtgattgggactgctccaaaaataactcaataaggtccttcccaatcggagcgcatcccggagcactgaagcatgtcacgatgacttagaccataagtccgcactggaaaagacgcggttcatcctcctctcggtttcacactccgaatgtgtcccacaggacctgcctgtctgggctcaggtgtaaagctggacagggatgcggatcagatattagctctgcctctgacactgggtcctaaaaatgggatgaaaatgcttgtgtctggctgttacagccaggctgtgacgccgtgagtgctcacgttgcccatctcttgtgctgtagatctttccaaagtgaagctgatgcggtttgatgatcctctgttggggcctcggcgagttccggtcctggggagagagcacagtgagaagacactcatttccgagaacgccgttttccacgtggacctggtgagcaagaaagtccacctcaccgagaacgggctgcgcacggacatcggcgacaccatggtctacctggttcactgagctcatgcaaattggagagtcgggatggttttcggatacttctgctccgagaatctcaagctggctctaactagacttcatttctaactgctgagttctgtatgtagtcagaattatcccaattcttctttgatttctaatctaataaacttgcatttttttcacctttgggccatgttatttatttatttttaataaataattgctggtccctagaagtttttaatctttatacagaagtgtcaggatgcttcctttttttctatttttgttgtttcagacagggtctcactttagcccaggctggctttggaggctacataccctggagcaggggttaatggccactgggagccagctgtagaaactgaactcaggtcccctgcaagaaaagcaagtgatcttaactgttaaactaaccttctagcctgcttctttttcgttcttttcttttcttttcttttcttttcttttcttttcttttcttttcttttcttttcttttcttttcttttcttttcctttcttttttcctttcttttcctttctttctttctttctttctttctttctttctttctttctttctttctttctcctttctaataaaaaaatttgtatttacttagaagcattcagaa

SEQ ID NO: 25454 - DNA, 1196 bp, Mus musculus
cttttaattttctttgtatttttataacaaagatggaaagctctcagaagcccagccctcaaagcataaggttagaaagcgctaggatgacgagtagcttgtaaagtggtccggttgattctctgctcagaagcagcagctgcatgggaaggcacgtcgcagcagcctggggaaggaaggctggcttggacatgacatctgccctgtctttatttaccttcccttagggagatgcgcttatctacatggagccagaaaaacaagtgatgtcgaggtctgcagatgagtgcgtcgtggccctgtgtgaccagtggttagtccctcttgtaacaaggaaattgcgtgagtcactctggtcatttctgacattaagaagagcttcttttgttcactcccaggtacttggattatggagatgagaactggaagaaacagacatttcagtgcctgaagaacatggaaacgtaagatgggagaaagtgagaggggtgcggagtgtggctgatgaagggaaggatacattttggcctttgttcttcttagattctgcgaggagagcaggaagaattttgaagcttccttagactggctacaagaacatgcttgctcaagaacgtacggtttaggtcagcaaacttctcatacttgtgtttgaatgatttttgttagatagacagaaaatgcactgtttccccccttccctccccctttctcctggtgtttgctaggcgagaggatgagaaagaagaccaggatgtggttcccagtcacccatctaatgctcgatagagcctctgacccacatggcttttatattaccatctgtttatatatttaccttgtgtgtatgcgtgtgactatggtgtatgcataggtaaatgcacatctaggagcagggtgtgtatgcctgtgcctgtgtggaggccagtagaggatgtctggctctatatagggatcacctttcaccttacttcattgatacagtcttttgtggaacctggagctaggctagcagacagagccccagtgatcctcctatctctccccatagttctagggctcagggattcaggattttacataggtgctgcaatcaaaattctggtttttatgtgtgtgcagcaagagttcttacttactgagccctctctagccatatgaggtttttattaaaggactccagcggttcagttagc

SEQ ID NO: 25455 - DNA, 1088 bp, Mus musculus
cttttcttctagttcgttgttgtgagtgtaggtagatgatcgttttggtgtttaaagacagggtttctctttgtagcagtcctggacctcaccctgagaccaggctggccttgaattcacacaggtccatctgcctctgccttccgagtggctggattcaaggtgtgcgccaccccttctgggcacagtaactactttttagaatcttgttcctttacatttgaaggtaggcatggggaatttgagctgtcagtgagcagcttggttctttgtgaacctgacttcttttttttctcttagtttttcacacagggtctcatgtagcccaggctggcctcaggcttgctgtgtggctgagagtgaacttgaatatttggccctcttccttcctcgtcctaagtgtggggatcacaggcgtgtcctggcatccctggctcttactgtctaaagccagctctggtgtctcttcgtgtttaatagggaagaaaaggaactgctaaagtagacttcttgaaggagatcgagaaagaggcccagcagaagtgggaagctgagaaagtgtttgaagtcagtgcctcccggctggagaagcagaagcagagcaggtgagtcccagcagccgcggggtaactgccccaggacgagggaggccagaaagtgagacaatgtctgagtgggctgaaggtcccctgttctactgagtagtcaaggcaactctctctatggaattcttagagtttgttcttattaaaatgtaaaacaaaataaaataaaacaaaacacccaaaaatcctcatttatcagtgtgtgcgtcatgacatgtgtggaggtcagaggacaacttgcaggagtcccttcccttctactgtgtgggttctgagggttgaccttgggccttagcctgctgatccaccacaccagccgactcagatgtttaaaattagcatttttcactttttgacaaaggagaatgttctgaagttttatatttactgactgataaaaggaaagggtttttgttgttgttgagagattcttactgataattacctccaatacaaatacaattttgtagggtcactgtattt

SEQ ID NO: 25456 - DNA, 1108 bp, Mus musculus
gctttccccaagagcacaggggtgggagcaatctcctcagagaattgtaaggaaatgttccatttgtttaggggtgtgcggtattagaatttttccatgttagcatttaccaaaagggtacagttttgtctgttcacagagtggtttttgtttaggaagacttattgtgagcctttccaactttctccttctaatttgtcttctcttgctctcatactttggatttaccttttcttttttcatttctccctaccctgtgtacttgaagtgggaaaacccttccctcttttaataatggttagaagaattagtggtagtcttgagacattcgaaaatagacagtatgaattgtgatgacgtaaagagagtattttattctctgaatttgtgtacagctctcctttctagagtctacctatggcttttatatctgtgtattatagaacacgtgagaagaaaagagaagatggcaagtggagagactatgagcggtactacgagcggaatgagctgtatcgggagaagtatgactggagaaggggcaggagcaagagcaggagtaagagccgaggcttgagtcggagtagaagccggagcaggggccgcagcaaagaccgggatccaaacaggaacgttggtgagtgggcatcagccccagagggcttgtttgacaggtgggatagatttaagactggaactgtctcaaaaggctgggtattgaccttctgacagagacaggacgaatcttgtgcacccttgcaatcaagccagtttcttttaaaactattcctgttattataacatatatctaaatttaaataatttttataatgtactttttttttggttatgatcagaggaggtgacattccttttttttttattatgtattttcctcaattacatttccaatgctatcccaaaagtctcccacaccctcccccaatgtacttatttttattttatgtacattgttgatttgacatgtctgtgtgagggtgttgtgtcccctggaacaggagttacaggcagttgtgagctgacatggttactgggaattgaacctgtgtcctctggaagaacagccaatgcttttaactgctgagcc

SEQ ID NO: 25457 - DNA, 3336 bp, Mus musculus
tggataaatctgacctaggtttcttgctagtctgtttatcatgtggctgttttactatgcatttgtgcacagctaagcagatgtgtattctcctctctttaggaaacagaaacctcagatttgtttttgcatgatgatgatgatgaagatgaagatgaatatgagtctcgttcgtggcgaagatgaaatttgatgcgagttgtgtaatttttagaaatattgtttagaagaacaactttttagaattatttaaagaagtcaatgagccaaaaaatttttttctcttcaacacagtaggtttaaggacagcaagttgctattcaaacacatctcataattgtctatgatatcaaatcaccaaaggccgtgactttacacagttgtgaagatccacagaagtgactggattctctagaaccttaccttccacaccatctgtttctgctcttggtgctggattacaatgtaaagacagggtgttcagaaattttattttggattataaatctgctgataaaaatttcattaaatgtcaaaatcgcctggaatcttttaactcttagctattatgaatgggtcgtcagacagttggagatacttgtaatttaaataccttttcctttcaaggatggccttggaagaaaagtaaatttagttggtttttttttttttttaccatggaagagcccgctttatagtcagtctttctcagagtctgtgtggcaaagcttcagcaaaaccacggtctctgttcacaggagccacagggcacaggcgctggctctgctgcaccctcgcctcctcacacctgctctggggctttgccactcatcttccatgggtcgatatgtctgagcatcgcttcagttgtccccacccccacccctaccccttttaaataaacctcattttgccttttgcccttttgctcattcccttgtatctttctcatcccttttgattaatgagcctgactttttgaaataagtgattcagttgggcaatcaagaaccagtcatcagtaaaaggtttaaaccagcacctttataaataagtgacactttgatggaaatacaggcagaattttaggggacagagttactactggcttccctccccttaaagtttcagcatagtgacagttacacacaagggttaatggccggtagctgaaggtcttttcctacattgtaatgatgatggtgaggtgctgaggtggggattaggagtctggataagctagtaataaatgagattctaacttgacattgattagatgaccttatattttcataattttatagattttgctgtccatgaacacacactttagtaggcagtttcctttactgtgtgcatttttactgtacactgtacagagtgtctgttaagtaaaatatatatgtaaatttatgtccttgtgttctgaatgttagatggaaaagcagaggagcaacactacactgtactgccccctggagaaatgaatgatttctgtacataggatgtcacttttcaaggatacacatctgttttataatatgtgtggtgtgaaaatttgaaacttcctgtttgcttcagaaggttcttggtgatcactaagtgtgtcggggttttgttccctgaggtaaagactgtttcttaaaatagatacagttcgcttagaaacttaaaaccaccaggactctagatttacggagtgacaaggaattaggtcccaccttctgatcatctttctcctcttcatattgtcctggaatgacgtgtcaaacaccaggactcttagaagttcctgtagctttccctttgtagtgggacttcctctccaggttattgttgtgtttctgatgacaccgaggctaggcaaagccataaagaaggaacacattagaacagggaaccttcaataagcatcttgctcctcacttctccatcatctctaatgaaattttcttgatgtttgtggctcagtcggtatatatttggaaagattcattgtggtgaatattttgagtcctgaccatttaaacgtgatagagggaacaaaggatttatatattttttgtacaaagttttttcttaaactgtataattttgtaaataatttgtttggtttttttttcttttgtgtactaaaactaccagcgtatagatttcaataagaattgttgtatttttgtatttggagactgcaaatgacagtcacttagtgaagctgtaagaagagtctcagtagactgacagttgagcagaatgagattccttttcatatgatttttttttaaccttaagatcgacatcttatgcactcactatagagagagttgaggatttatttggctttttagttactgggggcagaggatgaacgagaacggtgctaatgtgagagatcatttttattaaggttttgggtccttccgtagtccttaaaaataactaaaattcttctccaatgtgtttaactcaaaaatgaatttaaaatatggattaattatactgttataaaacttaaggttagcataaaatagctgaatatgtgtatgtgtgtatatatatctccctttatccacatccaccagtccccaactgttagaatttctcttaaaagtgaattccacaccataacttgttttcttggcatttttatttatagagataacatttagcatttgagacaaattctgctgtcctagtgtataagctctgtgcagcagatccacagagagagctgccagtgtgaccagtcagtaagagtttctagatttctgcccaagtctaaagaggttaccccaaggaatgtggaattttctcagtttcttcttggagcattgggaaaatgacatcaccagctgagatagtggaaaacagtccttttaccatgaaaaagacccgtggtgatggatcattatttcacaaagaaaaaaaatcatgtgaaaaggaaggatgtttcctcgtgatgtatagtatgcctgtattatagtttttacaagattgtgaacttgtgtaatagtatataggagatattgttggatttctaactgtttatacatttaaattcatatatgtaatgtttgttttatcgattacaatctgaatttctaagaagcatgttgacttttgcaataaagatgcaatatggaatggttcacaattggggggaaaagagaaaaaaaaagatgaaaatattacaaatttaaaagaatctggaaaaatttatgaaccattccaaaaattataacaatcactaaaagagctgtaattctggcttgttctggaaagaaagaaacacgagtgtgagtttgcgtgtgggcccgagtgagtagtgcatgtgtg

SEQ ID NO: 25458 - DNA, 1174 bp, Mus musculus
tggcctagtgtgtgtttgtatttagggggtttgaaaaccaaataaatacagtattctaaaatggctctgatatttctggcattacccttgatgttggagacatttgtatgagtaaattattttcccaagtatcgtttgtaaagttaagctgtagaagtacagttattttaattgaccaacactagtgacaaatgctgtgggaattacagatgtgtgccgggtcctattttatagagttttctaattgagggttgaacaaaatgagaagtgatgtagtttatgggattgctagggaagttctgaggcaggacagttgctcaatagactgagtaagaacacgcccaggagatggatagctttaaaaatcaggcaggtgttctggtatgttcttcaggttctacctctgggtgatattgaagtcagaagactttgttaaaagtttttctgtaaacctcttttagagaaagtgggccccagaatacgtaatacacaaatactgtttgtattggcttagagacactaagaaaggaaagaattttcaagcgtctagtcacagtcccaagactgagaacttgaaaacaatagaagtgagagtataaataccagacgtaagggctgaggagaaggacgtttctgttttttaaacatctattctgtatattggtggttagagtagggatggctcctacagattcatgtgtttgaatgcttggttcatagagagtggcactactaggaggtatggccttgttagataaggtgtggccttggtggaggaagtgtcactgtggaggtgagctttaaggtctcatacatagaagctcaggttaaatccgcctggctgcctatggaaaacagtttccccttctgctgcctttggatcaagagggtagaactctgagctcctccagcaccgtgtctgcctgcatgctgccatgcttgttgggatgataatggtatgaacctgtgaaactgtaagccagccccagttaaaagttttcctttatacaagctgccttgatcttgttgtctcttctcagcaatgataccctaactgagacagaagttagtaccagggactggggtattgatgtgataggcctgactgattgtgtttggagaaaggtggatgtggggactttgggctaaatgggtcatacttgtaggaacatgg

SEQ ID NO: 25459 - DNA, 1888 bp, Mus musculus
atgttttgcatcagcttgggcttttaaattagatgtgaagtaagacttctttctacatttttatagttaatttagtgaaagatgtgaaagtgaaagcttgtgaaagatgctgggattggcagccccgcagactgaagtcctctgttcatccacagaacaggtacagcacgggcaagatttacctacccaccctcagccctgatctggagggaccaccagtaggggtgggagggtaattcagcttctgaggccctttcactccctggagtctttgctgaggcgatttacaaaggtgactgctgcagtgaaatttttctttaaaaaagtggaaacacaattaggaactagatggacatttccggctcatttctgcaagaccagcgaacagcagtcagtaattcttgtgctttttctcttatttcagatccaaaaagttaatccaagaatctgatcagcacctgaaagatgtagaaaagattttgcagaatgacaaacggtatctagtactggactgtgtccccgaggagaggaggaaactaattgtggcctatgttgatgacctggatcgccgaggtccacccccacctcccacagcatcagagcccactagacgatcaacaaaataattctaaatacccttccacgggctcgctgttaattgaaaatgcttgcatgagccagattttcaggtttttacatatatgcattagtcaacctattgcaaaatcacctgacgaacagaaggagaagcggttgtgggcagtctcagaacggaacactttgaaaatagttaatgcttttctttgtgtggcatgactgacatacatactcaaatataggctgtctctagtaaatttaaaatctcgaagctaaaagtcatccttttataaggtgtggaagccagtgacttggtgatgttcttactagcagtgttactcagcaagacaggagagtttgtggtaggagcttggaaataccacagactccaggaaaactgaagttggagtttgtttttgattttgttttttaagcgggtaaaagagaaaacactgaattgaattcttccagagactatggttattataatggacgtacttttacctttgtctctaaagagcagtttagttgtatttgttcacgtatgtgctttgattctcccctccggagttataggccaagtcttgtttaccccaggagaagatgtatttagtaatttcttctcaggtatgaaccacattcataactaacatgttggccagagtggaatcctggtttaaacattctttattctccattgaatgatctctaccaatattctcaattagacaacaaaactccctttctgggtgttcctgtaaactactcctgtttgaatgtttgaacttttgtttctaaaaagtttaagatgtttgaatgttgaatttatgtatttgaactacaataaaccaacccttttatatatgtggattgtaaatgattattgttacacaatatattttttaaaaactcgtagacctgttttttattttttctttgtttgctttcttgtttgggtcattgtttttttttttgtttgttttgttttgttttgaaaaaagcatgtgatatttgagacaacaaaatcttagaatataggttttaaaggcttgactataatgctgtatttctaatataaaagacaagaaattttgtagaaagcctattctccctttcttttgtgtgcctgtatgtgtgtgtatgtttatatgtgtgtctaatcagtcttttaattctacctgttaattaatagcaagaatattgtagttctttgtctttctagcatatcaaaggtttgcaccttttagacgtcctttctacctgtcatatgtcatgccgtgaacttacttac

SEQ ID NO: 25460 - DNA, 1182 bp, Mus musculus
ctacccctgtgtggtgtatgaccatgggcccaagagcgctcttgaataaaaatcctcttgcagtttgcagcaagaccgtttcttgtgggtgattttggggtgtcaactctcctgagtcagaacgtgggggagtcctcacgttgtggatctttcatttggtgcattggctgggaaacgcgaccacccctcacacccaagaaccgacttggaggtatggggatcccctcttgtgtgcgtgtctctgttttgagtgtctgttttgagtgtctgttttctgaaacgaacattggaacatgtgcttgttgtgttgggttgtttgtgtcttgtcctatgtttctgaagcacggcgaagtctgagtttggatccatctgagtttattgaatttgtgtcttggtttcagggttacgagatcgtgggttcgagtcccacctcgtgccttggttttagggttacaagatcgtggattcgagtcccacctcgtgccttggttttacatctggcagagtgaggaatgagtgtgcttctctggttttggtcgtctaggtagaggtggactacagtgtttgtagacgatggggggatggggttttctgaaatgcgtgcggtctgtatttgcagctgtccttttgggctgtgaggaccggaggactgtggttggcagatgtgctaggaggaccacaggctgccaccctgggggacgccctgggaagtaaggagagccagggatctttcattagcagcatataggtaaagccaataaaaaaaagttcaggtttttgaattacacagtagtctatttggaatgggagttctatcttagctccctccaccccctctggaccagaactagtattctctaaattgactctgtacctcaaggcacccacttcttacactcattgttactcatcgtttggacatacagaggatctgcctgtagctgatcgtggtgacctaaattcagaatctgtctacctataaggtcaagaaagatggatgactttggtctcctggaactgttattagaaagtaagtatactaacctatcaagcaactgtagggaagagagagagagagagaggtgtgccgcagggagagggagggcatggcttaagaggagagccatgatggattggcttgtactggtaaacaaagatctgagcctggggcaggctggctgt

SEQ ID NO: 25461 - DNA, 1194 bp, Mus musculus
gtagaatttgttactatagaactgtttgaaaggtatcttaacagttgagaccattttacagaggacctgcattcagtttccagcctgtcttcaatagcctgtaactcaatctctacgagatctgacaacttctggtgttctttgaggacagtgcacagacatggacactgccctacaccaaagacacacacacacacacacacacacacacacacacacacacacatcatttattttttaatttttatttttagctgcaaaatatttttattgtaaaaacagtcaactggggttgacaatacaaatgttatctcagaatatttccccttggttcctgaacttccaagttcccatcagcatttctctggtttttatggtcctttcaaacatgctgctgactgcatttatatgctgctttgaaacaaacacaaatccgtctgatagtaaaaccaaccaaaacaaaaggcaggaacaaagcccctagcctggttctataaacaattgtatgtttaatctgtttctgaaatcattttgcaatatatggaaatagagtagcagttgatatttctaaattgtgaccattgtccgagattgctttgagaactggtagttattctctttatgtttggagacagccattaggctgtaggcctgcttactgcatagcactggacgtgccgggcgcattctggcccctggcatgcttcagtaactaggttttcaaatgtgggaaaccaagctgaaaggtctgttttggtttttgttgttattgttgttgtttgtttttgtttttttcagagttctttccaaacatacacatcatttaaataaacaaaaacaaatgctaagaattgctatgttatctattcatggtaacaatacttgtacctttttgttggtgagatgttttaatttgttgattgtttaagtgaaccaatagtttacttccctattttatcagtttatgctttatctttacaatttccttctctattttctactttctcctttttatgtaaaaatttagataattgattttgtatttttaagtgggcatttaaaactttaaatctcactcaaatttctatcattcatatcctatgagatattttatgtaacattgttctatatcttcttcaaatatttcccagagttgtccagtaaaacaactgggttccaggattcactttggag

SEQ ID NO: 25462 - DNA, 1151 bp, Mus musculus
tctgcagtctccaaacgccaagttattgctgagcccccaatggcaacctattgacattctttctgaaagggccacaggcgtgagtggttgaaacggtctttctggagcaattaaatcaacctcctcagtggagaaatttgttacttctaagttttttgggttttgttttgttttttaatctagtaggattatagtcatcctctaaaatggcctttctctaacttcaaagtccactggttctatgggtcatttctttatcaagatatgcagaggtctatctcccaaggcctgaatcctaactctggactccattctaatcattctgctcagtcccttccaagaggcgagtgcttgccaacgttgcttcttgccacaagcctcccagatctcctccccttagaccgtcccagcttgagtcctgatgcagtcatgcattcctcgtaattcccctttgagacatggtgtgtgggtgttcagttctgtgtctggtggctatggacagacagtgcgtctccctgtgacctgtgctagctgtgaggcagctcggatatggaagagctgtttggtttgaaccgtgaagaaaactgtgtattgagttagctgagattaaagaaacaaacgaacaaacaaacaaaagctcatcacgtgactgttaatgtaaacctggttattaaaataattataaaattaccgttactgttctccagtcgtttgtgcatggaaaactaactcacctaatatactgagactctgggagactaggaaatggttcagtgggtaagagagcttgctgtgtaagaaagaagacctgagttccaatctcagtacccagttaaaaaactaggtatggcgaacatgtatgcccagaaccctggtactggggatggggtagagacaggaggatagctgggtttgctggtgtcaagttcatagagagactttggttcaatggtaaaaagtgttaaagcaggacatctgatgtccttgcctggtccccaggatcatgtgcgtgaatgcacagccgcatgtaaatgtacatgtgtaacacacacacacacacacacacacacacaccgtgcaagacaaaagaagaaacctctataatttggttagtaggtaaataagcatcagatctgataacagcagaggtt

SEQ ID NO: 25463 - DNA, 2479 bp, Mus musculus
gtttcttgtgcaccaggaaagtacttactattgttcactcttgaaatgactcattttctctttcccccatatatctctttccccttgtttctctttgggaaattgtcttcatctgcaggcacccaagtggatgagggtgtccgctcagctagcaaacgcattgtggcaccccctggaggccgttctaacatcacatccctgagttaagccctcccaaagagggaggcagaagcaagaagaaaaaaaaaaaattgaagccaaaatggtacaccgatatttaagaaggaacgtgaatccatgcagttgagatctaaagaatcactaagcctcaagccttatgtttcccaatgttatgctcgcttgcctagctttatgaattgctttggtttctgtttttgcatactctcaatttctttgaaccccacccccaccccacccccacttacatgcatgcgatcagacaggccactaaggtagattctgcatattatagtgttgagagcgtatgtagcactgcatcttacaacaaggggacagacaaagctgggatgtcgagaaaaaaacgaatgaaggcacgaagggcctttggatgattgggtggtgggagcccagggcaagatggagggcacaaaggggctggggtgggacgtgtactagggaggtgggtgggtggggtgagcagaagggcattgtgtgttgtattatgatgtgtgttaatttccatggaggatggtcacatatggcagtggtgctccatcacagtcccctgggatctgcagagatggcaggaggtctttgggttctggactttgtcatgtcctttcctagtagatcttgtttccttaccatgtattgaatgacagaatccagccatttcttccacctgtgatgccagttgcttgctcaggcctctttctcctgtggctttctagtcttctattcccagctgtgaagaccacacacagatgaacaaatggacaggtctcttcttctttagcttctttggggctcttccaaggctgccatggagaatgcagccccagctctatttaggggaggacaggtaagcttagacagccttcctttcagccctggggaggtactccccaccctcctctctagtgtctgcaaactgagttaggaccatggcagagctagagccaaaggcttcctttgctcatggcgaatggctaacctcctcatcccacacctgagcgcatttcccgatgttatttcttttgggagagctgactttctctattgttcctaaactttgctcccaacagtaatctctgcttccgagggagagtacagcagagatgtagggaacccagctttgagtagcaggagtgcactgtataaccacattttcaatgctaagccaagtgtttcctcgtctgctagcagatcccaggggctgggatatcactttttaattggtactaaatctctagggtgatatggataaagcgacatgatgcagttttcttggtgtgcaacacataagggcagtgggcagcagtggtagcctccctctttgtctgtcagagttggaagcccgtgttcctatcacaccatttccaaaatcaaccgtgagccagattctgtgagcaaggcaggggggctgtagaagccaagatactcttcctgcaggaaacgtggtagtgaccttggctcagacttctgtgctctagggacccactcggtgagaaatatcacactgcgcattaagtactctgaagagcagagcaggcctcgtacaccttcgaagtacttagagaaaactccatctctgcctgcaggtgttgtttggttttgctgggttttgttttttgttttttgttgttgttgttgttgttttttttttttgaggtggggaatttctgtttatttcattttgtagagctggacaattgagtccagggcctctcaaatgctaggcaaaactctgtcacggtgcttcatctttgctccccttacagccctggctgtaggctgtcataaaatttagaactagagaaatatgaacagtttggatacataaggatttggaaattgccgaggaagggattttcctgagaaagctattctgttctaatcttgaaaaaaggctttcacctcagaagaggaatcttgcttctttaaagctctcatggtgctttcattttaaaggagactttagaagaaaaagaatggaatgaagttttgagttacaattcaaatttggggatcaatccaggaacacagaaggacttttatacgcaaagggagtttgccagatctgaagcttgtatactaaatacctcaaaagctaggctcggcagcagcataggttgtagtaccatctgtggccaccagatgggggaagagacatgtaaatgaactgtaattctgcgcctcctcaactgtgtggttccccatgcctgagcccttccagggtctctctgatcatgaaaaataaactcctttgggtcatttg

SEQ ID NO: 25464 - DNA, 1555 bp, Mus musculus
actatattatgccagttttttggaagccttagttcgggatgtctgtatttcattggaaattgatgacttgaaaaagattaccaactcattgactgtgctctgcagtgaaaaacagaagcaagaaaagcaaagcaaagccaaaaagaagaagaaaggcgtggttcctggagggggattaaaggccaccatgaaagacgacctggcagattatggtggatatgaaggaggctatgtacaagactatgaagacttcatgtgacactttaccttctgctgtcttctttctttgcccacaatcccttcaacatgtagcacaacctcctttcctttcagttctgccaaatgctacaatcagaagtgcagtatctttgtgctggttacttaaccccttgacactcaggtgctaatgtgcaaatgagggaacttggatcttgttgccaaggggttaaaattgggaacctcagttgctactaaatcatagtttaaaaacaaaacaaacctaataatgttgtcattgttgctatccgattccatagcagcagtcactaaattggaaacaaaggttgcaacatgacaaaaaaaaaaagtgtagtatttaccagcaccattcagtaatacagccttaaccgtacctccttgaactacttcataacttgtcgagaaaagcagtttgcagcaagggcatgtgggatgcacctagtattaaaattgctttgtcttaaaattgaggtgaggatattaaaaacgtgtgaagaagactgcttatctcagagtgaagataactgtggctgaaaagtactagtttgatacttaagattttaatgaccaaaaccctccgacttggaagctgaagaaggtaaacttctccattattacagtgcaagtggtggactctccagtgcattgcctgtctagttatttatcagcctgtttctattgatggaggacttcatatgggggagggaactctgtttctgtttgcctgattcaagtgtctgagaaacaaatgttctaggctgcagtgggaaaactttgaacagggttttggcgtttccttttctttataaaacgtgctcagcaaactgcaccagttacctacagtttggtaaattgttatgttaacaattatgacatctgcagtgttttataaagcaactaatttaataaaatcactattgtgaggacttaaattttgtgttatatcccaagagatagttgagagtacagaatgccactcatgggtgggggtctctactcactaaagctaatcaatgcttgatgtagtcacagctttgaatgtttgtgtcttcaacagttacagagccttcctactcttaattattttgttgtttagatgctaaggctcaattaagtacctaggactatttatttgtagtaatggagcctgttactaagtttattgctgtaagcataaattggattacatcttaaataatttacccaaacttgtgtacccctcaccccaggttttcacaatcagaacaaaaaatgtttttgatttctcttccataggcaataggaatctcaaagctct

SEQ ID NO: 25465 - DNA, 3097 bp, Mus musculus
agtcaggaagacttaacttaaacatgtgagtgcgtgaaaggcaatttctggttaactttctgagttattgtctactaattctgtttcctaagcagatgccacatgtgacctgccttgttctggtgaagagccgtcggtagaacatgctgagggacattctgtggcatgcaacggacattgcaagttcccattttcatccagagcctttctgagtttcaagtttgaccaaaatgctataatgaaaatcttggacctttgagccagcaagagtattgcagaagtccctcgatctgagacctgttgcgtgtgagtggctgtctcctcaagccttacctttctcaggtatctgaaagaagtgcagggaggccatgtttctaaagagatgttctgtacagacgagaaactagaaagaaacacaagtttgcactgtaaatgcatttagaactttttatatggatttaccatttcagtgtttggaaccaagttttagttgcctgtgtttttttttgtctctcccttatttttgtgtgactgtgttttgttttatattctcatcaagagttgttttgattgcatcatcagcaagtagccatgtcaataggagtgtttcacctccccatcttagtgattgcaaaaagcttgcttattgaaaacttaaaggaacttaaaaccccagttaccaatgtactgggcatcagagctgaaccgtgaggtgaggatgcaggcgtttactcatctctgcctctaaccactgagagtctaaccttccaactggagctgcacagtgaacctcgagcacttcatcaggaccacatccacagcctggagagagatggagtcagtggggagctgatgctgtggatattgagctctgatgtttgctgtcaaaaacctgtgagtgctggagcagagagcatggaagcaatagctgacagttactccaggtcatgccttgactctcctgcctccgtccgttcagtattgtgtcgtgattatgcctgtgtgaaacgtctatgcgtattctagttgtgagtctgtgtggaaaacttcattcttagttctatattgcatctcaacgttgatctgtgtaagctggtattatgttaggttccagtttgcagtaatactagactgacatgcttttcattaatatcttgaagcccctgagttacaacgtgagaaagaaggggatctgcagtttaccagtaagtccagcatgtcactaggggaccgacccttgaagtaatgtacttagatcacacgtaggaatgtattttgtattttgctccttcagaattcttaaaccaaacacgggtgacagtgcccactttgcagagatcgcctgttgttgaggacaatcaccagagctttaaggaggcaatatgatgttggctgcccctgacctcgctgagaatctcttctggggtggactgtgctgttagagtgcatgtgtacacgtgcgtctgtcgtgtgcggttttaacaagtggtatccacaaagtatatctctgcttataaatagtactatagaaatctctatgctgtatatgtagcctatttaactgggggttctgcctaaccccatgggacttaaaaggaagggctattattgtaaggaattcacttggtattactactttgctttagcttttaaatgactgattttaaagaagaaattatatttattcatgaaagtgtcactcggtgctaagcaggagacttcacagtgatacagtatgtttggaatcttctatgcgactactttgtgaatccttctgtgacctttgctttttaatgcattatatgattgtgtttggaagcccttactgttcttgtcagaaatacagctgctttgcttgggtcttcttgagccatatttataattggtcccagcattccagatttctgttaaatggttaagggagtgaaaactgaagcttgcctggcagtgagccactgtcactccctgactgtcaccaagaaaccattgtgtgtgtgtgtgtgtgagagagagagagagagagagagagagagagagagagagagatattcttcttaagtgagcacttcagtcagtccctggtgcctgtagaggttggattctcagctctccatactagagcaaaatcaactagctagcacaaggtccatggcccttaaagtggttgactgtaagaaccaaccagtgatgtgctgcttcatttaatgcactgtggaacaaagcaagggcatggttggggtgcatttacaataactttaggctttaggtctctcaacaggctgaaatgttgagagagtaaggtttgtatgtgtgatgtgactcaactatgcagaaaatgttaagttggtgttcttgttaatgtaagtccagcgtacacacttcttcactgtacagtttagctgggagaccatatttagcacaggacgggatttcttctctgagctatgttagcgtttcttcataggatctagtgatgaggactctgaatatgcagtaatgtgcttctgtgtagtgccgcatttagagacagactctagagggaacagtagatacgtcggccttattattatttgtgtttgagaggtgagactttaaaatcgcttttaaacatccttaggatccaactgcatgtgttccgaggtgcagtgcactgtgaatctttttaagtctaagtttgtaggtgcttttatgtgtaacttaagtggttggaagaatgtttaataactttgtcctcaaccattgtactcaaagagacaaaggatacagtttacatactttctgtaagattttgttaagaaatagtgaatgaatgactctaggatttcaaacagagattccatcctgagacatgagcacttggaggggctggaaaacccaatagatcggatagcttggaaaacttggtgagccatgttgaaagagctaactagatttctgtaccaatatgtgaaagatagttgcccagaactgtcagagggattgtggtcactgcttgctgctttgacctttgaatatcattatttttatattaaatactaattagtaattagctatatagcagattaatattatgctgtaagacttggctaggcttttt

SEQ ID NO: 25466 - DNA, 2490 bp, Mus musculus
ttgagaaaagaggttcaaacgtgttataactagaattgaccatcagcaaaggacaccactcccaggtctaatggtattcttcacctttgtgtatgtagtgttactccttagagctcagtacagctggtgtcctaacacttcagaatacatttgtatagtttcttaaaagcctagaaatgggcttatagaaggcctctccacaccttcctatcaatatatgtaggattgtcactcctgaagcctaggtcagaaggcaggttgagatcagcagaatgagatttgtcataagggttttgctgttttaagtgtgttgtgggaaaggatcttgaaaagaacagatagcagttgctgggaggagtgaggaagaaactactacgcatttggcacttgagtgcttcctggaaggatgctcaggggagaaatgtggtcaccccctgcccaagcagaattgagcatgcagttctttccaggcattttctattccttggtgaagtattgttttctaagtatgatcgccaagcagtccatggttgctaatggaatttttttcgctctaaggaccagtgttcgagtcctttctgtgttgattctgtcaagctctaggctgagtttgggttttgtttgtttgtttggtttgtcattactttaatttgtttttaatgtgtatgtatgttttgcctgtatatttgtttgtataccacatgtgtgcctgtggtgcccagggaggtcagaaaaagtgtgtcggataacccgcccccctccaccccccggaactggggttcagagcaattggaaatggaacccaggccctctgccagagctctcaccctctctgttgttgataacaaggtagcccagagtgttgcacagtcatgtgcaaatgctggcagcactttccttgtgacaaacagcatttgtcactgaagtactctacagccattgaataatggagactcagcccaccctcctgggtagaactggatgaaagggcatttctgtcaacgtagttcatcaggaaggttgtttgtttaggttttccctgtatacatctttgtacttcgtgttaaagctcagaggcttcattttgagacatgttcagagtggaatatctaatttgaagccatccataaagagattacattaatctggagtcttagtgtagcacaggggttgggtctgtgtctctgtcacagtttaaaaggaattcacctcaagatgtgactagttgggcaggattgactaagggccctctgggaaaaggaaccccaggagtatcagtttcagggtgtgacttggtcctcctagtggacatcagctctttggtggaaggtaagtgtgtcagctagggggcgggggtggttttgttgatattgttactagtttgttaagtgtccttttctgagcatctgtttcagtatttctcaggctttttgtttgtgctacgtctctaatacatctgacaccatgagaatttgctgtaagtttaactcctgagcctcaagtagataaaagggctgtgttctctcaagtcagtgtctatagctgtgaaattggtgtgggagcacagaaaacactttgaggttctcgttggtagctttagagtggaacgggcagcatttcctaacactcagttcttaggatagtgagcttttaaagtagaaggtagggtgctttctaattttaattatttgatccaaatgtgtaaaacggtagctctagactggtgaagcatttgggacacagttggacattttaaaagccatttctcaagctttaaggcatttagcacagcctttgcagtgctcagcagaggcgcgaatgcaagcagaggcgcggccatgaggtcggtgtccgacgctggccgtggctggagagatgcagtaatacttgtggagtgtgagcggcagtggataggacacgtgacgtgcacggtgccttgggagagcatgggctggtcctgcaggactctgcatttcactgtgactgtgcagcacattttaggctgtgtttgaatgtctcacaagttactgttaagtgtcaaatgcaagaatccaagaaggagctgagcctttcattttacatgttgtttgaaattaggacaagagacaattcacttctgttgtgtaaatagtaatttttttttcagttcagcaaatagggcaaaacagtgaaaccattaacttctagtttttgaaaactatttttttatatttactgataagttttaaatcttatggtagttgtaaaaatgagtattgacttactagacttatgtataattcaaataatctgttggcttcaatgaaaccgtaatgaatcttcatgaatgttcatgtatttagctattttaagtgatattctcttaatttggatagtcttaggtcaggccagtagagatgatgcccacctgtaatcccagcacttgggaggcagaggcaggagagtctctgagtttgaggccagcctggtctacagagtgagttccaggac

SEQ ID NO: 25467 - DNA, 1356 bp, Mus musculus
ggcttcagaataagtagatttgtaaactgtttcttcattaattggttttgtcttatataaaatgatttaacatagaatctctgccagacttataacgacgctttatattttattgggagaaagatgtaagcaaatcctttacatgattatgtctatgataataggaaagtatttgctttactgtagttattagtcaaacatttagggaaaccaaagaggaacccccaaaatagctcgttgggtttactgtagtgtgacaacatcctttagtgctacatttatttagtgagcccctcccccaagtttggtgtttatgaataattggaactgcttttcacctacatcgatgtaactcataaatttctagtgactcgggtctgtgaattagtgatgctggagcacccaccgcccttccaaagatgtggggtgacccgacacctgtgctgtaacatctaacagcttttcagtgtgatgcacactagtttaggagctaaaaccatactgtaaagaatgcactgacagtgatggaaggccacccacgctggctttctgtcgaatactgtgagctttgctctaactctgtctgtaaggaattacccataaactgggctgcttgggcacagttactgctctgcctttggttctgttctgtttaaagtcattgctgttactggttattactctggaccagaaaggctaggaatgtataggataaacatgagaagttgttcgcattcatagaaatataaaaggtagaatttattcagagatgaaagtggcctgtgggaatgtcacctttatctcaggtcggcttggctcttaagctgcagtacagtggtgggcaggagataaaaatccgacctgtaacgtgcagtggttcttaggcttgagccagaaccaggcagaatgtccagcagagtgtcctattgcccctccctctcaggcaggagagtcctcagctacgtaactatgttgtcatctttccatggagcagaaagtctgtgtttcgacactcctgatgtgctatgaaactgcttgctatctcctaggtttagacttcttgaaactttttttcctgttttcagtagagaaacttctgtttatgctgtatgtgaagacaaccaaataaaaattgatgataaatgagaattttgtggtttttttgttcttttgatctgaaatcgtcatcttacatctagctcctacatcctttctctttaattaaatccaaatacagaatggaattagaaatatttattcagaatataagaacgtttgtaaaatattataaatgtctctgtataaataaatggagtttttttttttaaacaattctatatcaaataacacaaatta

SEQ ID NO: 25468 - DNA, 1507 bp, Mus musculus
agatgcaagttaggaagggatgacaggctgcctgccgaggtttgctccctccccacagcctgaaaaaaatccaagaacccttacttctaggtccacagttcctccgcagggaagccccgaaagcaatgatcctacctggccttagagtctgcgtttctaagtacataaatatatggtgacttggtgaaaacgttggcaatgtccagttttttgaataaatgggaaagggctatacaaccttttccttgtaactgtcgatgttggttgagggtgaagcaagaagacatttgcttatgtgaattatggaagctactgaactgcactgattaaatacatgatagcaggtgcctaggtaattttcctttttgtttaaccgggcgcttcctgaaccaacttttaaataggaaatggtttctattaacatgtctattcaggcaaacaaattatcttgattctaatttgtatgaggttaaaaaaacctactgtagatctctgtaggcagtcacctttcctaatcaaagccaattttggttcatcaaaaataggcagaacaaaaaggcccatcaggaaccacttcatagtttccttggactgtactccccattctgaactgaggtggataaactcaactcgggcagcgggaataggcaaaggagacatctatctatgactggctctggtacactgcaaccaagcccaggtatatccgccaagtgtgccttgccttgtgccggtaagaaagcctccactagagtcataataaaggctgtcatgtgatcagacagttgagacctacccttctcccccgtgtcatactcctggtgtacatgagtgctcagtgtccccagtgggaccttccactcactccattctgtgctgatgatatgtacgtgcctgaaactggatggtacctttaactgacacttagaaagcttttattagcttaagtgcgcatatccttccagatgcatgtatgcacaaggtcttcctcagtacctgcagcagaactttacaagggcttcagagaactctaaattagagctttggcagggttcttataaggaagagcaggccgagccacacagccttaggtgtttattctaaaaactgttagaagaggcttaataaggaccttgccaccgtgagggagacctggaagtcttctagttcctacatacagacattaccttaacagaaaggaaatgcttttcagttttttttttttttctccatcattggcgtggaccaaaactaccaggcttctgtattctatacattatggcccacaaaaaactctacgcaacaatataaaatgttagagctgccaagagttaaggttttatcatgttcaaagagaaaagagtgtagagaaaagcatgaacccctcgctctgctcttattggtccaaacacttccttctgtaaatgctttcggtgataaatgtttgattgggtgtacgtccagtcatcatatgaacacagtgccctaagagcaatcacgttcacta

SEQ ID NO: 25469 - DNA, 1209 bp, Mus musculus
ttcacatccacacatacatgtgtacaaatgtatattttcatacacctatgttctgtatgttattgctttaaactgtagctgacagcttccagtgttggtaacattgtgaatttcactgctgtgaaaatattttgaatttttatttttttcctcattagtattttagtcaagtacttaactattctcagcaatatcaaaggggatatttaatgaatatgtatttgaacaaactaccaagatttaagcagtagtgatataaggagaaatctcttgatatgcttattttttgagaggaaaaaaaggaaagtcacggacaatattgtattcatgaatgaaagccattttaatttttcattctttgatctggtattcgcatattcctgtgactttatgccctttaaaaaggctcactcttctttattcgtttccgtttctgtttccttcaggatatctattttacagcctcttttatcccatttgacaatgactacccttttcagctgttgagttttgaccacactgtggtcaaatatcttaggatatgtcccttgtggattccttatataggaggaccaggatccaacattcctgctgtcatgttcactgtcccgctcagtctgataggccacatgcggattgcttccgtgaagccctttagaagtatcttagctgttaagtaggtcttgttgaggatgtgtacagctcgccacagagggaaggagggcatgcgttttggacttagtccctggaacccatattagaacaaccttcaaggagcacagtgagtagtcagtaggctagcctgagctcttcagcaagaagccatctctgtacaataagaggaggtcaatggccccagcaagatgctgcctgcaatttgagagtataagtgcgtcttcaggctccaagaggtgatgtattactgcatggaaacagagttcaacaacagggtaagcagtaggaccatgaggttgctgagatgcacaatggaatcacataccaatgtgagacacactctggctgcattccaggctgaatgcaagtttcaagtgatatgtccctatctcccttgttttctgggggtttacttgttgacccatgggatctaagcagttgatgaccccccctccccaatcttcttaagaactcaggagactagacaggagcagtgaaagctcagagcctgtcaaggttacatagtgagttcaa

SEQ ID NO: 25470 - DNA, 1192 bp, Mus musculus
atataaattttgctgacaatggtataatttaagaagtgatagacaccgtgagaaggaggttatctgaagctagatggtttgcagcttatctgtctattgagcagcacgattttggacccagttctgccactggaaagatgaagtcatagaatttcattcactgagctgagtcagaaatgaatgaggtggtctatgtgaaaagcactttgggtagagcagatatctaactatagtttcatgtgatcataaaagtctctgggacaatagagctcttaacagcatttaaactgaaggaagatgctgccaatggtgtagggtttttgtttttgttttttttttgggttttttttgcaacagaaggagtagcaagtatagccatggtcactgcagaactaggtgacaggtggtcccccacgagcctcagaacacaagtgaaagaacagatgtgtgggggatgtaggcgaaagcagccgtagtctgactgacgccttgtagatgggagcattgcaatattcttaggtcaaaggacagtgggccaatccgaaaataatggcgacactcagaagagctctacagattcctgtcagtgggctggggagtgttgaaatagtgggatgggggcctggcctgttactatacaccttttgaaattaatgaggaaaaacatagcactgggaagtaattgctagaattgaatccagattgcacaggataggcatgagacataaagaagaggcagctaaaataactgttgggaggaaaagcctgtaaatctagatgcatacatatatgcctccatattcatttaaatcacagggaatggaagggagctagaaagatggagccattttctagagcaacccttccttcaagacagtgacttcacggaaagtcaaatgtaagaatgcagtcggttcctgatggtaaaataagagagcagctcctcacagacaggagcacagaaggcactgcaaggcccctgcgacatcacccttgaaaaggcagtcagcgcatttctgagttccaggccagcctggtctacaaagttccaggacagccagggctacacagagaaaccctgtcttgaaaaaccaaaaaaaaaaaaaaaaaaaaaaaaggaaaaggtaaaagaaagaaagaaagaaaggaaggaaggaaaggaaggaaggaaaggaaggaaggaaggaaggaa

SEQ ID NO: 25471 - DNA, 1911 bp, Mus musculus
ttagcaggactctggtatggttcttaactgtttatgttgtgtttctgagatgtttcatggggcagattgactatatgtttgtaggttatcttcctaaaaccctcagtacaagttctggcttacaaaatggacacaaatcttcaaaacaagtttacatttcatatggcattgataatcttcagtgagatttaatgttcacttaaaaaatctctactgctgatggtaagaaatttgcttgttgaattaagtatctgggattattctttaaaaattgacagtctcataattttcttaaagaataacatattttgtgttattcttaaggtgtgccaactaaacatgtgtaaggtatacaaatacaaatgaaaagtccatataagaaaaaagtaggcttaactaatactatagttttctaaagggagagtattatctaactgagggagaagtaattgaactgtttaattatgaatgaaaagttttatgtctttattagagattccttaggtgaatacctgttgtgttttgttttcatctcaaaccattgactgccatttgtctggggcaagggaagaaacaatcttcgctctctagagaaagacattcagtgttttattcttctgagaaactgtaaattatacttgtatggctatagctgagttctttttagttgcttagattttttttccccagtgttttgtggccattatagttaactgttttatttcccatctaccaggttgagcatccttaatccaaaatccaatgtctgggtcaggcatagtggcgtatgcatttagtcctagtacttaggaggtagaggcaaccagatctgtttgagatcaaggccagtctggtctacagagtgagttccaggccagccagagcaatataatcagaccctgtctcgaaaaacaaaacaaaataaaacaaaacaataacaacaacaacaataataaaatccagtatctgaaatgctccagaatccaaaattttaaactgacagcgtgacacaattggaaaatttcactctttatatgataggtcacaggtaaatttcagagacactgtaaatagtgtataaaactacttgaaactaatgaatacagtgtatgaaataagtacactccgtatttagacccggatgtgtatatgcaaaatctgaaaacagaatctaaactctgaaacattactgttggttccaagcattttggatagtgatactcaacctgtaaatacttttctaatgtttttaagtttggtaaatctttaaatataaacagaatcactgaagtatacatagtcatttatatttttatatttttggctaagcggggttggagggaaatatattcattttgagggataaactagggttttacttactcgttgtcgtcttgttttattgccttagttctatgaactaacaaccaaatggagatggtgtaaaacctttgttagcaaccaacatgtcacattaaattacatctttgacttggtgacaagaaggaaatttcttcagtagaagaaatgggtgtgttagttttggtagtaatcagagttgtattaatcaacagacatcattgtaaaagctaaattactagtgtccatgggtagataatagcattttcatttatttcctaaattaaagagatatttcctacataacagttcttctaaagggaaacctggcatatgattaaaaaatacatctcttgtcagcttggcttagacttgagtttctagtgctgggagtctagctcactgcctgatacgcacaaagccctgagttccctggctttgatccttggccctcaaactaacaaaccaacaaatcctagttagaaataagtcttcccgtagtagaggacaaagctttaccaagaaatgttgtcctctcatgagtttttccag

SEQ ID NO: 25472 - DNA, 2402 bp, Mus musculus
ccacttctgtcttcaagttttgcctgtttccactttttctcccaaaccatttctgctacagtgttccctgaaccgttgggtccatgctaagtcataaaccttatggacttgtttaccatttgcagttaccataagtgctttatcttctctatgcaccggcttaaactgggactgttgtgtgttggcatattctctatgcagcagttggtcaacttcaactcaaaacactgtttccttacgttccgttccggagtccatttcacaaacgtactctcagagcatgtcgctttctagagttgccggtaagctgttcgagctcaagctttttaaaattttatgttttggttttgctttattttttcacatctgaggtttctttcttcagtccacagaaaattttgtatgctaaatttgggaaacaaatctattacaagtcattaacccagttgaaatttaggtctgtcatcttaggctagcgtgcagtaaaggaagacctttgtagagtgaactgcctttcataccgctccagcgtcgtctccggcgtcgtcctgcttgtgctgatggtgtgactaggtgtatcgaatctgcttccgtttaacctcagacgttatcacacagcctaacgactcacattgagctctcagtcatgaactgcagaccacttttagttacaaagaggctagagcatgtcagtggcatgatgcttgccaagccagccctaggcatctaagataattacggtattttagtatgcggtgtactgccataggaccagaggtcagtaacagtgttctttctttcttgcttcaggtttatgtatatctgttaaagataacgtgcatgaattactttatctcaattatttgtcaccctattaaacacaagagattgcacagtgatttctgtccccttaatgaaagcgcctccttctgttctcctcttcccctcccttccacctccctcctcccaggtccccccccccccccccgttttttttcctgttgtagatttgttaatgctgcagaaagggctcctttgacttaagagaagataagtggaaatgaaaaagattcaggtaatcactcagcactttaccgtaattcagtagaatctacaatgactgctacattgccctacatatgtcataaagaatttgttctgaatgaaaagcttcttgattctagcagagagtcaattcgcctgtgaacttcacgatctgggccacttggatttagggatgacattttattctgagggttgatgaactgccacttaaagaattacatataatgaaattcgtctttattcagtaaacatttgtaatgggtagtaaataaagaacattagacttttcatcaaacaattgaggtttaattctttaaaatgtatccttactcattttactacattttaaattacattttacctttggaaaatggattagttatcaatgggctcttaaaatcgttgataaaaaaggttttactgtgttttttttaccatggacaagtctgataaaatatttgagctgctatatataagaataatatgtcattgagacatatcctaacaatattttgaaattatctctctctaatgggtgtcgtgagagttatctatgagtgagccactatttttatttttatatttaaaaagaaaataaaacttgtccattttcatgaatcatcattggttgatttcactttttgggtaaaagatgataatttgattttagggtttaatgtctttctcccctctttgcccagaagagtctggcttacccgctcatagagcagggcacatcttcacactgttttacacatgcactggaattttcgtagccctgtatgaataaggatatctttgctagtggcttccttcactacgaatagataacagaactggttcttacttagtcttgaaaactgcagcattgtattgcagtcaggatgcagctctccctcttctgtttgccttctccagaaatgtcccttggagctcttgaaaaagctgtttagtagctcaaattagcattgaatttattttagagtgaattggttcaggagtgcaacctcagataactgttagggccttcatcagacatgtgtgagaccgattaaaataaaattctgaagtttgtgttttgttttgttttttttgtccatggtgaggaaatgatctaattgtactcacttgaatcaaacaatatacatggtagtattggctggaattaatgtgcaggtctcaacattgtttctccagaaatacttctgaatttcagacgttctacaattttgatcatttctgtaaaagaaatggttattttattcagataccagtctcctttccaaatgcaaatgaattataggttttaaaatgtaatttttttgtccttacgtctg

SEQ ID NO: 25473 - DNA, 1100 bp, Mus musculus
gatctactgcaaaacgactttggtatcaggccggggatcgttttcgccgagatgccgtgcggaagactgcatttgcagaatctagacgatgcggtcaatgggtcggcctggaccatcttgttactgactgagaacttcctaagagacacctggtgtaacttccagttctacacttccctgatgaattctgtgagcaggcagcacaagtacaactccgtcatacccatgcggcccctgaacagccctcttccccgggaacggactcccttggcgctgcaaaccatcaatgccttagaggaagaaagtcaaggcttttccacacaagtggagagaattttccgggagtctgtatttgagaggcaacaaagtatatggaaagagacacgaagtgtgtcgcagaaacagttcattgcctgaaaccgagcacacaccgggccggctcctgttttgtaaacaaaatgatccatcttcacttgagagagtagtttctaagaaatgcttagacgtgagtctgcttccaagaaatctgtggcacacaagaaaggtacacttctgcagccctaggattgggctactttcgaatgacaaactcaagactgtcagagcttctgacacttttcttaaagttttcatagttcatgaatattcttaactcatttcttgtgttgagccataaacaggcacatgtggcaaaatacgatattgaaaattctcaaaagacttgagggaaatggctctggccaggacaggtctgaccacttcccttcctgcttctttcatgaattttagttaccacaaagcatcctggtgctgtcacacagaaacatgcagaatggggcacgtgcagtactgacatagtaagttggagatcagaagtagaggtcagggtcagggtcaccgttagtcccagcactagggaggcagaggcaggaagatctctctgagttcataggccagcctggcttacagagtgagttccagcatatccagggctacacaaagaaactgtctcggggggaaaaaatgtcagaacagtcaggcttttggaaataatccagccatgtgtggttttatttctgctggaatttggaactagttcc

SEQ ID NO: 25474 - DNA, 2753 bp, Mus musculus
aaattttggaccttaatgcagctattcatatgaaatacctaacaccaatgatctactttttcttggtttatatgtactcttcctacactaacctttggtattcagattccttttagccatttaaaagtccttttcttaataggtagttgatactttaaaataaaaacttaggtttattgtctgtgtatattacagaggaagaaaactgccttttaattgtttatagtgaataaagttgtgtttttaagaaaaccaaatgtgattaactgtagccaagccctattctgcactgcttaattttacgggggaaaataatctaccatagaacttttagtttaatagtgacacaattttcattgctatatcatgatataatttatttcttgctagtttgaaaatgtacagttttttgggttgttttttttctccattctatgatttataactagctatattatctgtttaaaaatcagactgttgtaactgttaggataaagaataatatgagacactatggtatggtaagtaaaataggaacatttttagtgagttctctgtcactgcattcctgggcttttataaagaagagaggacctgagtcctgtgagcattctggtgaactagttcttggttgagccattgccagcgtaggtcagcagttgtgagctcgtgtcacataagtgccatatgtcttatcctcacagtgtaatgcactgcgttcatttttatctctctccattttgtcttgtttctgcagtctaattagcagctctacaattaaacatttagaatgctgtgaatgtttcctatgtaaagatgtttagaattggtttgtattgtttgtgtcttgtaccttgtgtggattaagctgattgaaatgagattttgatccaagtgttcagaatagaatacacaatgatgggaaattgtataggttagaaagcttttctgctttttcaaaaattaaaaaacccagcagttgcttttcagctgtgccactcttcaccacaggtaacaagagctataaatgagtctccggttgtagagactttaacatatgacaccataggataatgactgactagcaattctagtcacttaaccattactgactagaagttaactaagccatcttaaaatgcgcccagggacaggcgcaggcacacatacttctgcatgcaagagcaaaatgaattcaagttgtcttgcttactaatttcagatgtcacagtgtaggagtgaacatgttttcaaccttttaggattcttgaagaccagatcactactccttagacgttgacaaacaaattaagaagagaagtttaagatttttcagacttaccatttgagttgttgtattgaagtcctatggctttttaaatgttccatctacttagttgtgaatgttttaagcaccaacgttaatgtgattgctaagcacgggcatatgtaaaattctatgtctccttgccagtagactctggatacttacactgtaattaaatggagtcaggtatagattttgccaggtttggcagacacgatgcctgcatttaatctgtgcctctcaaaacgtcctgatagtaaactattactataaatcatttttaatgagactattgagtcaaacttgaaatcaccagttacccagtgtcaggaatagtatgaatttagcttcatctctcagtagctggctaaattttgacagctatctgttcataagaaaatagatacccacacataaatgctatatgatgtttttcttcctcctatgacacggttcatagctggtcttttttctgtaattcttacataagttgttaaggagtttgaatttcccaaatatttttgtttggtcatgactcgatacatatttgaatatcataattgtatatatttttaaagtagaataaataatggaaagcaacttgatacacgagtttatactgaaattcaactggataaagatatgttttacaatattgcttagctaataatctgaacattcttttatctattaaaaagcatagtttgtggcttacaacttttcccctgggctaagtagtcacctttgacaatacagtggactgaaaagcaggttactgaaaggtttcatttatatctctgaactatccattttttttgtttgaatttctaaatgtaaaatctatgtttaaataggataaagctgactgttgacttttgttttcaaaaattagacaaattaatatataaataattcaaaggatttttgtttactttgaaaaagaattttctctgaattaaagatggttccacaggattacagcaatcagttccatgtaaaataaaaagaaaaaaattcagcaaattgccttcacttgtttctctcaggatttaattctttcttaaactcctttgaagaccatatagcttatcctgctgttagggtggtcagtgttgccatgtcaacttcaatagtttcgggtgtcatggggagacggtgttctgagattgcaaggtgtatagaaactagccaggtgtggtagtgcatgcctttaattctagcactgggaggcagaagcaggcggatctctatgaggccagcctggtctacagagtaggttccaggacagccagaaaggaaaggaaggaaaaagaaagaaaagggctggagaggtggctcagtggttaagagcaccgactgctcttccgaaggtcctgagttcaaatcccagcaaccacatggtggctcacaaccacccataatgaga

SEQ ID NO: 25475 - DNA, 1178 bp, Mus musculus
cgccactccgggaagacccgaggggcagtgggcagggagacccggcaaagcggcggaggaagaggcctcgctgaccggaagtacagcgagcacctacgcggaaggggcgggaccgggacgggctccagtgacccggatgtggtatctggggggcggggcggggggtgggaaggcgaggcgatgcagtgaggacgtggaagcgcgtgaggcctccgcggtgcgtgggcggcgctcctggggcgaggggcggggccagtgccgggaagtcgacggaaaggggcgtggccggccgttgcctaggaagggcgcgtcgtctctctgctcgtccggctgtgacggggaaggggtcccgctgcgttttggtcactgtgagtaccaagtttgggggatccccgagggactctcgagagctcattttagggatgcaggggctactccccggtggtagagagctttctagttggcaggaggtttcgtatgtggaggaggccagcttaggcagaaagcacatgttctcagagatgaggacaagactaagaccgtctaatccctgatctttaccttccggcccgctgacctgggcctggatgctaaagccctctgctttcgtctaaacagcgctaaatagtaaacagtattgcctaagataaatgcggattattacccgattcagtgtcgggaaaaggcagctaggagagagcggctggcacgtggtaagcacacggtaagtttcggttaaattaaaacaaccatccgttgagcatctcttagcaagctccttccacccttcaaacaatcagtgatagtgcgtctgtttcactgattagggagctaaggctccaacagcagcaaaggaactaatccgcctctgatcaacatggcgtttcttacagggcattccttatacgcttcccacgtgcgtaacaggaatcgggtgttcccgggttttgttttgttgttgttgtttttgttttgttttcttagtgaaagaggcagggtgggctccaggccgctgaggattaataaagagattctatgaggaggaaataacaggcaggtggtatgatcgaggcaaggccctgaggaaggcttgggtggggtgagtagaaccagagccggaagtccactcagcagcctggggcacttaaagcttctgctggggcaaatggtaaggcggc

SEQ ID NO: 25476 - DNA, 2363 bp, Mus musculus
gtgccatataagagggaagctgagaaaaaaggtttggataaatacctcggacattatattgattggtctacgagactatcaagataacaaagctgatgtaatcttaaagtataatgcagatgaagcaagaagtctgaaggcctatggagaacttccagaacatgccaaaatcaatgaaacggacacatttggtcctggggatgatgatgaaatccaatttgatgatattggagatgatgatgaagacattgatgacatctagcctgacctaagcatgctaccttccaagttctctgaagatagctccacacagtggcatcttgaccttcatctgttaagtaaaacttcatggcatgtgtatgacttgttaatgcaagctaatgaattttattttttgaagtactatatttctttgaaaaccaaagatgttgagttatcatcttaagtgacatgttaacactttgtgcttttgaatataattgaacctagcgcacagcagtgagcactgttaagagactgcctttccatttgtagcttcatttctggcacgggagtgttttgtgtcagcagttctgccaggtggccatcgtgagctgaagtaagtcctagtccagcacatctgcttcaggcctttgtactctagtcatctggctgcgttcgagacttctcagcagacttatagatgtgtacggctgcacttggagtcagacaagatatggctacttttgtacttatggagccatgccattttatactttcacgttgtatacattcgtttgatcctttaagttgttgccacccataaaaaggcatcttacagtgcagtttttaaattacatgggtagcaattttgagttttaaaaattagtcattgcagaaattaaatacttagaggagataatccattatcttgactttaggaatataatagttgacaatgtttatatataattttacttctctaaggcatacccaaaaatagaaaatgaaaaagagcagtgagtctgttctgatgcttgcattgcatagagaagttttccaacaaagcagctgttaataacacataaaatatgttttactttgcaaagtaggttgtgttaagtcattttcaaaaagttacctactatatcgaggctctggataattactatgtgttgattaaagttagttacagaattgtacaagctaagttttccttaaactaagcttaggttaaagggagaggagccacagctcaatgaaaacacggttcctgttttctaaatggaggcgcccagaaacacaataaaacatgttggtacaaaaactttttctttttaatatgttcattgtatctctggtatataacaaaaataaatgactgggtgatttctggtatatcatgagaggctttttttttttttttttaaattagactctgggatttaaatgggacttaactattttcccatttaaatgacgccagtattggggtcctgcagcctaaccctgctgcttagggagtgagtataaaccgcgactgtcagtcctcagatgccttcctttttaaagactagttctttctcaggtcttcttcttgacacctacaaatggtgcctgaccacaagacgacagtattcatcttcacttttattttttgattgcttgttttctagttaacccagaataatatagcttatgaaaatctcccagtcaggaagaaagaaagaaagagaaagaaaagcaaatatgattttcctgatcattgattggtggatctcttctagatggagatatgtagatctttgtaaaggttaattttataaagtgagagtagacatggtacccacacttagaagcagatcccacatccccagaaggacagtgtgtgtttagaaagaacacatcactggagctttttattgctctacacagtgtatctaaataagctgtcaactacaatttatcctattgctgctgtaaatttttatgacagaaagaaaacctgaccatggaccagctagcttgatggccttcagcagcaaacaagaaactgtccaagttaggaggtgaggactagtgcctgaagatgtcctctcagtccacaacatgtacaggtgcccatacacacatcagcactcgcacaaagatgctctggaggctatagtagtgtgtcttggtcattgcaaaccatcagaggcaaaccctgaggtattcccatttcctgtttcctgcttgcagtgtctacatttctctcccattctaatgaaggaatgattcttttataacatgagtgattttatgctgtttataaaagtaaatgttgacatgtgttagaattaaaatgacttagagaaatatctaaatgttttttttttctttcc

SEQ ID NO: 25477 - DNA, 1169 bp, Mus musculus
aagacaaagtatttaagccatgcccaaggtaccctggttttgttgaatgtttataaatagtgatatatgtgataggaagagacatcttttgaaaacagtagtatgttatagaacatactacatgtattttttaaatgtatgagtgctctgactgaatatacaactacatgccacaagagggcatcagatccctttatagatggacatgagccactgtgatagcttggaattgaacccaggacctctgtaagaaaagctagtgcttttaactgctgagccatctcaccagcccaataggactctttaacagaattaatgttttatatgttgtctttttcttctttatagtgttttggcagtgatggtaaactggtcctgcattactgcaaatcccaggcatggggatgagccagaaatgaacaacttgatattttcacagaagaaaaaaaatcagagacatttcggtgctgtgggaagagacttactatcaaatattcagcatgaatctgttaggacctgtgtttatgtataagaaaacatcatagagtatatagactaatgaatgagatttgtgtcaccataaaatcatcatgagagattgacgttagagtgtgccattactcccacacactcctgttccaggtcacgttagaaaggagactgaagttgtatgtggattgcaggtctcaggatgactgaaggcatttacttggttggcactatgttaattccgtgataagaactaatttactgaagggtttgtgttttgaggtaatttagtttttttgcttattcaggggacctctatttgggatatagaatgtttacatttatctgtattgctctgtaaaaaatagtgcactgatctaagttgtccggtagagggcagccagttggcaaaaaggcttgacagttttcatggctttgccaggtgattgggggcaagactgttgaacctaatttctagttaatgtgtaatccggaaagcagctgtgttgacacactggaggatgtgcatagtttaaaattaatcatgcagggacacagttttacaaattgtgagcagatgagtctcagctcttcagtcctgtcatttctggttcttgcgcctcatcctgggcattgtgatccatacctgctgtctcagcgctcaggacacctgagcagga

SEQ ID NO: 25478 - DNA, 2157 bp, Mus musculus
cgccgctgggtctatgatgccatcgtcaccgagtctggcgaggtcatcaacaccctgccatttagtgttcctgactaggagatgttatgcatagattcacggctagattcacccctctcctctctcccctctcccctctcccctctcccctctcccctctcccctctcccctctcgcctctcctctcccctcctcccccctgctcccctttctctctgcctgcgtgtgctttgtgtgtgagggtgtgcatttgtttgttttgaaacagggtcttattctgtagctcaggctggccttgaacttatggcaattctcttgccttagcttcccaagttgtattaatttaggtatagtacatcatgcctggcttctattccttctacatgcatgcatgcatacatacataccaacaaacattcatgaatgaatgtatggccctatagagaatatattttatatatgtacacttttaagtcaaacttctttctcttggatacgtgttggtgcaacagatggctgtagaccagacaatcattgtatagaccctctcagcttcctcagctggtgaccacaggctgcaagagtggacactcaggcttcctcattagcagcactctcaactctgccttgaagctacacctctcccttctcagggtgtctggtcgagaacaccgtaattttaaggtttgcagaactctgcatctgaaaagctgttacctagaacatacaaccaaatgtatgtttttcttagaatgtcacatattactaagaaaagccaacttgttctttgtactgtatatctttagtcttatttttttatattttaatgttcaacttaaatttggtaattacaatatttttattaccaaacattcatattgtactaaattgtatatagtttactaaattgagaagcaaagacttgaatatgctaaaagtctgtgactaacccatttccttactggatcagtatttcagggtttgttttttgtttgttctttaaggaagttagccttcagtgatacccagagtggcttgtatgtttactagttggatgtatggatgggcagctgacagaaagcatgacgtggctggctgtgttctaacatatggtagcaggtatctggaaagttgaattcggccttctatgtactcatttctttgtgctcatgtgcaagtgtgtgtgtgtgtgtgtatgtgtgtgtgtgtatatcttttgtgaacttacgtacatcagtgcaggtgcctgcagaggcctgcgatgttgggttcttcagagcttgcgttactggcttttatgaaccacttgaaatcagtgctgggaaccaccaaacttttcaagagcagtatgtgctttaaataactgaaccatctctccaacaccaaatgtactaattttccccattttgagtcagagtttcttttatgttcattgtctggggggctcgcaaatcctcagttactaacttaaggtctgtactgtgactcaatttacatttgaaacgatttcccagatgatattgatgtcacaggcctgggggccatgtatgaaaagcacttctttaagttacagtagatatgtaatgcaaggaagtatttaaacagtgggacttagtgacttggtactattttaaaccaccaagaattctgttttaaataaatgtgaagtgttgaaagctgggttttcagggtttcttttttcctccatgttttgacatgaaaatcccaaagattttactgtgcccatgggactcctgacacataacaggagaatgtaggttccctgctctgtttcccacagtttacccgcttttctggattccagttacttttgtggctgcctgttgaacccagggctttgtgcattcacagtaaatgtttatcactgaactgcacccaaaattctcaagtcacctttttggagtatctatgccctaagccaaacactatgccaagtgtctctcattttgtgaccatcagccctcacggtcctgagagaaaggtgagtgaaatcacacaagtcacatcttttggaagctcactgaggctaaaaggatggcggtccctttcacttatccattttctgaatagtgaacctgctgtactccgtgatgacttatttagtgtgcactgtttcagctcatgggaaggatggat

SEQ ID NO: 25479 - DNA, 1119 bp, Mus musculus
cacatactcaaatatacataatttaaagtattaaaaatacatttgtgaaaagaggaaaagtaagataaaggtaggccagtgttgagttctaatgtaactttcagagaaagaaggaaaagagagaaacccatcaaagttggtaagtgtggtctgagaccatttgaggcagagaaaacaccagattaactaatggtatttgcacatttgcaggcacctgagctacttcagtgtgtcactcccctcttggcactgtcaccttctttcttttgggttggccttctttcttttgcctgacgctcccacgttagttcatcagttactatgcaccagcctttgttctgtgtgagcttagtttctcattggaccttccagattgataagtgggtcacttcgtttattgtcccagaggattgaaaataatttatgagttaataaagtaggtactctgtttccatggtcatcactttgtttcctgtcttcagtaagatacctgatttgttcaatgaatcctattcttacattctttctggtactgtctcactcttaaacacttggatagccttgaagctcccctgaggacaggtgatttattcccatctgccagctggaggagtgagaccatgccccgatacaggactgggctgagacgcgttccactcactcctgtgagggctttccgtatgatggacttcttgcagtgttagtcagagaactccggcgtagggactggcaaagactgtgcagggcttgctgggcgtagatcagcaaagttcatggaggctctgcatctcctgagctattggcagccttgccgacaatgatggtcttacttagaggagactgttcccttctagacaagcatcttcctttaccctaagaaactgcctccgccacactgttgctcctcagcagttgtcgcaacagtttgctctgtccttagttaggcactcaagagtacacgtgtgacttttagcattggagttgtcctttgcattcttgagaccctggaaacacatgagaccttggcgtctaccgaccagcgaagagttgtatgtttcatctcatgcctactctcaggttcacacctattcaaggcctgctaaactgaattgtctgcag

SEQ ID NO: 25480 - DNA, 1189 bp, Mus musculus
acatttgtttctatcttaagttgttttataaagggaaggctttcatataactaaaggttggaatctgtttaatgcaggggttttggattgaaggatttttctagcagaagaaagcatcttgcagttttctggctgctgtaggatccgtcgtgaccatgtggctttggggacatttgggggtagctggactaatgcagctgcaagtgcaggttcaggctgtgtcattcaggctgtgtcatttcgtttctctgtcgctggttagtatttccctttaaaagccctgtgatgacctgtggactgtggggtgaggagatgtctgactcagtgttaggaaatataaatgcgcagatcgttctgaacctgaatctctgtattgttatggaagtgtatctcagtgacagtcactcagacagagcaggatcattgtacaaagccacaaagagtggctgttacccatggttttattaacagtatctagtacagaggggtatttttaagctattcatattcacagaagtcagagtaattctattgatatttattggaaggacatatatgccactaaaactaccttgttgtcagttgtgaaaaaactgatgaacaagtagtcttagactcacagagctgtagtcattactttctaatataaaaattcagtagccagatccgctacctgtgccttgttgattagagtaagtgtgccatgtggtacttaggagtcataggtgtcgaggcattagtctgctcccttttaagaaaaaaaaaaaacattatgtttatggaaatagacagtgtatgcttctatttaaacatcctactaacactctgttagtcactaaaatgctaaatatgtgcttgtgaatgtcttgtcacgatctgtttggaaaagaactaacttttaaatgatacatctttatcttcatagatgggtatcacatgttactaatatccaaatttatttagaaaatacgacattgaagaccacctaaaattaagttatccttttcatgtgagaaatattaaagctgagaagtttttatatgaatgaatttcttttttttttttttttctagtgtttattgggggaaggggaagggtgaaagaccatctcggagtggggatatgagggagagatagaggcagacaggcagacaggcagacagagagagaacaagacagaatgagggag

SEQ ID NO: 25481 - DNA, 1218 bp, Mus musculus
cctgggtcctgctgccatttagactcaaggagaggaattgagagagccctttaaagtcagtgctcgacaggtgaaattggcctgttgggtctgttttcagaactcaagactgtttgctggataattcataacttgatctctgtgtaaattatttacaactggatgtagttccacacaaattgcttcattgaaatgcaccattattggacacatcagtagcttctccatttgtacactgaattatatttgatttcaagcattcacataagcagtctatggtgcctccgattccagtgctctacaatattttacccctcatcaaaggtatatgcattagatggttttcaccttagagaagtcacatgtgaactaatagtattttttctgtgtgtctttgctttaataataattacagaattgaaactttttttaatgtgatctatctccttttgttttgttgttttgttttgaaacaggtggtgtttcaaatgggtacctgtcagttagcataagtgactggcatagcaatccagtgacagtgtccacccttgcccgctactaatcccatgaagactctcttattccctctgattctcatgtgagactttccgtttcttctgcctccactgacactgcttctgcagctgtgtccgccctggcccagcctctccagctatgacagctggggagttgcttttacctcctgaaaggggtcctgaccttgcagacatattagcctcaaattattagcttctgggttttgttcattagtctacctcctctgcaaacacagtcctcacttttcctggggggggggggggtgtcccagatggcttccagtctgcaaacggtacttggtcctggcaagggccttgtgtgatctgtccttcttcctccctcactatcccagcccttcttatgttattccatttacactcttgtcctgatgttctggaagacaccgtgcagaccatctcctagagactattgaagttccttccatttgggttgttttaatcctggatatccttgtgtgccccctcactattttggggtttcaatcaaatgtcagcttatttatgacactttctccgagctccatatgaaggaatagttctccaaatcttcggtttcaaactagctacacgggttattagacaggctatatattcttctttgtttattgtgtagtgagctcctccaccagaattcagattc

SEQ ID NO: 25482 - DNA, 1187 bp, Mus musculus
ctctctgccatgatgataatggactaagcttctgaaacattaagcaagcccctaattaaatgctgttttaaataagagtttccttggccattgtgcctctcttagagttactgttggctgtgatgaaacaacagggacaaagcaacttggtgaggaacacatttatctgacttactcttctatatcccagttagttcatcatccaagggagtcaggacaggaactcagtgaagtacagaaggaacctgaaggcaggagctgatagagatcataaaggggtgcagcttactggcttgctccctgtagcttgctcagcctgttttcttacagaacccagaactacctgcccaggaatggcaccacccacagaaggctgccccacccccatcaagcactgatcaagaaaatgccctacagcagtggttctcaacctgtaggttgtgacccctttgtggtctcatatcagatatacttcatattcaaatatttacagtacaattcagcaaatttagagttacgaaacagcaacaaaaataattttacagttgggttcactaaatggtaaaaagtaagcaatctagtagctaatgatgagtttagaagatgaggcctggctatagtctacaattgtagtactcaggagactgaatctggaggactgggagttcaaggtcagaatgggctacaaagaaacatcctgtctacattaaagtgggaagaggaggaggagcaggaggaggtggtagttactttgtatcaatcattttagtggaatacacaatgcatactttacaaagaaatacaatgtcattctctcgagctgaagttaggaaacatcacctgtatcctctcctgctctcttactgactcagccagtagtcatgttagtcgttttctgctgtccaaagctaactctattgactgttctaatgttgtgtagtagtggggctggagagatggctccgcagtgtttggtgttcccagcacctgcatgggagcttacaactatgcgtatctccagttatagaggatcctgtgccttcttcaggtccccaagggcttgtgcatatatgatgtagtatgcagacagacagtcatacaagcaaacacacatgcacaataaaaagtacgctaatcatttcagtaagtctttttaagatgtatagtagttttgcctattttaatgc

SEQ ID NO: 25483 - DNA, 1126 bp, Mus musculus
cctggggtctccagtctcttgagggttaggtgcatcttctctgactgaacccaaacccagcagtcctctactgtgtgtgtgttgggggcctcatatcagctggtgtatactgcttggttggtggtccagtgtctgagagatctagggtgtccaggttaattgagactgctggtactcctacagggttgccctcctcctaagcttctttcttcctttccctaattcaacaacaggggtcagctgctttggtccactggttgggtgcaaatatctgcatctgactcagctgcttgttgggtctttcggggggcagtcatgataggtccctttttgtgagtgctccttagcctcagtaatagtgtcaggctttgcgacctccccttgagctgtatcccactttgagcctatttctggaccttctttttttttttttttttttcaggctcctctccatttccatccctgcagttctttcagacaggaacaattatgggtcagagttttgactgtggaatgggaaccccatcccttacttgataccctttctgcttgaggtgggctcttcaagttccctctccccactgttgggcatttcatctaaggtccctcccattgagtcctgagtgtctgtcacctcccaggtctctgctacattctggagagtacccccaacctcctacctcctgaggttgcctgtttccattctttctgctggccctcagggcttcagtccttttcctcacccaataccagatcaggttcccttctacaccccccccccacttgtcccctttccctcccagctccccccgccccgtggttgctttcttttccttctcaagtgggacggaagagtcctcacttgagcccttcagtttattgacctttttgagttctgtggactgtatcttgggtattctgtattttctttttcttttttgctaatatccacttattagtgagtacataccatgcgtgtccttttgggtctgagttacctcactcaaggtgatattttctagttccatcaatttgtctgcaaaactcaggatgtcctccttcttaatagctgagtagtattccattgtgtaaatgaaccacattttctgtatcaattgttctgttg

SEQ ID NO: 25484 - DNA, 1146 bp, Mus musculus
aagaccagccttaagtcatgatgatctgatagaatgcatgggattattttaatcttcttgtattggttgaggattgttttgtgaccaattatatggttgattttggagaatgtaccatgatttgctggaaagaatgtgtattcttttgttttagggtgaaatgttctgtaggtacctattaaatccatttggttcataacctgtattagtttcactgtctctctgtttagtttctgtttcaatgacctgtccattggtgagagtggggtgttgaagtctcccactattattgtgtggggttcaatgtatgttttgaggtttagtaatgtttcttttatgaatgtaggtgctcttgcatttggggcataaatgttcagaattgagactttctcttgctggattttcccctttatgaatatgaagtgtccatccttatcatgcttgataacatttggttgaaagtctattttattggatattaggatggcaactccaacttgtttcttgggaccatttgcttggaagacctttttccatccttttactctgaaataatgtctgcctttgttattgaggtgtttttcttgtatgcagcaaaatgctggatcttgtttgtgtattcagtctgttagcttatgtctttttatagaggagttgagtccattaatattgagagattaaagtcagatgactattggctcctgttatgtttgtttttgtaggtggctttctttatgtgcggtggttctctccttttatctttgttatatgtttaatataccttggtgtaggtaccttccttgtgttggagttttccttctaggatcctctgtagggctggattggtagatagatactgtttgaatttggctttgtcctggaatatttttatttctctatttatgctgatgagagttttgttgggtatagtagctcgggctgggatttgatggtatagtggtgagcatagtttccttccaagtcatcatttcttatctgaactaaatcagcaacctcatagctgctttgtccacagcctgtttggccagttctaatcagttttcaaaggaaagcaaaattgagctattgactgtaaatagaattgtgtcactcttagacctgaagtcttcagtaattcccattgct

SEQ ID NO: 25485 - DNA, 1441 bp, Mus musculus
agagttcctgctgcctccgtttccctttggtttgcatgtttctaagcattttgtatgcggtttattcccctcactcactcactgctgtctttattttgtctctgtaaatagctggagaccatacaagcgcagctggactccctcacatgatgttctggaagactggcttccttcgccatcacattccggccacctcactctttcgcactgaagagagactgcccaagtatattttctagaggattcggtgacactattgctacagataatatgacttattgcatcttagacaaatagcagtgatgggagatcacaataggagcactgggtttcgagtgtgccttctcgcctcacaggagccaagagcaattgttgagaaaaacgaaagaagtaagaagtgaatgccatgctgttttttctttttttctctctctttaacaattattttattagatattttcttcatttacatttcaatgctattccaaaagtctcctataccctaaccccaccctgctccccaaccctcccactcctgcttcttggctctgacgttcccctgtactggggcatagaaagtttgcaagaccaaagggcctctgttttttctgtcagattgctttcagggatcagggaaggtctgtaggcagaaggtatgatggtgccctagcagagtatgaaaccttactcattacagtaattaattagggaagcagccgcaggccgtcaaatgttttggcatttgtcctgcagtgttcttttgcttgaagtatagtgcaagaaagaaatctaaaatggtaccagtactgctgtgagttcatcccactgcgctccccttgactccccctgaaggttcctgacgttaatgacttcaaaatcatctaggtttacatatatctctgcagattactaacagtgcacttctcagtgtttcagattgcaaatgaaaattgacctgtaatgagtatgacatgggaatcttacattttcactcgaaaactttatgcatcctccttttatggatatatgtgttcactggtttcagtcaataaaaattttctacctgagaattatttaaactcaagcgtacaatgtttttattttataaggtactttaagctgtgactctacataaatacatggtttcctgagagggaaaactcacttgaaacttgtgttaatgaaatgtcttcccttgtttccaggctcagacataggctgcttcatatgaaggaatgtggtttcagaacgtcctgcagttaagcaaacagagcagttacagttgagcacatttctcatgagagggtcctgggtactacagtgctcactcacccccaatcagagctcactatgcaccacagtacctgtactgttaatgaagaatgttgttgcatagaattgaaagttggggttattgcagaaggcaagtgatacaggtatt

SEQ ID NO: 25486 - DNA, 1207 bp, Mus musculus
gccaaaataaaataaaaagtctaccaaaaagaaaaaaaaaaaacaaacaaacaaaacatagattttgttttgtgtcagccaagtactcctgggcatggagcccgccctggagtgtggttgatatacccagtggcattccattggagaaaacccttgccagcaggtctcagttgaaaataccttctttgttagcaaggggacaatgtaattaattttggagaaagctctcttggctgctgagaagaaaatatatcctctagtgtttaagcggaatgctctgtagatgcctgttgagtctgtttgatttatgatatttgactccagcatttttctgtctacctggatgacctgtctactggcaagagtgaagtattaaaatcatccacgagagtccggagctgcggtggtggcggcgaaggcgagagtcatggctggacaagcttttaggaagtttcttctgctctttgacagagtattggttgaaaggagtgccgccgaaactgtaaccaaaggtggcattatgcttccagaaaagtctcaaggaaaagtgttgcaagcaacggtcgtggctgtggggtcaggagggaaaggaaagagtggagagattgagcctgtcagtgtgaaagttggagataaagttcttctcccagaatatggaggcaccaaagtagttctagatgacaaggattatttcttatttagagatagtgacattcttggaaagtatgtcaactgaaatcactgttgaaatggtgtcacgtgaagctgccattccactgatgtctgaactatttcatcatgtaaataacttccatgcctcccttttataataaacggatgatgcctaaactgacagccattgtctctgacctttagtttcactgtactgttacaaacatttccaaataaaatgatgtaaatgaaaaaaaaatcatccactattattttgtggaggtcaatgtatgattttagccttagtagtaatacttcttctataatcttgggtgcccttgtgtttggtacatgaatgtttagaattataatatcctcttggagaattttccctttgaaagcacaaacagttttcatgagattttccctatctctgattagttttagttttaagtcaattttgttggattattacaatggtgacacatgcttgcttttttggatacatttgcttggaatatctttttttttaccc

SEQ ID NO: 25487 - DNA, 1138 bp, Mus musculus
agagaaagactgcctgagtttcagatgctgttagctatgtatatagtccatagccttatgcaagataatacctctctctgggcttcagtctcctcattgctaagatggatgtaataaatgttccatttcttaactggtttgttgagaaaagtaaatgggtattatatttatatgccacacacttggaattgtatatcttaatgttagctatgatgatgatcatttgcagtttataatataaaaattgaaaaatcaaaattgtaacagatattatagcaaatacggaaataattctcagaagcaaaagctaacagttaaagtgattgcttcttggacatggtgtggggcactgggctatgcacagacaggctgatctccagttgagctgagatgctgaactccaggacctagtggtcataatttaccttcaggctaaactcctccccagttacctagcaacagaaaagatagcagctccctaaaaggggtggttcagcccctcctctcctctctcacttctctcattcctttgttctcttacctctcacttctctcctctgtcctctcctctcccctcccctcccctcctctcctctcttctcctctcttcctcttactttctttctctagccttccccccaccccctaccttcttctttctccctgcctttctacaataaagctctaaaaccatagtctgtgctcatcaagatccgctgtgctcactctcccatgcctgggaacctctcttccctctctcccataaccctggggctaaagggtgtggccttgggccccctaggttgggctgccccttgtccccctcaccccgtcgagtgggtcagaggcttggatgcccaccagggctgagtggaaagcgtctggcagccctcccgagtccagagcataggtggaactctggcaggacgtgggttcttcctccccccgtctttctccaggcccctttttagttcccacagacatggtactggggtgtacacatgggaaaattaggacatttaaaatctttgtgactatttaatttgacatatataaatgtattactttaacacagtggcaaatttcctgcctccatagaactaatgatagagttgtgataacagaaaagcttcttgtg

SEQ ID NO: 25488 - DNA, 1219 bp, Mus musculus
tctaatccggcttgaattggctcattttgccaccagagaacctatcacacataaaatacataaatctaaaagactattgtggttatttgaattggtttgtgaatcttaggattttttgtttcttctacgaagaatgaaattgtgactccggtgttaaatgtagatatatttacaattgctctgtttgcttaattagttacttcctttattaatatgtggtggccttaactcttctggctaattttggtttgtgtcttcttttaccagatatcagccatgtttttggcctcagttctcttgatattgcttttgatctttgcctctcagtctgtgggtgttttattccaatgggatatttgctttggagacaacagacagttagatgtagtttttgagtccaggcatccagtctatgaccttaatggtgagttgaaaccatttacatgtcaggttgttgctgagaaatgtttactgtttactaaatcctgtaatttgttggttcttcctttgcttggctgggttattgtttttcattttttcacttgctaaaattagaggtttcctagtttattaatatagacaagtggacttcctaacttttttttttttgtttgtccttcctttcctgaaatttatttatcatgctcttaggacctgagactattttttttttccctgcctctgggtccaggccttttgttttgtcctgagttctgttcttgatgtgaaaagaaaaaagtatctcttcatgaatgacaaggccctggtaacttattgactacttttccattaaagacaactaatatttattgaagttctttaatattaaccaattaaattggtcttgtggtgagtcgaacctatggctttgtgagtgctaactgctataccactgaattgtggtatactgccaagcccagaatctctatggatggagaagaatttacttaaatctctttcataatttcatgtctaaagtattttattaaattcattaatgatgttttattttgagcttacatagctttataagcctctctagttataaaacagagcatgatgttgactggcgttgtgttaggatgacgttctatctcatcttaaaaaactcactggttctcttttctcttttagccggccccagaaagtgtgcttatgtccatatctcccagtgcgcccactccagatctctacccacttgtacataatccagcatcca

SEQ ID NO: 25489 - DNA, 1217 bp, Mus musculus
cactaggctcaaagtgagcctgggctcctccacaagcctcaaagagattggcttttcttcaggaaggggcggagcagtaggtacgtttgcgcctcgggattggctcactcacgactagaaaaggcgttgctgccgtgtgtcccactggccattcgggagccgtgaaggacttctcgcgatactttggcgcaagggccggagccgcgtagcgagcgctggcagctgctgagggcggcggggccgcggctgggctggggccgctctggtgaggagcagcgcggactgccgcgcttctcgggctgtgcggcccaccgacccggctcgggaggatcgtgtggacagctcggtccccgcgggccgcgccccggtgagcggacgcccgccggcttttacctgggcggccgtgacaggtgcagagcgagcgcggcgccgcactcgctccccggcccgcccccctcaggcctcggccgcccggctcgggatgagccgcgggccccgaccgaacgtctgcggcttcgggcgcctggcaccgccgcggaggagcggccgccgcccctagggggaaggcgcagggagacggctgagcacgggcatgagctggccgcggcggcggctgctgcgggactaggacgccgccatgaacctgcaccaggtgctgaccggcgcggtgaaccccggcgaccactgcttcgccgtgggcagcgtcggcgagcagcgcttcacggtgagcgcgggagaggccgcacggcctccgctccaggcagcgcggtttggggcttaaaaagaaagaaagaaaatgtttgactgacttcttctggccaaagtagttcctccaaaatgttagaagaatcacgactttggggttcgggggatcagcgatgattttcccgctgcataggcctggaatgtggaattcatttacattcagtagttcggatttgctgctgctgctgcttttttttttcaggtcaaggttctaaggtcaagtctttgtagttaaaagagtgggtgtcttaaaatggttactgattattaagctagtttaaatgacaatagaatgaaagcggcgcctttctatttattttcccttaaaagttcaccgatgaaaaactttgccaagaaaatagtctccattcattcctcacgtcctttgagttacttaggcaacggccttgtagtccttgaaaagttttgttcgaggtaattcccgagggttt

SEQ ID NO: 25490 - DNA, 1655 bp, Mus musculus
tgaagatggacttgagaacaatagtagtgttactgtccctggtagacctgtagaagtgagctgtgcacatacaagtcgcttagcagtagcttataaacagcccactggtaatagtagatctcaggaatttgtgatgcatgtaagtatctttgaatgtgagtctacaggaggctcatgttggatccttgagcagacaattcatttagatgagttaagtacagtgttggattctggcattagtattgatagcaatttagtggcttataataaacaggagacatatttagtcagtaaagaaagtattacatcaaacacaaaacatttggttcacttagattggatgtctagagaagatggttctcatatcttaactgtagggattggctcaaaactttttatgtatggacctatggctggcaaggtacaagatcagactggaaaggaaaaccaggcatttcctctctgggacagtactaaaattgtacctctttctaaatttgtactgttacgaagtgtggacttggtttcttctgtagaaggtgccccaccttttcctgtttctttatcatgggtccgggatggcatccttgtggtaggaatggattgtgaaatgcatgtatattcccaatggcagccatctaataaacaagaacctgttatatcagagtcatacaatggaagcactccatctatactaagtttaataaaacaaagtaactcatcaagttctgggctacatcctccaaagaagactctgactcgatccatgaccagtcttgcacagaaaatctgtggaaagaaaagtatatttgacccctcagtggatatggaagattccggtctctttgaagccgctcatgtactttccccaactttacctcagtaccatcccctgcagcttttggaactcatggatcttggcaaagttcggagagccaaggccatcttgtcacatcttgtcaaatgcattgctggggaagttgtggctctgaatgaagctgaatccaatcatgagcgccgccttagatctctcaccatcagtgctagtggaagcaccaccagagacccgcaggcattcaacaaagctgacagcagagactacacagagatagactctgtccccccgcttcctttgtacgccttacttgcagcagatgatgacagctattgctcatctttggaaaaaactgggagtgagagttccttaaagaaatcaaaacagttatcaaaagaaagttatgatgagctttttcagacttcagttctgatgtctgataatcacatgttagaaacagatgaagaaaatactcagcccagagtcattgacctttcacaatacagtccaacttattttggtcctgagcatgctcaggttctttctggccacttacttcattctagcttaccagggctcaccaggatggagcagatgtctttgatggccttagccgatacaattgcaactacaagcactgatattggagaaagtagagacagaaatcaaggtaaaagtaaattctgtacaagatggaaagaaaaaagatagttttacttgttttttaagagtatgatcttacataaaatgatacggtgccttttttaaaagctaatataaaaatttggttttttttaacacttttaactctgataaatag

SEQ ID NO: 25491 - DNA, 1169 bp, Mus musculus
aggttttgttttgattcaagtataaagaaatagtcctctaaatgtgaaagaaatggagttgtaaatgttacttactcaccttccttttcaaacaatcggaatcaagctgttcaaaattccctattaaaaggagaaaattacaattagtagagttatagttatagaatcctgtaacataagaagtgagaaataagttgacgttcagccaaactatatttcaaattaacactatttgaatatatattctacgtttatacctgctgaagaacaaatctagctctactccagaaaacagaataaactagaaaaaagggctaggtagtgagaaagtaaaacaaatataaaaggaataggctatcagagttttcaaaaaacagtagagtagtaaataaacaatatgaagtttgccaaaaattggatatgttcactaatcatcactcaaaattaaaacttggtaaatattttaaattttgacagttccttgtgctactaatatgtaagaataaataagtagcgaatttcaaatattttgcttaaaattgattttaccttcaattttcatatttttacattttttgaactttgtgggggggggtgcaagagcatactgtggagtctaaggcaacttagagggctttccttccttccttccttccttccttccttccttccttccttcactatatgggtcccagggaacaagatgagatcatcaatcttgccagcttcatctttcaattttaattgatgcaaagcattcccaattctaaatttttagtctatataattataaagaggtgtacatttatatgaatgttcaaagcagcaccttttataatacaataagttgaaaactgtctataaaaagaaagtttacaattgtaagacaactatacactgcagtgccaccccagtacaagaatagctagatttctatgtcttgatgaggtcagttaaaataaacttaaaatgtaaacttttatctgtatattatccaatttactataaaaatctatatgagtgtttgaatattcataaaaagaaatcttacaggaaataatcaccttgttataataggtggttgatttagaattagaagaagactgggtccaaaataaacatgagttttatataatttctaagcatgcacctttgtttgtttgtttgtt

SEQ ID NO: 25492 - DNA, 1105 bp, Mus musculus
tgcttcaactttaagtgtgattgtaactttttatgatttttcaacaattatgtaaaagtttaaatgtttttgaaaaatacataatgccaatttgacaaagatacttacagctaaaataatcttaaatcctggtttctgtctgcataaaacagctttgtttttgttttttcccacttaactagatctagggggtatttgaagtttaacctgtgtatgtttgcttcataagatgttggtggaacaaaagtggaaaatgtggttcaggaactgtttgtattttttacagaaagggggagaatcaacatgaaaatttcttatattctccaacttttttaaaggttcagaagatagaaattatttttaagagacgtaaagaacatgatcacattttagtcatacatgtacttggttttggaaattccactagcaacagtaacatttgttgtttataaccattccaggcttggcagtgtcataacaaaacagccaatgattttgtcttcgttagttcctcctctctgatagctacagctggtctttcaagtgacaataggtaagagatgtagctgaaatgaagtgtatatggatagctaaatttattttttgttgtgtattcttttgtctaagtagttaggccttaggaatttttatcataaagattttttttcataaagcatttttagtggcataaaacttataaaattctagtaccatttaaaacaaaaactatcctttttttctccattaatttattttttattctcatattgagaattttaatgtttttagtgttctcatattgagactttagaagaaaggatgtggttgttggtgaaatgaacatttctttgtgtgttattttctatatatccagaaaatttgaagctgaaaaggtactatttatttattggccatattatttagttaacttgtttagtcttcaccatgccataattactaggtaggtcattttcataagaacatagggaactcagagcagcctgccagtttgcatgaacatccgtcttcttcactccacccactcatgcagagcagctaagctcttccgtcaggaccatgagcttgccaaccttctgatactcat

SEQ ID NO: 25493 - DNA, 1210 bp, Mus musculus
tgtgccataacacctactgccgcagtataaaactcttggtttttttttaagtttttaaattattttaaccttaatgttacttttaagaagctttaaatttattattattattttaaagatactgaatcaaataagtctcagtaggcaataaagatgttgtgtggcacacaaggcattttatattaaaaatttgtcagcagttttgatgatcagacattttagttaaattttgttttaattttatttcttttaagatgaatttagtctaaaaattctaaaaatgttatagcagtgtttttagaatcaaatgtgaaaacagtcaatttaagtatagtatttacaaatgtacaatgccctgcagatctacattgataggaaataaatgttatattttattattttgccaaaatattattttattataaaatttgaccaaaatatttaaaatttacaatgcctctatcttaaatatgataaccctatttctgtctgttttgtgctatatcttttctgattcagaattataaaaaaaaacttgaaaaaaatacttgatttttagccaatgagactggctgtagaataagtgtttaagggacagttacatactatttagctcaaatttatttttagttagaaccagaaatggccatttttatgtaatgaaatatggaaaactattaggaattgaagagtcaaagcaaagaaatgaagggctggtaaatgaattttgtaatatcctcaggatacttttattataaaagtgtattgttaaaggttttgtaattgtatttcatattttaaatatagtgagcaagttacagtgaaaacactgtcattatagagagtttatatgcacagagtaaactgtacctgtaaattgtgcaatagcaatatatgactatttgccatggaggaatctgtgacaacattacaaacaatattttctttgatgtagctaagttattttttagtaatctcttcacaaatcaagattcaaaaggctttaaacactttccataagaaagaaaatttactatcgtgtttattaaaatcaaaatgcttcagggatgatctattgagcattttaattgagagtttatatgaataacaacattatgtaagtccatatgtatttacatccagagtcatattttaaataaacaatcatgcagtgatttttttcgcatgcttttgttttaagaaatacttc

SEQ ID NO: 25494 - DNA, 1174 bp, Mus musculus
aaaagccagctgaaaaaagcaaaatgctcatagtatctgagcttatatgctcagggccaaaataaggcattattgttaatttattggggttaattaagtatattcaaaaataatcaactttgtatatgtgtacagatatacatttgtatatatgcatatatattcacaaataatcaactttgtactagaaaatatattttagagtatgtaagttagtccttggtagagtagtttcattcattcattcattgtttacaacactagggatcaaactcaaggctttgtatacactaggtggatactctatcacaaagctcaacagaatggttttcaatagaactaattagaatcatatagatgaatgcaagcaaaaattcactgatacagagctaaaaaccacaaagcatgaatgtaacgggtcttatgtttacatttcaggtaatacaagccagacacaaaagccagaattcatatatcttcccatggtaaaaattacaatccttgtgatatttgctaaacttcagtaatcttgaatttctttctttttgtcttcttaaaatctagaatggtcagctggagtgtgttcgctggatggtgagtgagacagaagccattgcggaattgagttgttccaaggatttcccaagccttattcattacgcaggttgctatgggcaggtatggaatttctaagtatcttctcttacatgactacttattttttattattaggtcatcaaaatcaaaacacaacatcataaataagttcaaagattttcacgaacattgatatttattataatattttaataaagacatgctcaaaacaacctagctatctcaaggcataaatagcgaaggtagctatattcatatagtagaattttgcatgaggaagtgttacttacaccaggctaataaaaatatataatttaaaactttcactgtaatttggtaccaactttaaattttgtaggaaaagaaacagaaagtaagactagtgggaaaaaaaaacagcccaaagtggttccagccattttgtgaagaatggaactacaattggctttttaatggttttcaatttggtatttttctattttttataataaatattttaaacatttatcaaaaagaaaaatgatagtgacttgttgagcacaaagccaaacaccaa

SEQ ID NO: 25495 - DNA, 1220 bp, Mus musculus
gactgctcttccaaaggtcctgagttcagatcccagccaccacatggtggctcacaaccacccgtaatgagatctgacgccctcttctggtgtctgaagacaggtacagggtacttacatataataaataaataaattttttttaaaaagcttttttcctactctttcctactcagcatcaaggagaagagggatgctattacagtgcatcatatacagttatgactgtaaatgaataaaagtagagtctcatgcccaagtggccttaattaagcttgtgaccctctggcttcagtttcacctctgcgctgcggtttcaggagtctgttactatgcctggctccctttcattgctgatgttttgattgtcatgcccagtatctgctaagtgctgatttataaagattaagaccttggtttgttttctttttaactcttcctccgcaccccatctcactatgtagtctgggctgccctgaatctggtaaccctcctatctcagctccccagaactaggacaatatgagtgcctaccacacatgactgctttcctttctctttatttagctgttgtttatttgtttgtttggttggttggttggtttttcgaggcaaggtttctctgtgcagccctggttatcctggaactcatgtaggccaggctggcctcaactttggagatttgtcagtctctgcctattgagtgctgggtttaaaggtgtgaagaattgtgtttgtaagtgcatgtacatgtgggtgctcacagaggccagaagaaggtgttggatcccctgaagcttgagtttataggctggattcagggaactgaatgtggatcctctgcaaagacagcagaactctcagccactcagctctctctccagcttccttgtttctggtataagatgggtctcccatagctcaggcttgcattgttcacagatggcctgaactcctagtcttcctgcctctgactctacaaagtactgtgattacaggcatggatcaccatgcccagaagatgaatgatatcaaagatgattagggggatatggatgtggttcagtaacagagtatttgcccaacttgtgtacagggacctggtttcaatctcttccatcacaaaaacaaaagaccattcatcttacaaaatgattactaaccataacatttttttttcctctgtaaaactaagagaaattctgttgtgggtctactat

SEQ ID NO: 25496 - DNA, 1239 bp, Mus musculus
aggcatggtgatgaacacctccaatctctgcacagtgacacaggcaggactgccacagaatcaaggccagacaggtctatgtggtaggggaacgtgtctgaaaaaaacacattgaaaaacaaagtagagatcaagcataggctaggtgtggttctgcaagtgtaatcccagcagcagacagctgaggcatcataaaatcctgaaagttaaggccagcctgagctaacagtggtaccttctcacatatagttatatgtataaatgtatacaaagactaagttagtattagctgcttatgtatataatttttaaaaaaaagatatatgcattaaaatggtaaaaaaagattaacgaaaatatctctttttcttatcactcacagctgataaagtactgggaggcattcctacctgaagccaaagccattgcctagccttacccctgtgaaggagacattggattccccagtgagatcatctagaaaccatctaaataaaccactctatattttatgaattacatgtgggttttttatatataaaaacatatgcgctgacattttattacaagctgcatgtcctgaccttctttgaattaagtggactgtggcatgacattctgcaatattttgctgaattgaacactattgtgtcttaaatacttgcactaaaaaagtgcactgcaaggccagaaaattttacaatcttctttcttttatgttctgtagtgtgtttaccctcattatgaagcaaattagcaatgcattgattaatgttcacttatacattcctgtacagaaattatgatttttgtgattatagtaataaaatgatattacttgtgaaatattagtaataaattatttgagtatataaacacgttagggatctttttttaataggaaaaatactttcttctataagtatatctttaatactataattccttaaatactttaactgataagaaacgccaaattcttttttttttttttctcatacacattcaactgtatttaaagtctggaaaatgctaaaagtagtaattatacaggaggctgaagagcaaacaggtgtgtctcctgcagtaaacactaggcagacacagctttacttgaggtatggagcagggaaaaatttgccctgttgacctaagttggtggcagacttgctcttgttcccaaatctgggtgtgcccttggagaggttgtacaacctctgacagggaacttgataaagg

SEQ ID NO: 25497 - DNA, 1177 bp, Mus musculus
taacaataaaaaggagtcagctataaatccaacacatagaacaacataagctctgaaatcaaggactgggtagttcaggaaataacagattagacagagtcagagagaagattagagatgtggtggggaatcttacgagaggcggagaatgagagaggtcgaagggcaggtggagggatttctacacacatatcaaaagcaatgtcagaaggaaatactttcccagaattcaacacagacataagttctgactgaaaacgaactgtctctagggagtcagttggaaatgcacaacaggaagggtgaagagtgaaatttaaaagctattagagagaaaaacgagattacagacaatgacgacaaggactccatcagatgatagacaatgatgacagaatgcactcaagcagccgacaaaataggactactagctccgacggacaaataaggctaagctacaatatggaagttgccaagttaacatggaggagtaattaaaggcgctgtatcaacatttactccagacagcttcaaaattaaacgaattctgactggcaaatagagtaacagctaggcctagagggaaacaatgtgggaagggaaaataatgagtgcatacactgactaaactattcaatacaagtagctttctgctttaagaaaataattccagactacggaaaaaggaagctggcttgtggggaaagagtgtaactactcttgccttgcacaggagaagggataaaataatgaaaactgtaagtaacgacaaagtacagatattaacattttacattaaaggctatagagatagctcagacgttaagagccttgacagctcttccagaggttctgagttcaattcctagcaaccacatgatggctcacaaccacctgtaaagggatctgacaccctcttccagtgtgtctgaagacagccacagtgtactcatgtgaataaaaatgaatttatctggagctggagagatggctcagcggttaagagcactgactgctcttctgaaggtcctgaattcaaatcctagcaaccacatgctggctcacaaccacccataatgagctctgacaccctcttctggagctgtctgaagacagctacagtgtacttaaatataaaaagatagatgtatttattttttaaaaaaagaattaatct

SEQ ID NO: 25498 - DNA, 1148 bp, Mus musculus
ttgtttgtttgtttcgagacagggtttctctgtatagctttggctgtcctggaactcactctgtagaccaggctggcctcgagctcagaaatccgcctgcctctgcctcccaagtgctgggattaggcatgggagataaaattagagtaacaaccaagggttgggcaaaaatgtgtatatcagaacatacatgtatacatctgttaacccgaggctgggttcagttcccagtactcacatcagccagctcgcaactgcctgtaactccagttccagaggatccaatgcccagtggcctctgtgggcatttgtacacttgtggtacctataaattcatgtatgcgcatgtgcgcgctcgcgcacacacacaaacacacacacgcacactcacacacgcacacacttgaaaaacaaaacatagactcttgcagtaaacaccaagagctctcgtgagagtggagaccgtgcgtgtgaagtgttcctctgcagtcttagggtgatcttataactcaccccaaatgccatgaggccttgatcgttgtgagagcagtgaagctaaatggtctgaggacagccatggtgccgctcactctcatcctgtctcccttcatgtgttccagcctgggttctgtcaggccacccttttgtcgcctacttcacaaggagtgtctgtaacgcttgttactcagtgccaatgtagagagtgagaggatggcagcctgagtctgactccggtcaattgttgtttcttgctagaagaccaagagcacagagcccaagcatttggaagcaccgaattgcaaaggtgctaacacatacattcgggtctgggtaattgaaagggaagactttattctagttatctcacagtacagagactaaagcaaatcccatgaaatggtcagatatgtgaaaattaatatgattgaagaaagcacactaaatacttttttgcatcttttgttgtttttgttatctatgctggtgccataagcaaaaggacagaggtcacatcaagtatcccttactcagacctactaaaatgtcccccacaatcctgcccatgctggcagggcctttagaaggggagactgtgtcattcagccagccccacttcttgcttgatgcttttttgcctggtcccgaga

SEQ ID NO: 25499 - DNA, 1198 bp, Mus musculus
tcaccctgtggcaggctgtctcttgaaaagttcagggcaaataacccatcttcctctggaggtcagctgggcacctgtgattgcagcctcacacattacctgaggtagcccgtgctgctgtcttagacatggaggggctgagttctaatgggctctgaaaccgtgtcaccttcccaagtacatttgttaatggactgggcttggctgggattttatgttcccttttgcccaatatgggcacttcttatgtacactgatgattttctaaattaggaaaaactttctacccttgatagttttatataaatatgtcagcaggtacaagaaaagactttatagtgatcaatattacagtttaccaggttgcttcttccctaatgggttggttgaataattgattggtgaataaatggttggtttgtttagtttctgtgcataagtgtgtgtgtgtgtgtgtgtgtgtgtgagagagaggggggggggaggttgggcatatctatatgtgcaccacacgtgtgccgtatgcacaagcccacagagaccagaaaagagcactgatctgatctcctggaactggagttatagttggctatgagctctcgtgtgggtgttggataccaatcccaggtcctctgcaagactgggaagtgcttttaactactgaggcatccctctgccaccatgttcttgaaaatcctggtgaatactgcttccattttaagtcatctggcttaaaggggagttggttattgtttttttgttgaaactgcctcactagggtttgaattcacccatgctagggttgaacttctggattcaaactactcttctgcctcagcctgaaagtgatttatggggcgttctgggagctatatttaagagactaacttaaaaaaaatatagtcatccatttcaaacttaattttgttcagagatgttaatcaaaaatccccaaagctttttaatatgtgtatttttcacggttttccattctttgtctggtcactaacagtttgaaaatgagagtcacagaaggaccacgctaatcagttttttttttttttttggctgtttcttcattcaaaactgaacagcatagtagtctgtaaaccataacttagaaatagcatcagcattgatttaaatattgtagcttatttaaaaatactttggcagggaagcagcatagttacctttc

SEQ ID NO: 25500 - DNA, 1265 bp, Mus musculus
tggcctctggcttgacaaatgggagcgccccttgcccatgggcaaatgtgcccaggtagtagacctgaccgctgacactgtggccttgatctctgaccttccttcccgaccaagggcgaagggctctcctatgcgaactccagagagatgtggtggctctgaccctttgtccctctgtccataaaacacaattgtatgttgttgatgcacagaaagaaaagcagctttcctctgtttttcagattttccaaatgtggtcatcgaaggagttcttcatgggatatttttctctcacctgcagcccaggtagaaaccctacccggctggaagaagctgaagtgagtgtcgatgccgatggcaagaaaatcgatatctctaccaagttaaccgaaactctgagacacaatagctctagctagtgggaaaattcacagttccagcttcctttggagcagggacatttctattagaatggtgcttttaaaattagaaactgaaccggggtggggtcagtttaagaccaattatgtgagaagtgaaagggaaattacaagagaggttaggaaaaggaggccacagtggattactgggagtgtcacaaaatagagccagcctctgcttcagtcacactacctgctaattggaaatcatgtcttgagtcacgctgtgatactgaacaacttcggtggccttttgctcagaccttggacaccctcatctttgcgccatgagagttctctcagtgggggatactgtattctggagtgtgggcacctgaagagtatcccggagcccactgtgccggtctgaggatccagttatactgacagtagaacacactttcatttccattacagtggggatgcctcccacctacagattagctgccagcatcagtgctggagatgaaatgggtgttgggaccacccttgagagcactctagaaaggcgctgtatgggaagtctgacctccctcatcctctccctccagtactggaaagtatgagtgcgcctctgaaaaccagctgacacccctggcgaagttccaggggccgttccatatagaaagtacgtactctaaacactaaaatcagactgcaaaattcttgtcctgcaggaatgggacatggggtcacagtggccacaataggagcaaacagactgtttgtggcacggttccctcaatggtgtacacccacgccgctgttcaggttcctcttcactgacatcacgtatggattaaagtgagttagatgctcgatgct

SEQ ID NO: 25501 - DNA, 1136 bp, Mus musculus
atgctgctgctgtggggaaagggctcccactgtggctgctaatttgctaggactccaggacacgggtgttcctagttttgatcattctgtgtcctatgggctctggagtcacacctgtcacttacagacttgctgctactcttgttgctgaggcaagaaaacgcagtggcttagtcagagagccagatgctgctattctgctctgctagggttttgtaactctctcaagcaaaaaccagggctgagaaggcctgttctgtgggatccatgtgcggttaaaccaatgtatgtgctcaatgcttggttagctggttagatgccaagaggcgagtgacctaggaccaaagtcacctgagtatatggcagaggcagagccaccatgatagctcacctttctacccagctttcagaggccgtcttcccttcaaaatgaaatcgctgacccatttggtcaaattctggcttgaggtcctggggactttcatcctgtgccatgttaaggtctctgatttggtttagactctggcgtctctttccttcgggggtcaggtttgtcatacaccttcacttcttgtctgtgcccatcctctgtcctgtctcctgtgggattctgatgacatgaaacactcacgtttctttatatctgctgtcatccctccttctgcctcacccagggatgagcatctatggtgagacatttccggatgagaacttcaaactgaagcactatggcattggctgggtcagcatggccaatgctggaccagacaccaacggatcccagttcttcatcaccttgaccaagcccacctggttggatggcaaacacgttgtatttggaaaagtcctagatgggatggtaatttgaaagatctttttttctctcactctcaaaatacacaaagccttatatttatgattaataaatcagtgattcattggaccttcaaatgtgttcttagatacccactatatgatgggtagagtttttgaaggtgaacaaattatacatgggatagtattttaactgctaaaggcattaaagcagatatggaagaagttaggcacttcagttaatttaagaaacataaccaaataaaccaaggactgaatatgcattcagtgaaatattattt

SEQ ID NO: 25502 - DNA, 2125 bp, Mus musculus
taataagtgaactcgaccggcagatcagagaggttttgaccaaaaacagtgccagttaaaaaccaccggggaaacgtttgcagatacgctaggtctgcagtttgatattttgtaaaatcctcaaaagcaagggaagtggctactttggaatgctctttataatttttataagctgaattttatatgttactgtatatagtatttatttgattttacttacgctacctctccaatgctggcttcattttaattgtgttttatatgctcatttaaaatgacttttcagtgttcttcagtttaaaatctgttgtttgactttaaaaacagcctttcacaacttgtcccaggagaactgaccacagtagttcccactgtataatttttatgttgagccaagagagaatatgttgcactttaaacacgctgtgtcctgctccctttgagtgtagatatcttcaagttgaagccaattataagtgtagccatttttaaaaagcatttatatgaccagtctttttcccctcaacctgtggtatttgcagatgacaactttgaaaataaagcagtctcgggcagagacgctgtgtgacatgttggctgacaaattagtcattgcttaaacacagttcatgcagattaaacacaaatcaagttccaaatttcattggactccacttgaagaccatgagaaaatagcttggtctgaccacaatctcctgctcatgactctctgaggcttcttgttaaaatggttgcctttgtttctcagtgatagcgatacagctcaggaatggactatggaaactgatacctagcgacattagctgagaacaccacggagctgcttccctccctctgcagtcagtctgttttcagaggcaccccagcgagcccagtgcaagcccgtaaccctccagagctccttcacactgcgctctccaaaccaccccatcctcacagcgagcttatccctacctctgcgtgacactgagcaggcagattagcaatctcccaggtcatgcagcatcttgaaacaaagtaagaattctgattcccaaaaataacaaatttaagtgtatactttagcaggtgtgtactaattaccagtaacttcaacacaagcaaagcaggttacatggtaatgttcattcagtatatttcttgtttgtgaaattgaaacctctataggcatcatatgcttcttgtctttaacaaagtctttgtcttctaagagcaaccccgcagtaaacaacagaggggttgctggacttgagggtgacgagacagatgatcatagcagggatttgaaatatgaattatggttacatggtcctgattttttttttttggtgacatgaatggaacagaagtattttgttttagaaggtcctggcccagcgttggttcttcctcctgtatcctgtgaggcctggagcttttcaaacactagagggggccttagagtaagtggaaaggacttctaaaatgtgtgtgtgctttgccttccagaaagccatctttgggctactgtaatatgacaaataaaatcctcactgtgtgcatccttgagttgtgtggtcggtctctttgtttctaaatggagtgggtaaggtgctggcctcctccggtttattggtgtttcctgggctcttcctctgcacacttgaaaggacataaagtgaggagaagctgaaatggtacattcccttcctcagcaatagctagcacattcctgcgtggtgcttcacatattcacaccgatctttgttcaggagctgtcagtgcatgggtgcaaatgcagcagctagtgcgtgtgtctctgtgaagtctgtagttttcacttctaaagacgacacatgagaggggtgcccggtatctgcaaggttgagtcagcactgggtctgtatgcactttgagaattcctttacagggctgtcccagtgacacagatactgttgtgtagactgagttaggttatactggggctctgtacaaatgaaggaggtcgtatgacttcctctactgactgccttggttacatactgataggagttcatgggttgttccagtatgaattgtctgtgtgtctgaagatacttgagagtagactgacctagctattaca

SEQ ID NO: 25503 - DNA, 1196 bp, Mus musculus
tctgtgtctaggagaaggttaacatgtgtgcatattcattccaggaaagtagacaagttttgaataacttataaccaccaagagtcgcaaggctgatgagtatatttcactatataaattcatcagtgttttagaggtagtaaaaatcacagtattgtgctaaagggaattcagtggaagaactgttgcctaacaagcataaagccctggttccctcaacaaaacaaaacaaagaaaaagatgcacacatttgaaaatgaatgcgtatgacttgagacctcaggccttattcaaacaagagaaggtgacagtcagtgtgcacacttgtacatctgcagcagaggagagagtaccgaagtgtccagtgtgcactcaagaggcagaggcagatctctgtgagtttaaggctagccttgtctacatagcaagttccaggccagccagagctactaaatattcattagcaataattatgtgggctgtatgactttattttttggaacaagtgcacagctatttaggtaagttttagtaagtgtaagtattgaggtgctgtgttggtcaataagcacacacttgagaactcctgaggcccatggaggctggctcagttggagctttggagccgggtgtggtggcgcataactttaatcccagcactcaggaggcagaggcaggcggatactacagacagggtagtggaaggaaatacaagtttccatgaactttacgataattcccatttcatttgtaggtcaaataacaggatattagacctttcttatacaatgacactggaagactatggcctagtgaaaatgcgtgagatctttgtatcggagtcatctcaggtaagtgtagttacaattcctgacccaggagtgtgctaaggtgtttatgggtgtgtcccattcacttttctttcacattgtagggtgtgcctgctgtggatcagaagccatcttcgcctcctcccgctccctgcccttctgagatccagatggaacccagagagaccttagagtacaaggctgccctcgagctggagatgtggaaagagatgcaggaagacatatttgaaagtcaggtagattgacattgtactctaaaatctctgctttatcacagagtttattttctccttctctacaactgcatcttctctccatgatgtctacagttttactatgagattt

SEQ ID NO: 25504 - DNA, 1174 bp, Mus musculus
cctgggtctggtatgcactgtgtctgtatggaacatgctgggtctccgttctttcacctgctcactctctcagccacgtctaccatagtcttcactccagagctcatacgttcataaagaaacctacgccacattccttttctatgtggcctgttcagtaattttaaaatactttacttcagaatattgtttttatgtatagaaaaataaagcttcctagaaaaaaaatgaaaggaaaccttttgcaatgctgcgcccatgaaaatggccaacttcttaattaaatccatatagcaaggtttcagatgtgtataatgggccaggtcttgtggcacaggcctgaattccagcacatgagaggttaagataagacaagtgtgaccccaaggccagcttaggttacatagtaagtaccaggccagactgggtaacagtacgttcaggaccaaactgggctctataataagacctatcgaaaattaataaactatgggaaggcacagtctgacatagctgtggttttgtctgtgtagttcttgctagcctggcaggagttgacccgaaggacattgttgcagtattgaatgaggaaggaggctaccatcagattggaccagcggagcactgtactgacccctttattttgtcggtgacgattgcatttgccacccagttggaacaggtaagacattccctcggactaatggcttttattgactgtttgaagtcacatttgttttctgtgagcacttgtacttgcatgcacattcccacacgtggactcatacccctcatacatgttgtttaaaaagtataaaaatgtttgcaatgttttcacaccagtaagcactttttctgtagatttcaacatcttgacaacaagagaatagagcaatttcagggttaagggacagtgtttgtacttgtatatgtggcgttgtgaggagtaaggaagaggaattctacagtggctcttttgaataatatactgtttgatgaaattagcaatgccaggaacatttgggttggggattatattttattgtgtgtagacttacaaatgttagcctgttgtcatggatgctagcagaagatagtatgctcctgtgtcaggatcagaggactttcttatgtagtgaacaacatcaaaatgggtgtgttttcttgagcctct

SEQ ID NO: 25505 - DNA, 2301 bp, Mus musculus
agagaaaacagttgcccaaatattaaaaacaactttcttgaacagttcctgttttgtggcatctgcattgatttcagtatgactgatggtactgttattcgtgaatcatattgacattctctctgtgaaatcatggtacagtcactgcccagaggtactgaggaaaatgtactatgggattggcaaacggtggcggtaaataatcagcagttgttggcaatgcgagctcggcttctgtggcgccactgtgtgaagtgcagctgcagaagaagcaggagcgccaggaacgtttgtttaatgtcactctctgcttccagatgataatatatactagatggcaagaaatgagtcctggagaagtaatgtatgggagagtttaaaaaacacactaaggaaaggatgacaatgtgaaacttgtttcagtgtgtaaggctggagccccttaagagcctactgccccgtggccacatttctctcagaagcagaaacccgaggacgtgccatagagtggtggctgcctgtgatgcctctcttcagatgcagaaaagagtcctactcccagcaataagcaccgggtcactctgttgccctctgtgcacactagtctcgtgtgttcagctttgctagttctctgacatttcctgtcttgagcataataatgtggctgattggagaatgttctggagagggtgggctgggtgcgttgcctccatagctttcacagtgcctgcatatgcacagcgtaacagttctgttatgcgccaagtccatcccactttgcaagtgtgctctgttttacgccatgaggacacaggcatagtttgtgtctcatcctgtcagccgggtggtcgagagttaaaaaggctggccagacagatgctgttgatcatatcacacattcgtcttctacttagaaacccgtcgctcctcctccctgcgctctcctctctgtcttaagtgtgagccttcaggtatgcttatttattttttttgtctcaaggtaacatttaaaatatgtattaaaggaaatgaatccacatttttttacttccttattgaatttacaggtatttaattgtattttgtaatttatttttcttattagccaaaagttcaatgtgttgtttttgataaattgggcgcccacatgaacatcccaggtcaggacatcgtttatctttatttttgattttaaagacctacactcaactgagaaaatatttgctgtataatttgatcaacagtttccattctctttgtatactgtcatgatatctaaactgcaggagttaaatactgagttttttattttgtttgctctgagcaaggtagatggatattttggccatttataatgtgaaaccacttctttacagtatttgaccaaatttgtgtgtctatgatatttgtaaatacatgcgatatctgtatttcttatcataaacctatttagttttattctcagtagggtttttggactgtacagtgtttatatgatctgaactccttatacataagaaggtgtgtatattaatccaattatggacttaaatattttaaaagtatgaatacccttatttgctgcaaaggccagtgtgtagacatttgctttttagcaatatttttaagtgctccgttttcgtgctggagaagaagtctttggcacacagactggtcagtaataggtgatgcaggtatgtccaggttaagccaacaatgttttgcatttctatgcttcttttctgtcaacactaatgaaatcaacattgcctgaatgtctgaatactgaaacacagccctgtttaaaagtatgtaactgaaaaaaaaaaaaaaagaaataaataaaggtagtttttttaaactcgctctttcccctttcctctaaccatgagtgaactaatgtttttcattgctgcacagagctttaaaaatgaacttctgttcgtttactacttactctaagaggcagggcagaaggaagctgcttttgtcattttgtgtctgtctctgttcgatgggagcacagttgttaggagcacatcacaggaaggatctaagcttgctttgttttcatttttaaatctttggagttacttaatagagcaattggttaaagctgtcctctaacaacttaataaaaagtgattttatttctgttttgaaaacaaagtcatgctatttttgaaagttcagttaattaattttaagtgaataaagtcatttcagatgaggaacataaatatatttgcaccagtaatttgacttctcgttatgataggtcctttaagcattttaccaaac

SEQ ID NO: 25506 - DNA, 1184 bp, Mus musculus
atctttattgcatcctcatcaagacttctcccagttatcctgttgttgcccggtggcatggagatcctacagctttgaatcagtaggactaaccctttcacatgtcccacatgttcacagatgatatagatttgggggtgggccaattcagagccctggtcctaggtcattgctgagctggtcagtatgctggctctccctcatctataccactatggccagtttttcagcactgctccagctgggacacccagtgctgtcctgagtaggaggcagggtcagatttcttgttcttatgccctaggctggctcacccataccattgcctccagagtcagctcactgtgctgcccagtcaatcacaaatgctgcagtttgtgatgggatgggatagctttcgcactcccaacagctcagagcgggctcacttgtgccttcaccaccagtgccagctccactgtgttgtacagtagcggtacagagcctgctctcctgagttctgctgccttcgaggggcagggccagttcatctgctctcaggatcctggcaccagctctcctgacggctgcaggtgacaaagggaaagggtgcatcataccccaccacctcctggcagacaaatggttggtccagctctcctgcccttgggtctggctcacctttgccgctaccacccaggtcatctctgctgtgctgtcccagcaaggtgcagggcacatttgttctcccctggtgctgcagctggtgaaggatagggctacctctcctgtgctcgtgaccttgtgggcatgattctcaactgctggagtcagccgttcctcactcacacccttggccaacttacccttgccaccagggccagtaccactgtacagcctagggtccattcttccaagtgctgctgctggtgatggttgagaattgggccagctttccagagagctgtagccagtgagaggtggggcccgttctgcacagcccttggacattcatgtggttcctaacggctgtgcagatcagggaaatccccatgttcaccagtggtactatgagtcgtggacattgatgctgtcacaggctccgatatgggctttagctgctgttcaggccgagacctcactgtgaccccaggtgatagggctgaccacttacaacaggctacctctctctgccctccagtctc

SEQ ID NO: 25507 - DNA, 1106 bp, Mus musculus
gaaatataagaagtaatatttggccatcttcctgaaacatgttcttactccaaacttcctatggaattagctggtagagtactgcagtataaatagtcaattgatacgatgagttagttatatttatatatttctacgacaagtcttaaggaaagaactggagtggggactcatggctgtgtggaaatttaactaactaggtaaagatactctctggctttttgaacactcgagtataaaatggtctcccatggcagagaccagcagtccttcacgtacacatagctgctgtggggaatggaggcagtgttaagatctaaacaaagactctaacaaactatgtacttgaaaacagttgtctgagtgctatgtttaagcccaggcacctcaaggtacttaagaaaaataccttaagagagatccaactaaactcagaactggcccctagacatccggcctagagttgagagtgaccgctgtgcctttgtatcaatcgcaggcaaaaggatgcggagcctctctgctagcccagttttctgttcagacttaacccagatccattccatgaatgatgtttctctctttccttacaggcagacagccccatccggcctgggatcacaaatgcagttaaatgtggaggtcctctgccaagaacttacagctaacatagtgaaattggaaaaggtaggttgatgtttcctgagtacaggagcaatccggtcattcctttccagcgctactggccttgttgggttttttgtttgtttgtttctataaagaaacggaatttaatctcattttctgcaaaataccaattaggttggcccattgtttgtgtccttggctggacatgggaccacgggtaagtggccagtgacactggggttcatggagagatgcatttgggtgtcaaccagagactattggccagccccagatgtagatatccagctcacttaaaacatatttaatccctgttactgccttggctggaaggaaagaataaagttttaaattaccttgctcaaggtggcagagatagaaggcttaactggggaagtagaatttgaaccacaaggccaagtatggttagaggtccgctt

SEQ ID NO: 25508 - DNA, 1191 bp, Mus musculus
tggaggccgagtcactaggatgtctgtgtggtgaccttctggagatgctgcctgggacttgctttacctttgttgtgttctctcagagcttgttggctcagaatacttctctcgggggaaattccaggtgcatcatggtaactagtttgggaaaagaaaaaaaaaaatttaaaaattgctatattcttaacaaaatgagaagatttgcattttccttaataatgtaagttaagagagaaagttacatcgcccgtgttcttgtattatgaccaaaagaaaaaccataggtaacaggtgatgtgtgtcttccagccatttgtgcttgtgtttttccgttgtaaggaatcgcactgattttttttttttttttttttttttttttgtatactgatggttggttggttggttggttggctttaccgacctataagttgttactataaacagactgatgtctttaatgttatattatgtatgtgcttatatgctatggattgcatatgatgtgtgtgctcccattcgtttccttctcttccccagtaccatcaactacagcacgtccctccctctggctcagggaatcaagtttcagtgatactgcgtgggcttggcgtcccttagccattcctgtggctgctcggaagaagcctgaaaggaccctgacttgccccggataaatgatggctttgagtacggacagcagtgtctaatctccagtgattcccagacccctgtctaaatcaagatactcatttatcaaaagttcaaaattaaatattcacaacctagctgcatttagcaaaagataggtttggtgagtttttatgttactaattactttttttattacagctaatcatttcttagtgaagtacatgccatcataggaggttggggccatggaaaatgcaataggaaggaagaagtctttgcagtggagaaatgtcttctaagcagtgctgaatcctcatggtcccgtcctggcaggggttgaaggggagaggtacccccacatgctggggacctcagcacagtttcatgtgcatgatttgcagtgctccaaatgacaatgggccatttttgggtgaggtgaggaacttaacactgttgtgaatggttgctgggatgtgtcaacccctgggttcaaatctcagtaccaccacaacaaagataatgctctaaaaataatgc

SEQ ID NO: 25509 - DNA, 1225 bp, Mus musculus
catgttaaagcttgtatgttcacagaaaataacaaccagaacgcagacctgacaacatccatccttgggggtgctgagctgcctgatcctccctcacactacctcaatgatgtctcctaaaaagatcagcctccaaaacagcttcaaaggagggtgatgacatcaatcgacctcaatttatcagccatacagactgatctagtcagtgctgaattctctccgtatacagaaactggacaacaaatgccacagctagatttcttaagactattttccagttctccttgccctcccccaaaataaatatttcaccccaaattagcaagaagcaattttaagagaactatgccccattcccaagaggggaagtaaatgatttttggttgttcattgggagatgggtgtttgctgtcatttaaaaagggacagttataagtacttatgatcttggacagggaggaaacgaaatagggaggtctatataaacgaaatatttgggggtctctttctctttcctatacccttctttctctcctctctagtattaggttgaaaagaaaggggagaaggttgaaaagaaaaaggcagaatataagaacattgtagagggttggcgagatggctcagcggttaagaacactgactgctcttctgaaggtcctgagttcaaatcccagcaaccacatgatggctcacaaccatccgtaatgagatctgatgccctcttctggtgtgtctgaagacagctacagtgtacttagatatgataataaaaaaatctaaaaaaataacaaaaaacagttgattaagaaaaaagaacattgtagaaatatcatatagaaataacaaaataaaagggtagatgaataaatctactcttaaaccaaagaatattttatagccacattggtagagaactttgtatattaaaattatattttgttacattgatatagatttttgagtattgttgcaaatttgaggttatattttcttatattggtacagaactttgtatagtgacacaaaatttgaggttagttttgttaccacgtgctgtttattatgtttcaactcttgtataaggtattggatctgagtaactcatttgtaggtgtaatgtaaagttctcgtttcttttaaggttgtcattacaaactgtttaggataatttagaaatacaagtttatagacattcaaactcatggttatattatgagactag

SEQ ID NO: 25510 - DNA, 1140 bp, Mus musculus
ctaactaactaactaactagttaattttgtcgccctatttgtgttcttcagtggcttccccagaaggcagtctaggtagcgccttacagagcatggcagctcctcctcagcttctggtctgggcttcgtagatctcactgctttcctgggcgctctccccctttgctttcaaagcctgtttcattcttgcaccagacacaaagtgggaagagaggtcacccacactggaaacatgaccgtgcttagctataaatccttagtttggattttgagacttgaaggattgacttcttcattggctacattgataggtgatttgatgtgaccccctggggtagaaccagcaaacggccccaaagttaaaatgatataatcttgttaataaatacaaagaactctaatgtcttaaattattactaaagaattgctatatcatcttcatcattctttttccttatagctagaagcatccttatctgccgccaaaaagcagttagcagatgaaactttacttaaagtggatttggagaatcgctgtcagagccttactgaggacttggagtttcgtaaaaatatgtatgaagaggtaatagcataaagattttgttttgtttttctttttttttctttcccccaagacaggatttctctgcatagtcctggccatcatggagctccctctgttgcctaggctggtctcaacctcagagatttgcctgcccggcttcccgagtgctgagactaaaggtgtgcaccacccctgcctggaaatgtttccttggaaagggaacagagactgggcgtggggacttgaatactagcgtaggaaatttaggatttcagggtcatccttgccatgtagttagcttgagaatagcctgggctactttagacattatctcaaaaaaccatgggctgctaaggtgccttatcaggcatttactgttgagccaaacagtccgcatctgatccctaagcccacgttgtgggaggaaaatctacccctgcagattgtcctctgacctctgtaacaaagccgcacacaggaaagacaaaaacaaacaagtattttttttgccataaggaaaggtagctaaatacagagatggtaggatttagggataggagatgccttgcaga

SEQ ID NO: 25511 - DNA, 1813 bp, Mus musculus
tggaaacgaggttattccagtgtcgttagacataaggtttatgcctgtgtcagtggtctcccatgtcatatcttgagtagttaagcccaaagtgtctcagtactttcctctcccaggtacgtctggcccctttccacatacttctatttttgacttccacattgctttgtctgtaaattgtcactccctgtgggtggtttttgctttgttttatagcggggccaattggaaaatctgacagtgttctcttcagaggtggggaatcatcccacttacaggaacagatcacgtgatacatcttggttttgtttgtaaaagatttttttctcacatgttaaatgttatatgaatgaataaattattagttggcaacagtgttagaaaattgatgaagttatttaaaatagtttccattgtttggactccactgttcatgtagggtgttagtcatgtaatgaggtggttatgggcatcgcatacaagaggccttacagagaggtcctgtagctgcctagcacttgctgagtgcctccactaaattatgtccgggaagaactataaaagaactctctcgcctctgtttctgtctctcttgctctatctgtcttccactcctcagtctctctctctctctctctctctctctctctctctctctctctctctcacacacacacacacacacacacatcccatttggagatgtgggtattgttttatgagacctgcctttgcttctgaaaggaagagtctctggttacagagttggtttggaatatagaatgcttccttcgcacacgtcactacagtcaagtttctattgtacggcatctttgttagtgctcccctagacagtaaatgcttagtggatggaatactgaaaaaataaccttgagttgatgacctagctatctagaaattgtttaaattgatagttttaggagtgagtctgaagagataggtgtgtatggtgatgtacgtcagcaaagcaagcgtgctttcctgtttcatcagctggttaccagaagggcttgggtttgaaggtcttggtgaattacgcttcctcatttcttagttccagcttcctaggtaaggctgacagtggcttcctgtccttacttacagcttgagaatgccagactctcctcagagatgaacacttccactgtcaacagtgcccgggaagagctgatggagagccggatgaggatcgagagcctctcctcacagctctctaacctgcagaaagaggtaagcagcgtcttcctttgagcaggactgaggtgtagctggaaggctggccacctgcgccatcgctgcctccctggtgctacttctcttttgtcccagatgagacatattttctcctggattttcttttatatagtgctttctggattcttttatatagtgctttctggattcttttatatagtgctttctggattcttttatatagtgctttctggattcttttatatagtgctttctggattcttttatatagtgctttctggatttttttttatatagtgctttctggattcttttatatagtgctttctggattcttttatatagtgctttctggattttttttttttatatagtgctttctggattttcttttatatagtgctttctggattttttttttttttttttttttgtggttgttgttgttgtccattgcttaaatattgtgaggctttgtggaggtgcacaccagtaatcccagcatcagagaggcagagataagattgctgcaagttcaaggttggccagggctacatagtaagatgctgcctccgac

SEQ ID NO: 25512 - DNA, 1114 bp, Mus musculus
ggactggtgtattgattgcttctttggctcagctttactccctcaggaacagcttattccgggcaaagctggcatatgcaagagacaaaaaaaaaatcttgtctttgctagtcctaagtgtctgatttaaaaacagaaagctgtcagatcataggagttttgtttgtggtttcgagggctggcttgtgttgtaaattcttaagggcctatctaattgagcagtgaccgtgatccttgcttgtaattttcatctctcctcagttttgtcccctttaaaattcagacccttcctggtgggtgcggtgttgatgacattgctttttgcaaagagcctgtctggggtcatggatttgattatttcatagttctctgtatgtgtgaagtaaccttgttatgttgtgttttgtgactaggatcaaccaatgggaggctgggagatgatcagaaaaattggagacacatcagtcagttacaaatatacctcaagatatgtgctgaaggctggccagactgtcacagtaagtgagctcaatcatctaattttcttttcttttcttttttttttttaaaagatttatttatttattatatgtaagtacactgtagctgttttcagacactccagaagagggaggcagattttgttacagatggttgtgagccaccatatggttgctgggatttgaactccagacctttggaagagccgtcgggtgctcttacccactgagccatctcaccagccctaattttattttcttaatcacagataaggtagttgtaccaaaaaccaaaacaacagtttgaccgaaagagaagcattttagaaatggtctttaaaatgcctttgtattagtagggtatgtgtgctgtgaaatatttaaaaattctgccttagagcagtgaaaagaattgatatttggatgattttgtctgtttagttgggtataataaaatagttgcttcctgactgatcctcctcgtgcaaggattctgcatggcatcaagatctgtaggaagccaacaccagcatccgcctaaaacaacagctgcctaaactgccttggataagctttcatgttttgctatcttgccgctccattttacccttagc

SEQ ID NO: 25513 - DNA, 1529 bp, Mus musculus
aaaaaaaaaccacagtttgtagaatttttcttattaagattagatcttgctatgtctgtgacctcagctggcctgagtttctattttaagtgagaaaatcttaactgtttacaggcctaggtcagcttttatttgttttgtgggaaaaactggtgtagtcagagtggaagctcagttgtggggtttgttgaagtgagcccttagagaatgctggaaagcatgaggtgtgagctggctcattttaagtagggagtgcagcgctttagtgactgggggaaatggctggcctttagaacactgtaatattgctggtactgactttccttctgtttcccctctcagggagccccaagagcatccaataaaagctgtgccattatgtgaacttgtcaagacatggtcgatcttcctcaagctagaagcatggagtcctgtatacagtgcagagccttctcagaagcacatgatatttttgtatttcctttatgtgaatttttaagctgcgaatctgatggccttaatttcctttttgacactgaaagttttgtaaaagaaatcctatccatacacgttgtaagatgtgaattattgacactgagctaactgtactgtttggaaaggggccctcaagtttttggcatttttctttcctttttgtatgtgtgtatgtaattttttttttttaagttcttttaaggggggacaaggagggtaagaaaaccactgcgtgtccgggcataattgaagcttgctctccctagatgggtggtctgctctcggtccttctctgctctctataaaatggtgctgtgcgggagggaggggggaagtttttcaatatatgaacttttgtatggaatttttttgtaataagtgatcaaggttacaaattttttttttaaatagaaaagagaagaaaaacgttgtaagaaggcaatattaatctagtcaccatgtacgcactctggatggaggttctacagagctgttgattggtcaactacttctcttacattgttgactcatgaggggagcgggcaggcggggtgagggtgggggaaggctttctcttcaaattcgctagttgagtttttaagatagtgtaacatgcttacatttcttatccgacattaacaaataaaacgctgttttcctattaatctactgttctttttaaccctttaaaccagcaggtctcagcctgtgggttgtgaccccttgggggaggtgactggcccttttaaaggggccacctaagaccaccagaaaacacagatatttgcagtatgactcatgacagtagcaaagttataaactttgaactagcaatgaaaatgactctatggttggtgtcaccacagcatgaggaactgtgttaaagggaagggtgagaaccgctgctttaggcagatgctgacagagtagaactgttttcgtttactttggctcacgtgaactgcacttctcagtgatgctttacaattgaggaagagagatgaatgctcagactcctcggtgctctgttggca

SEQ ID NO: 25514 - DNA, 1236 bp, Mus musculus
tttcattaacacaggataccacacagaaagaaagccctgcttaaaattcaccatgtttgtggtgaggtttgaaagaagtttaaataacaaacacacccacgcctcactcctagccacaagtttctttgctcctcgctgaatcctctgaaggattcctttctcttaggacactctaattctctgctttgaatagctgcacggtgctcccttagatacatgcagcattatacacgtgtcatgtcttcttttcttcttatcactaacaatgctctgatcagatattgcacagtggcatgagcatgactgtaggataaacttctggaactgaagtttctacgtcatgaatatatactgcaacatttaacaatattgttctgcagaaatttattttccaacctactatgaaaagagacaatgcttccgttttctgtaagttacttttataggaatgttcattcacaccctgacttgattagaaagttactgagtggctgcaaggaaataaaagttatcagtacatgcacaaaaaagatatggaacaacattcagtgcataaagtgaacttaattaattaagacttttttaaaaattcacataagattgttttctgtcccaggcaaccttcctgttttctgaagtactgtgttttctgaagacagatgcaagtgggagaaattgattaacttaactccagactatgttaataaaaacaaagccatcccagtgtgatccccatcacacccctgtatctgcccatttaaacccaaaacatgtttgggcacagagctccgtgttcagtcacgtacagcctgcctcttctgggtggagaatagtctggccaagtctgatatacctacccctgcctgtcaactggactagatagtagggctggcagggcaggcattagcacccgtgcactgaggccttcctctttcctaaaagcttctaacactaactaccttctaccttcagagttgggggtagcagcaaatctgggatccagagatgaaaaccaggtcaggacagtatgtgggccacttgccagttgagtgggcagggtgccagaggtgtgtcctctcctggttgtccagggcaggagatggaacccagactccaggagaagggaggaggcagggcctcccatggagctggagagtctaaagagtgcctgcctaaagaacaaggaacattttagcccctgagcacagaacaagcagataggaggaagccacagga

SEQ ID NO: 25515 - DNA, 1738 bp, Mus musculus
ggccggggggtgtaagcccatccgtgctgggatgttgtttggctgggatgtgtagatttaaggctgtttcttagtctgccttaagcacagtctgacattcctaactgtgcctctctgcctttatttcttaaggatgttttcaacgggatgatttttatattcgatgttgtttatgttttcttccagatatactgtattttaccatttgggaaatttacataagtcaaaatgtagtaaatttttttcttactcagttgagctctctatataggcaattcagatatcttcctgatgacaatttgatgtgtaaatgtaatttaactttctttttgatgttgatgcagttctggagatgttagccttagaggtctctgcactcgctcttccctgtcctggcttgtgcagtgtgcctgcctgcttttcggtaattacatcacttctgctccttttacagaaggagacgttttacttttgaggtgggtacgtgctgatcttcaagcactgtgtgtgttgcttggtgaggtaggaagggtgcattgctgtggctcttgcggtgcatggacctggcccagggaaacgtggtctcaggacttctggtggcttcttgatgcataagaaacggggacctttctctaccgcttgtttgctgtgctctggctttacaatttgggtctggggatgtagctctgtgacagaacaccagctaatgtctggtccctcagtcagtctctagaacacaagcatgcatgcacgtgcacacacacacacgcacgcactcacacgatggggggggggggggattaaagtctgtccccgtgtaacagtatctgatggggcattgtctggaagacggtgtttcctgttctctgaaggcaggttttgcagatccagaagggtcccctgctattctcttctttgtgtaaccgagtccatactagctcagtgactgttttagaggccatcctagtagatgcacaagaggtcactgacatctcatggggtgatcgtcttcctcgaaccctcaaataacagtggccaacttatgcgatggctcgtttgaaaccgaataattgtcgatacctagtccgccttctgtgggacggggagaagcaagagtgaagggtggatggaagagagaagtgtttgatccggtctgatctcagtttcctccggcccaggagcagggctgacagtggcacaggcttttcttccccagcctctatctgtcaccctcaggttgtgctaaaccagaagaacagggagtgctgattgtccctcctgtagctcgcccaggagcctgtgtggtggcctttaggcctggccagcccaacgtcatggttccctccccagcccttctgttctgtgtacttttctcttcctacgtgtctctgtgtagcgtctacactgacagttttagagactttgtgggtggctgttgcctttttcaagcctttcaggaaaaaaaaatcatgtaaccgtttgtcacccttgccatggttggtgctagcatcttttgtgaagtttgttgttgttgttgttgtttttggtttttgagttccagattattggaatcttattttaatttatttttctccgttggaaaataaaacaggaaaaatgatttaacatccatctcacagagttgcttgactgtttagttccaaggtcctcctgttcagcttctgttgctcgtcttgttcctgctctggcttgctttgttggtaacaatgctggacct

SEQ ID NO: 25516 - DNA, 1187 bp, Mus musculus
ccggcgggcgggaggacgcggcggctgcggcggcggaaggggcggtggcagcggcggcggcggcggcggcggcgcgcaggtcggcgcggaggcgcgtgcggccgcgcctgctcgctgcggtgcggaggaggccggcgctctccagggtcggcgccgggctcggggcgggctgaggggcgggctgagcggccccgcctcccgcgtgctgcaccgagcgccgcggccccgccgcgcctttaaaccgcggggccggccgcgctcgcgggcactcggcggcgggcggcgagcggcgagcgtgccgcggctgtgtagtggcgctgtgactctttctctctctatcactctcccccggctccttagcgggagcgccggccagggacccgagccgcgccgtacgcagcgtccacccgcctgctccgcaggtccccgagcgtcgggcggcgatggagcccgggcccgcggcgccctcgtctggcgccccgcggcccgcccgggatggggacgcgccgctggctgccgccgccggggtggacctgcccggcacggccgtgccctccggccaagaggatgctactacggctgggaggcaggctggcggcggggtgcgcggagagggaaccccagcggcgggcgatgggctgggcagacctctggggcccacccccagccagagccgcttccaggtggacccggtttccgagaacgccgggcgggccgcggcggctgcggcggcggcggcggcggctgcggctgcggccggggcggcgggcaaggagacccccgcggccgggaaagccggcggtgagagcggcgtggccaagggcagcgaggaagccaagggccgcttccgcgtgaacttcgtggacccggctgcctcgtcgtcggcggacgacagcctgtcggatgcggcgggggtcggtggcgacgggcccaacgtgagcttccagaacggcggggacacggtgctgagcgagggcagcagcctgcactcggggggtggcagtggacaccaccagcagtactactatgacacccacaccaacacctactacctgcgcaccttcggccacaacaccatggacgcggtgcccaggatcgaccactaccggcacacggccgcgcagctgggcgagaagctgctccggcccagcctggcagagctccacgatgagctggaaaaggtgagc

SEQ ID NO: 25517 - DNA, 1193 bp, Mus musculus
aagacacccacattgctatttagctttgggaaaagtagctgattagaaacacacatattcagttttcttatgacagagatggaaagagatgtcttttttgtgtatattacagactttatattccagagtgaaaactggaaaaaaagattaataaattgccagacaggcctggtttttgtggttttatttgaataattgaacagctaagggagttggtgaaattgactaagagtttcttttttaatgtttggaatcagcattgacctctgctgtctggaaagcatttaacagccatgtaaagcccaactaggattgccattatgatgcactaacatctggtcaccttaaagaaaagctacttctatatatttctgttaaggttaagtctactaacgagttgtcatctttacatcagagtctatgtaaggagaagaacaataatagcctaagtggcaagggaaaattcactcagtgatgttgaagcacgaaaatcagttttaaaaactggattttctacatgtaatgataatagctgtgttttgttatcctgtgttgactatggagtaaagatgtgaaggtttaactttagactgagcacctgtgttccaaaccattccttttacccatcatgttttcatgaagtcttgtcaggcctgtgtcccaatgaggactgaacagatagagaataagaaacgaagagctacagaattagatatggaactttaacccagaaagagaagtgagactgtactctgatttgtgacaagtctacagagctgttgaccaagagcaggcagggtcagtgtggaggtcattcagagtggatctggggtcctgtgaatccttctgtattggttggtggggaagaattttaaacagggagatggctgcagatgccttgaatcccatcactcgggcacaggcagccagatctcttgagttcaaggctggcttgctctagagcaaattccaagacagccagggctacacagagaggccctgtcttgaaaaattaaaaacaagcaagcacatacacacaaatactaaacaaaaacccccaaacaaacaaacaaaacaaacagaaaaggattttacatagttaatgttggtatttcagatgtggagaagggtatggcagccagatgataggatagcttgtggtaaagagccaaggcctgactctgtttatcatc

SEQ ID NO: 25518 - DNA, 1103 bp, Mus musculus
gggcagggaggtatggagagttgtatagaatgaaaagcctgtggctccggtggggatttgcccgtctttagggcttgttttagaaatgggtggcatggttctatccacagtgaacactctcagttttgcccgaggcagggtctcactaccaatctcagagctgggactagtcacagactgtgatcctctgtctgcagattatctgacaggtggaaccttcaggctcacgacactgcatctagctttactccagttctttaagagctgttattcatgtaacagcatttattaagtacctactgaatactttgcattctttaagacattaggcagaaagacagaccaggacagattacctgtgtgatgggagtaagcacaggagccatgtcgtgatgctctgtttacctgtgtggtgggcgtaagcacaggagccatgtcgtgatgctctgtttgacaccacaggctcagattgtgctgctggtgatccttctcctggccatcgccgacttcgtcatagggacgtttatctcactggagagcaagaagcccaagggtttctttggctataaatgtaagtaaaaagatggaatactttcttaagtgcaaattacagcactgtgctgttaactaaatttagttcattttaggtaatttatactgtaattatgtttggtctggtgagtcactctaattaataatttaggttttgccctctttatatataggctgtacaattagagtaaaatcactttcatttttatcttttgtgtttgaatattaacagcagcagggggtagagtggagtgaagcagctttactaaggaggaggcaccagcctggctctcaccgtgtctccagttttgtgtttctcggtactgggaatgtgaaaaagtatctttaggtgattttattgttgcatacacatcctagagtttacttactttaaaatgtctatgatgtcatcagactacataaagttacagaacctgttatttatattgtctatcattaaccaaaattttacttggtatgtgacattttaaacataacagtttaaaagtgctattgattgtgaaagcagacagaagttgcaaaaatcatga

SEQ ID NO: 25519 - DNA, 1082 bp, Mus musculus
cgttgttgtcaagagtcttttattcaaagtttctactcctgggattgtcttcctgaaaaatggcacaaagaggcagtttctgtctgtgcatatttgattagatataattgtaattagttttaggcatatgttgaataagttacagagctgggataagaattatgttttccattgacttggagatgatttgctatgagcagagttgtacttgatgtgtcaatctgaggcatcactttggctaacgcagcactgtttagttgaggggctgacacaggcaagagctaagtccgcctagtgtgagagcttgggaattaccgctttttacctaaattataaagattgttacacgtcattgtttactatttaagctgttcttgatatgtaattcaaaataagtttgttggtattctctctactctttaaagtattattgcttttgatgacatgatcgagccgtacagacttcacgaagatgataaagaacaggacattgcagataagatgaaagaagatgagccttggcgaatcacagataatgagcttgagctttataagactaaggtatattcttcacttctgtgtccttttcattaatcttacatagaattcaatagaattactgctgctgtaaataccaagcactgtgatttaatatagctacataaattaaacttgcattaaagacatttaatatatgaatgaagcagcatccaatatatttctaaatgttactttattacacaaaatctatttttgttttgctgttttacaaaccatgctgctgctgcttcctcctcctcctcttctccctcttcctcctcctcctcctcttctccctcttcctcctcctcgtcttcttcttcctcctcctcctcctcgtcttcttcttcttcctcctcctcttctccctcttcctcctcctcctcctcttctccctcttcctcctcctcgtcttcttcttcctcctcctcctcctcgtcttcttcttcttcctcctcctctttttcttctttgtttgtcttcctccctcttcttctttggtagtgctaaagatctagcccatagctacatgggcatacaca

SEQ ID NO: 25520 - DNA, 3362 bp, Mus musculus
tggcttcatttcatctcagtatctctctcatcctggtcctaggagtcttccagtcgcacggaaaggcgctgtgtccagtgctctgtatatggcttggttagaagctctctcgaaggacctgccaccagtcctcctggttcgtgggaatcatcagagcgtccttaccttctactcataactgttctgcaccatggacttcctctaaggatggcacttcagtgcccagtcaaagtgactgtatcgtcaggaacaccacagcatcgcagtggcagacggggactgcttcactacttcattattggaaagcacatggaaagttgccccattgatagatagatggagacttcagttgtagtctactccagatctcaatcttaatgactgctaattctttcttgttggactgaagttcatgagagtaaaattttcctttgctacttgaaagcaataagagtgagttattttttgattgctgaaaggagtgcaaagcctttagccttgaggtgccttctgaaataaccaaatttcatccagagacctgtcgtcttttgtaaatttctagaatgttaaactctgccttcagatgttattcttgtttttaatctctgttatcctaagtggacactgcttttctcctcccaccgaccagttagtgttgagaactgtgtgttttgtattacttttgtaaaagtatctgttagatactgaagaggattaggacaagctaataaaatatgtggggaaagtatccaaaaaatggagcccaaggttaggtttatatgaatatatatatatacatatatagagggagagctaggaaaaagaggcccagaccaactttcggttagaattatgaattatttcttttaaatcatagagatgactgatgatctacccagtaattcttgtataatgcttttaaaaaagaatcatgttttttttttaaacaaaaccgtgagatcatttgtattatttttaaaagatctcttgatttagaattttctctcaaatgtgagggacttttatgacatgctaacatattttttttagaggaaatttagacaaagcagtgccatttaatagaacatttcaataaacactatggggatttcactgtcctatgccatcctttatttaaaaaaaaaagattaaaattttaccaatggttaaaaggagcactgtttccttagtgaaatggttttaggcttcatttattcaagtatcaagtacagttagttttaatacactcaggattgaacagattgttctgaacattgaaacttaatccattcttaatactttaaaacttgtgttaaagaaaactgccagtttgtgcgtttgaccttgtctgctaatgcactcgacagcgtgcatgtgcacatgtgctgcctgaaagctttatatgcagacagacagcgcgcatgtgcacacgtgctatcctgaaagctttatatacagttgtcagtgtgatgtttctcagcttcaaggaaggattttctaaaaacatttcaagggattcatatctacatgtctgtatgtgtgtatgttatacatacacaggtgcatatgtgtatatgtaatgaaatttatgttgccagtgtttcagattttaaagtgatcacgatttggtagattacagatatttttttgttgttgttttagttttttctttttctttttttaagtaaacagtcaagtcaggtcaagcaagacgttaaagatttcacggaggacagagacaatttgaagaccatagtgtgacttcatacagttatccagttaggtaaagggctaacaagtggatgatctctaagtttcggtggagaacggtcccagatttttgtcatcttaagggaaatgtcagaaaagcgttctcagttgtggggtacttgtgctgcgcggatgcagactgggtcagtaccagccggatatctactcatttccattcagaatattaagaaaacaggttaaatgatttttaaaaaaagttttatttacattataatacaatattttccatttgttgtaaattttgcagagtttagggcagtataaaagagtcccaccaggaaaccataccatgcgtgaatttgctgaatggaagctagggcgtgggccgagcgctgctatcttgaaatgtgcacaggtagacttgcctgccttttacttttaaagcttccccccccccccattcaggaaacttcactgtgacctgtatgacagaaactaatatcatacatgttacacgtgtgtttaaaggacacacagtgaatctcgatgcacctaacagggagggagggtgatactgtttgtgatgtgatgttagcagcaggtttccacctttaaaaactaccattacggtggctaacactggctgcctggtcaaacagtctcaaggttgcagtcgtactctataaagtgaaaattctcaaccattagttcttagagatgctagctagcattaaagctatttttattttatgccgacttttgattattttgatgccaaattattttttagtcctaatcgttgataataacttaaaaataattatgcagtggcctttgagctcattattatgataggtaaaacatccggtgggttcaaaggggacattggtgttgattattaacaggtaactaaatcagatatttatttgttgcgtctttctctttgtgcttttaagttttcctctctactttttttcatattgctttctgacgtgtgtatgtgtgtgtgtgtgtattttttttaagactatggaaataatttaaagagttgagctctggtgattatctgctaagtttgaaatgtaatattttgataatactgtactgttcctgtgacagacgcctttgtaatgttttaaccctgagcattgcggttgctgctttgtacagaagttactgcaataaaggaagtggagtcatcacaagtttaatacttactcttgcctttacctgtcatgtcacttaggtgcctgtgtctgaagtggccgcggtgaagtggagcgaactggtttccacctctagtctcccgatggctgactgttacttctggctttttactaaactgttcagggcactgcttgtagcctttctagttcctagtctggggccaggcttctcagggggaaactaaaggattaaaagggactcatgttccttaagtttattttttcgctcctgggattttttgtttgtttgcttgtttatcttggtaagctgatttgcagtttacaaagcattttcccttgctcatttgggacccttcagtgtgttacacgtgcttttactcttaagaaagcaacttagagcagttacaaagtttgctaaaggttatagaagttgctaaagacatt

SEQ ID NO: 25521 - DNA, 2993 bp, Mus musculus
ccccggagtcgggtctgctttctaaagtgtaggagacttgaaggatcagggtcctccttccctccaggcgatgagactgcaaaccacacaagcccttgtctccactagaactactatgtcaagtcaacagctccttctttgcggctcttagtaacccttacctggctagaccgttgtgtacaagtgtttagttccaatgtcgaggcttcaggtgctgcttctcttcttcttaacgagcttttagttattaagacaaattaccatggaggtgcctgtctcgtctatactgcatactctgaccatatctttccaaagtgcaccctctggtgaagtattcttaaattgtgcactttaatgggagaaaaacaaaaaaaaacaaacaaacaaacaaaaaaacccacgtaccacaatgatttgacctttcttttgttgtgaagcatcccttgtcatgtcagtgtatacccagtgattttgcttctcaggctgactggccaatgactcctgggtgagaattgagaaccaggactctggctcgtgtatctcctcctctctcagtgttggagtcgctgactgagtgaggtgcattggcttaaggagcgcaaattatcttcaatattgtgtatctgtcttgattgcattaattttcttattcctgttacggtctttgtggatgctcttcctatggataacagtctatgttaacatttttcttccactgaatgttttccttgctccttggttattttaaacttgtaaacagatgggagtggtttgcagtgctgggtcattgacagaggtttgcccaaacatacagtctttttgagtgcatcttttactatacacaggaattggtggagaaagaaacactaggtaaaatgtacccatattcccctccaaacattgttatggctgacatcatcaaccagactcataggggtaatactgtggtcattgttaaccaatcaataaacttatttccatttcatactgataattactcaaacatctttttaatgtctgttgtgatatgtggaactatgtggaacattactctctttgtataaaattaaagaaaatgtataatgtgggtgaaattgttttgttttccatgactccatgaatattagtcaatgaattgtaatgagttctcaaaggtaacagatttgctgtttgtttaaaatcattggaaccttcaaaggaggggaatcctctgcaggcccagactgatagcgttcctgcagggttttcctgttagcactgtagaaatgtgttctgttatttgagccttggtaaggcaccattgcctagtgttcttcttggtgtgctcagttgttctcagcctctgggctgtgaccacagatatatcacatatcagatatatcacatatcagatatatcacatatcagatatttgcattaaaattcatgacagtagcaaaattacagttatgaagtagcaacaaaaataattttatggctagggagtcaccacaaatgaggaacggaattaaagggttgcagcattaggaaggttgagagctgctgcctagaagatgagtccagaaagaagcatcatattgttatccacgttttaaaataatttctaataaatgtaagctagtgtttttcaaacttttattatctggagtgcttgctaaaatactgagtttagcttcttcctctcccttcgttaaaaataaaaaggcattaccactggcaatgcaaggaattaatgtaggaaggtttccctcccttgtacccatgcctcttccacagctgaagccatctctggggcctccgattagtgtcctctggctgcccaaacaaaactccttagacaccatgtctcaagacaacagactgtttcatctcaattctgtagggttctagggctttctgtgtgctgagatcaaagcttgtattgcaaggcaatgatcttttctggggccctgtataagggatgacttatatcctgcagttctctggttctagaatctgctcctgtgggactttttgtttgtttggttttggtttatttgtttgttttgtcccattacttccatcttctcaggcaacaagtgcgggtccttaggtcccttcttagcctggcctaagatctcatgtgatttaaggtttctaattagcaaccgtattccacctgcagccttaacaccctttggccatgtatctctgttccaggatctagggattaaggcatgggcatcttcacacagacaccagctagtgagtgtgaattgaattaaattgtatcaggtccaggaatgtaaatacatggacgctcagaataattgtgaactctgccttctcttttctgttttgtgaaccatggcaagaagatggcaaggcttttactctatgattattggaaaactgaactgattgtaatactttgaagtggaagtgtccatgactttgtaggataatgaaattcctttcattgacataaataaagaacttcagaatgtaaacaagaagggtcctgtgtattgaatctcaacggggctggaagcagcaggaggctcctaacagaaatgctcaacatctgtgcaaacttaatctaaagttaaactggtaacttactccagccagggaactgatagtttatgatgtccattgaaatggcatatttctcgacttcagtggattgattttactctttcaaaattatttgggcaagtatgactttacagctagggagagagagataaaggccccagtcagaggttcgttttgtttctgtaactttggactttagagatgcagtgtttagggaacagagatagctttcctaaagccacacggtaagaggagaacctgactccatgttccgtgcttttcacttcgtcactgacactgcgagtcgttactcagcaatgctagaggtgatcagagagcggagaacaacagacatggagtgggaattttgctttcgttacgaaagcacagaaataagaatgcgctttcattccaat

SEQ ID NO: 25522 - DNA, 1223 bp, Mus musculus
cacacaaaaccggtctagtctgaatgggtttattgtccatagttgccaggttgcgctccaggatgtactggataggagcaagtcattatcagtggattgataaggccagtaacatttccagtctttaaagcagataaatatgtagctttgtaatgagttccttctaacattaatttaaggctgatgagatgacccagaggataaaggaacttaccttgatgatatgagttcaattccaggaacctacactataaacagagaatagacttctgcaagttgctttctgatagcctatatgacatcctgcttggcatatactctgtctgtctgtctgtctatttatctacttctctcttgatatgataaaactaaaattaaatcaagttcctttggcaggttcaaataccttaaatttaatctaaatttaatttgagattataaaaaacaagaatggtattagcatagaacaaacattcttcctagaagagtatgtcagctagcttttataacaatttgatacaaggtacaatcactggaaagtaggaagccctgtctgagaaaatgcctctgttaaaaactggctggggctggagagatggctcagccgttaaaggctaggctcacaaccaaaaatataagagttcggttcccagcacccacaatttatgaaattcctagccaaatggatggacctggagggcatcatcctgagtgaggtaacacattcacaaaggaactcacacaatatgtactcactgataagtggatattagcccaaaacctaggatacccaagatataagatacaatttcctaaacacatgaaactcaagaaaaatgaagactgaagtgtggacactaggcccctccttagaagtgggaacaaaacacccttggaaggagttacagagacaaagtttggagctgagatgaaaggatggaccatgtagagactgccttatccagggatccaccccataatcagcatccaaaccctgacaccattgcatacactagcaagattttaacgaaaggacccagatgtagctgtctcttgtgagactatgccggggcctagcaaacacagaagtggatgcccacagtcagctaatggatggatcacagggctcccaatggaggagctagagaaagtacccaaggagctaaagggatctgcaaccctataggtggatcaacattatgaactaaccagtaccccggagc

SEQ ID NO: 25523 - DNA, 1161 bp, Mus musculus
atacacagcataagccaaactagatggttggtcacagcttgacctttgtcgtcttaatcaattcatttggaagctttgaagtatcatacagtcaagtcttgacacagctgacacataaaccttgatgatagggaacagaaaataccagaaaggaaaaaaaatggaattaaagaaaaggaaaaaaaaaagcagacaggtaattgctaagttggaaacagtacaggtgtttttgtctcctccccccacccccaaacactcccctcctcccagatcagtgaggtctgtctgaccttttggtgcggtatagcatattttaataatgagtttcactcctttcttgtttcctcataggtggactcacattattgtcccagctgcttagaaaacatgccgtcagctgaagccaaattaaaaaagaataggtaagaacaggatgaatttttgtgttttccatttcttgttggttttgaggatattttttattggatattttctttatttacatttcaaatgttaccccctttccaggtcttccctctagaaaccccctatctcatcccccctctccctgcctctatgagtttactccccaacccatccacccactcccaccttccagccctggcattcccctacactggggtggttttgaggattttggggccgaaacagggtcttattccatggaccagactgacctcatattctgatctcccccagcctaagtgctggggttacaccacagttgttttaagaatcggttaaggaaacacacaggatcaaacactcctttttttcatgtttgagcatcaccattgcctaagataactttgatcttattttttaatataatgtctattttagaaggcttctagattaagaattattttgaaattagcacagtcctcttccctattgttaaaaaacagtattgtattagtcacgtcgccataggcttcttgtgattggccctggttcttagactttcactggtcttgatgactgcattagtctgcatagtctgcctcttttctctatttagtcactactcatggatatctattttacacagcaggggcaatagtgctttattttgttgcttttctcccttgagcgttctatcccagagccaccgggatagaatgtacccttttcatgtac

SEQ ID NO: 25524 - DNA, 1216 bp, Mus musculus
gcacaacattgccactcaggggctctgaggaagaaagggcgctctaaagtcccagtaaatgaatcctgggataagtaccatttcccttgctttgtagtttccatggtagctgaatgtgttcagatgtgggcagagagcacagctatgcttccccacatgtcttcagaggatcggcgggcctaaaacaagctgtcatgaacatagctgcttaccactatagcagtactaagagccttatgtctgatcccttcccactctgtggggaacacgcacatgggtgaactggagtgaccaatggagtccccatcagtgtgttcattttgtatctttttgggcgggaggcaaaagttgacctgcggtttaaaaaaagtattttgaccatttttatgtctatttggtattttcttttatatcatctaaaaaaaatttagtactaatcattgtagtggcataaaagtgatttaactaatttgaagtcataccctcagagagggtacctaagatgatatgcttttaaggaacttcctgtgaaatactttgacaaactgaaaagaagagccttagagtccatttgactgggagactgtctgcctgcctgcagctgggactggagcatccacatcacctgtgtctgcagtggctcactcgctgcctctgggcaggagactgttcagtcttagaaagtttggatttaactgaattgtagatggtaagggaaatttgatgttgtattgtattttttgtttttaattaaaacgggtcaattttccaaatgttgctggacttatgtttctttttaccctttggtattaaatgtgaaataagtaaaagcatattatataaatgggaatttttttcaattttttaagactggattattttttgttgagtaggggtggctatgcaatttgaggtaaaatcttcatatatagcttgttagtctttttttttataagcccttgaatactggcattctaaatctttccatgatggtaaaaatacccattgactaccaagaagttgatagtatggttgaaataagaacagacaggaagctgatggtggtaacccacacctttaatctcagcacttgggaggtagaaactggtgggtctctgagtttggagccaaccagagctacatatcgagaccctgtctttaaaagagagagagagagagaacagcatttatgcattcatagagcctcatctgtggc

SEQ ID NO: 25525 - DNA, 1272 bp, Mus musculus
ccctaagaggtagggccttttaccagaccagccagtgccacagccaagacagtagtcctgtcccactaacagccattgtctagtctgtacctaaagttgtctcccagcccccattctaccccattattttagtattggtattggatccaatcagggcaagaacattgtatgttattaaaaagtttctttgaaagctaaaaagttttccctctgcccaactcattaaaaaaaaaaaaaaagtttggtttttgtttgtttgagacaaggtctcattatatagccctggctagcctggaatttgttatgtagaccaggttagccctggaactcatagagatccacttaactctcaaaagctgagattaaatgtctgcacttaccaggcccagttcaaaatggtattttgtttgtgtttttgagacatggtctcatcatgtaaatctggctgtcctggagaatgttatgtgaaccaggctggctttgaactcagagatccatctgcctctgcctcctgagttctgtgattaaatgtgtgtgccacttctcccatcccccaaatggtattctttttaaggccagagggtatgtcgtcgtctagaagtcccacattccagatctgattgtttcctcctgtagctagcccacaggctttcaagggtcattttccttcttgtgtggatgtggcatttcctcttgcctgtagtgagcctcctcccacagccccccaagtgagggccaaaccagcttgggggaggggaaggggctccccaaagaggcaacatcacatgggtaggggttgagggctctgtgggatgggatggtcctgctggactgaccctggagggccaggctaggcacagcttagaggagcccggctgccccatgctaagcacagcattggtctttctccatctcttccctcttctgtctgtgttttggtttccctgcttctgttctgtggtcctggggtcttcattctctagatggtcagtgtgcactggaacagagatgagacctcaagctatgacagggaaggcctaggagaaaggcgtcctctaggcggaggcctgagaagagcaccgggtgcagcaggcggtcacgtgacggtcttcctccataaatgagatggaggcttcagcaggggtttcacatccacgcaagaggcagctgtgctctgtgtgatctgaggctaggagtctgcctcctccccttccacccccaggccttccatgcagtgctggggttagggttgtctggctgtgggcttgatat

SEQ ID NO: 25526 - DNA, 1825 bp, Mus musculus
cagagtttataccctgggtgctggggtcgcactgtgttttatatatatatatatatatatgaaatgtgtatatatatattatatattttttttggttgggtttgtttttaattcagtcatatacaatgatggcaagcccgagcctcaaagaatgtcgtatcttaatgctagagaatgaggtggaaaggaaggtgagtgtctatgagcacccaggcctcagggcgaagtcttgaagggtccttcttccctcttctgcagagggaccagagatgctaagatggaaaggaagaccagctctcccaaaatagtatggctttacaaagcctagtggccgtggggtgtttgggccacagggaaaggctggcccggggtgggacacctggggccctgagctggcctctccctcccctgtcacatggtgctaggttggggtctgctttggagtggggtgcccacagggacccacagaactgtctccagtccctgaagacacagggtctttggctggtttctgtttggattctgtttctgtcccccttttaacaatgtgaagtgactgaggttggatttcctcttcctgctaccccaagcccccacatctctttaactgccagtccagtgtccaccagccatttgttctgacatcctggccatgcaagggtcccaagacgggcacaaagtgggtccaggcatgggaggtggccttggtcaatgtcacagagctgttggaagcagtgccaagagctaaattcaggcccctgattctgagccccgtgctcttccagtaccacactgcctctgagcctgccttcgggaccctactgtgttccaggtcccgtctgtccctcagtcacatagctgtggtcattccaggacatggggacaaaccactctttcccagccaggtgcctttgagccttcccttccaagacctgcacttttcccgctgtgttctcttgtttccagagtccatccatcttactagctggggtcgtcttcattatgagctattccttcctggagttctccactgtggtggagagtgtgggatgctcagagggacctgcgtgcatggttttggtgtgcagagagccatgtcacatcatgtttctcactggggtcttggaacctgtggatcccagtccctatgtgatatgctcaaatgccctgtcaacaagctagaaccagactcagggttaggtcagtgtgcatgcccttagccacacttcccacctgtcagtgaggatggctcctatattctgaaagctactctgagaccctgtgagagctgagttagatggttggagtggcctttagatagcatgcagctctgttagtctctgcttctggtctccattgaaagcaagcaggtttgagaccctggcagagcaggggagtggttctctctggtccatttccctctaagaccctggaaactgctgctgtgtccctttcagtgctgggcctagaggctgccacaagttgcagatgtggggtcttgggaagtagatacgttcatcttagtatctctcaatgacaatgtccactgattgactggaaacgtttggaaaaacacaaaaacaagttggaaggaaattacttctgttgttcaggccacaccctgtcccttcttcagtctctaccaacagcgtttgccttatgggtgcagctcaccggcagctgcctcattcattccaggttctagagctttctatggggcgggtacctcggtgcgcatagggaatgaggacgaagctaaaatggacctttcaaaccccgatgtatgagcaatgggtgcttgtgagtctgctcatttccagaggag

SEQ ID NO: 25527 - DNA, 2676 bp, Mus musculus
aatggcgccacgcaaggggaaggaaaagaaggaagagcaggtcatcagcctgggacctcaggtggctgagggagagaatgtgtttggtgtctgccacatctttgcatccttcaatgacacctttgtccatgttaccgatctttctggcaagtgagtatttctgcagaaaggcataaaactggcctcagggggaccagttgatgggatttgccctaaagaattactgttttacttaatttcccactaattataagaaaacactgtgttttacggagctgaggataaacttgaacttaggatgctcctgtctctgcccccttgctgggattttatcaaccagagcttgctgactcaaaggagtttagctatgtaggggtctttgaaccccataaacacaacttacagctgtcttgttcagacccagcatatatatatatgcttaagatgctgttagactgctcattggggttcagtaagtgttctgtgtacccttgttgaaaaatgacacggttctgcctttgtccccagggaaaccatctgccgagtgactggtgggatgaaggtgaaggctgaccgagatgagtcctctccatatgcagccatgttggctgcccaggatgtggcccagaggtgcaaggagttgggcatcactgccctgcacatcaaactccgggccacaggaggaaacaggtacagaagatggggggtggatttgcgatctcatctggtctgtctgaggcatgtatgtatgttcctagttagggatagcagggaatagattaggaggagctagggtttggggctagcctgggctaaacagtgagttcctcctcaaaaaaatgggtaatgtgttcctttgtgtttattgaataaccacggcttacccaggtagtaagcaagactgagatagccttgggtggcacctcactttgcaggaaactcgggcttttaatcaacatgcaggaggttacatggtttcagtctgtggtaaatactaggaagtatggagttggtggtaggggtgacttaaatgggggcctgggatcccagcatgtttctgccctgtcccctcccccctaccaccaccaaaataaaggtagaaaaaaaattacatgagtgtgtgtaccatgtgcatacctggggtcaaaaagggcaatgaatctcttggcactggtgttgcagatggttgtaagccaccgtgtgggcagtaagaagagtccaggcccactgctaagatggcagtactattaagccgtctctttgccctcatttagcaattttgaaaaggattttgtgttgtgaagttggagatttaagtatggctccctcaagtatttaactgttggcttctccatttagaagtgaattaaaattaagttgctgactaggccaacaatccttcattttctaggaccaagacccctggacctggagcccagtcagccctcagagctcttgctcgctctgggatgaagattgggcggattggtaagtgtcccctctggttacacttggggttgctttcaagcattgaccccttccaaaccctgcaatgtgcctaatgggtcagctttgtctggttacttttgtaaggagtacgtaaaaggcattatgagaggcgtatctctgtagtggatacaatttttccctatgttggggtaacttaatgttccgactctgatttcagagccttctgtggcttaccaggtgactccactgattgccctcagtctctgctgaccttcataacagtggctcctgtcacgtggtgtaaagagcaaacagccacacttgctcactgtagggtctcttctactacagtcggtaggctctgagttaaactcggtgtttttcacctttgattgtccaccttctcagagcctgtgtccacttccaaatggggttgggatgagaaattggcaggtggggcaccccgtgattgctgaccattggagatacatttgggggaaaataaagtctactgctagttagacttgtggctacaatgatatttttttttttctcacagaggatgtcacccccattccctctgatagcactcgaagaaaagggggtcgtcgtggtcgccgtctgtgaacaggacttctcattattttctgttaataaattgctttgtgtaagctattttggttctggtgttgtgttttatgcactttgatgtttcacctgcatgtatgtgagggcctggaactctggagttagagacagttgtgagctgtcaatgtgggtgctgggaattgaaccagggtcttcctgctaatccatctctccaggtgtttttcttcattactgtttttttttttttttttggttttttttttttggttttttgagacagggtttctctgtgtagccctggctgtcgtggaactcactttgtagaccaggctggcctcgaactcagaaatccgcctgcctctgcctcctgagtgctgggattaaaggcgtgggccaccacgcccagctctccaggtgtttttttgtttgttttttttttaacgttaaaatcctaggatgtttattacaaaggtaaaccctgatccttgagatgagcttatcggtaggatttctggtatcgggcacgggcaccaggacctccaaactttggattcgcagtgacgggggtcagctacaagcagggtctgatcgtattgg

SEQ ID NO: 25528 - DNA, 1177 bp, Mus musculus
actaaagaaactagttcagtataactggggtctgcatgctgagccacatctcagggaggatgctgtcagggtctctgggggaagggacaatgagactccagggaaatcatacagtcacactgttacaggaaatgctttttagaattccccactcagcaggtggccatctgatgtcactagaagaaaggctaaattagacattccagctctcgccttgcttccttcccatgtggctgtgtggcctgggcgctcctcttctcccctctggacttaaggctttcctgttaggccagtggagtgggtggatactgcttagcttggggtcactgtgaaggtcagctgggctctaagagctctgaagtgctgtgctgtgctgggtgtctggctgttatggggtgggagtgggcctagaagaccccaactccttgaagtttgcattacaaagcccctccctcacccatttcctctccccttcccctgaccaagcctttaatcagaggcgggatgtttctgtttttggttttcaaggcgattaaatcccctccagtttctgtcaaccgtaacagtagtccagctgtcccagctcctaccccagaaggagtccaggctgtgaacaccacaaagaaggcctcaggcaccactgcccagagctcctcctctgagagtgaggacggggacgaggacttgattcctgccacacaaccctccacctatggtaagcgctgctgcagtgggtgctgttcggccaggacgggccccagccacgcatgccctccccactgaggccagaaggcactaaccaggtggcctagcagaggcattggcgaggactggggactcagccttaggcactgtattgttcccttaatgaggaaagctcgtctgcctcattttgaaggaattacattcgaggcttctgtgtgctggctccaagcctgaaagccagagggagcattctggtggctacaggaaccaggctagtctaaaccagagctctgctatagccacctggccgtggggtacactattagcctggcagtgagcttccatccccttagcatagaaaaaggagacaggtaacattttatacttattctcttcccagaacctaaggtgactgagtgtctttgtatgtggcgaggccctctggtagcgcaatcatcttcagttatatatc

SEQ ID NO: 25529 - DNA, 1236 bp, Mus musculus
cacagtttcctgcctctgccccctctgtgggtgaggggtacagagtgggccaaagatctcacccactgagccagtccagagcagcgattacctatcaagtcaaacccagtaaacgagctacatgaccttgagcaacgtttgtgacctcctagaataacatcatctgtaaagtgaactctatcatcacgtattgggaagaagttcaaacacagtgatctatttgataacagtcctaaaactggccagtgagatctgtcctggcactggtcctcagatactacattcttgatgttacagagaacaagcaagaagggggggaaaaaaaatccctgttcttgtgaaattcacattctgttgggggatggggtgggggggtggaacaaacttatacctgtaataaagcctcttctaacagcttcctggcaggtggccttcctaggaagaaggaacctgggtaacacagcccaaactgtggacagcagtgtcaaacccagctaggaagaatggggcttaatgacttcctgccggtagaagggtggaatcaaagttcaagggactaagctgtctgaagacttacagcacgcgtgcgcgcacacacacacacacacacacacacacacactccccactctgcttccttccagactccagttcgatggtggttcctttctctaggtgtgtgccagatactgggtgggatgctgtatgctctctgggggcctgtttgtatagtagtggagtcgtccagaaatcaaccagagaaggaaacgaaactgaacgccagggcggagtgctggggggaggggggaaggggtgtcagcaaagatgcttcacgccaaactcgagagtaacgagagtaacggaggctccttcctctttgatgactctagcttgtgtcaagttaactggcaaaaccagtcagagctgggcgtggtggcgcacgcctttaatcccagcactcgggaggcagaggcaggcggatttctgagttcgaggccagcctggtctacaaagtgagtgccaggacagccagggctacacagagaaaacctgtctcgaaaaacaaaaaaaaaaaaaaaaaaacccagtcaggacagcaccacaagagaaggacgcagttctagggtcgggagaacctggatggttctgtgcagcctatgggctgtggccagtcagccgatagtagtgagtgagctgctgccgtcctgtcacctcgtcggctgcttgggaccctga

SEQ ID NO: 25530 - DNA, 1099 bp, Mus musculus
cagcccagcccccactcaccaccttctaggcacattattctcatcacctctctcaacttggccaagcaagagtgccagaaacttattttcctacttcatgctgaacttggcctggtgtgcgctctattgtgcttgcctgcctccctggccttcctcgactcccctgccccgacatacacacacacacacacacacacacacacacgcacacgcacacgcgcgcacacacacacatgcacacgcacatgcacacactcacaccacttccttccaccacttccttcctcccccctctccctccctttctctttctcttctctccctcttcctgggtttggctcttgtatggaatgctgtatctcattcacggggatctcctgtctgcactgttttctttgcatgactttatatgcagtaagtatgttgaaaaacaaacaaaaaacaaaaaaggagaaaaacactcaacaaaatcaaacgacacgtttttttttggacaaaaaataataacattcaaggtaatagtctcagtgtccaacttggacttacgttgctgcctctccgtgcttttggtctctctgtggctatgttttgccagcatgagaccctgttccctctggaagttgctaggggaggaagagccatgcgtccaggggtttggagacagctttatcctctcggcttttctgagggtcgatgggagcagaagtggaagggatgtttaatccagaactttctggtattcccctttcgcctacatgtgagctatatcccgggctcttctctcaaatcctgctgcccagggacaagtacagggtagaagagtggctctcttgtctaagccgctccactgtagcctctgcccttggtagagacactgctacccaggcccaagaatgggcccttgtcctgccccagaaccaggcttcttcataaggctcagcaaacccattgtccccagccactccccagataaaggtaaaggagggtgtggcctttaccaggggacactgcaatctccatgcaggatctacaatcccttcttcaagcctcagtttctccatcaatgttcctacccagactgatggagggtcagagtaaa

SEQ ID NO: 25531 - DNA, 1173 bp, Mus musculus
cccatcgcctttgacaatgccacccactattacctctacaaccgcctcatggacttcctcaccagccgagagattgtcaacaggcagatccatgacattgtgcagagctgccagcctggcgaggtggtcattcgcgacaccctctatcgccttggggttgcccagatcaagacggaggcccaggaggaaggagaggaagaggaagtagcctcagtggtggaataagccaggtttttatgtacagggcctgcatcatctctctcaagccataatctggcccttgcccagggcagtcctattgagggacctgcagtcctctttagggagggcctctgactgctggaactgaccaaagagcttccatttcatgagcacagtggggcctcgacctctggggctcaggagaggcgctgggaagcctctccttgacctgagagagcacgtggaggcaggacatgatgttcttaaggatctggtgctgataggaaggccggggcctggttgcccagacccacaaccacccgggttcctgcaccaggtggagccgccattgagctaagctgtcccgcggggaggagctctggctcctgtcttgtgggcttcctagcctgccttgctggcttatttactcttggaatcccttggggcccttcattctccctaaaggaggggtgcattctctgttcctccaactctccctgttcccacaccttggggcagttgaggagaaggaacagctcctccaggactctctcagccccgggtttgggggaagagaatccttcctcctttctctggccactgctactataccctacgtcctctgggtcctcagaccctcaccacagaggggatgtggcccgtggttgtgacatagctgacaagcagtaggaaaactcccttctgtgaaggggaagcagatagggccataagcaaacagcagcatgggctcaggtgcccgcggtttgcttagggcccaggattggccaagtgctatttaatttattgagagggtgggataggtggctttccctctcgttcttcccccaacaagaataaagtttattaaattatctggttttgatgaagcaagagcctgttcaatgctgtgtcccttggctctggaagtgggtgcttgttggtcccttgtcaggaggaataggtggaaggagg

SEQ ID NO: 25532 - DNA, 1128 bp, Mus musculus
ttctgacataatgagcaggtatgggttagtttgactttttgaagttagtgacttatgtgtaagtcattcctgttgtctcacccagaagaatctgggactgaggtttgctttaatggagtgaagagagtgaacttgagcacattgggacaaactgaacctcatagaaaagctcccacggcaaaccacgtggtgcgacagaggtcagctcaggcacgttgggaaggggtttgtctaccaactcctgcggtgtccagtgcttgagtgagaagatcctgaggccggggccttagataaagtcacttttacactcgtaatcttaactcttctcgctgggctcatttccttagttattacccatgtgtttttaaaaagggaatcaaaagagaatatttgtcagctacaaaatgcctttatgcatacaagctcttttatttttttctaggaaaagccagccaaagtcaaagtggaattggcttcgggtgtctcctccaaaggttctgtgattaaaagaaatcagcagtctgtcaccactgagcaaaacccctctaaggaaaatgcttcaaaactgactctggagaactcagaagctgtaagccagctcttaaacgtggctcctccaggagaagggggtgaggacagagagtgggaggaagtgattgtctccgatgctcatgttttggtcaaggaagttcctgggaatcgtggtacagcggtaactaagatgcctgttgtcaagagtggtgcccaggctgagatctctctggggacaactgagaatgacagtcctggaccggacatactgccatcggctgaggggaccagctcctccagtttactccaagctcacaaaaagtctccagggtaggcatgcgagtgtaattacctgttatggggactatgtttagaacagcagctaagcagaggcccacgtttgctctgttagggatccttacagcagtcccgagaggggcagcagagcccagagaggctcagcaccactgcctagagacacagcatggtctactgactgctccgccatccgggccttgtacatcttttcttgttagtcttccgaacagtagtcttcagctagtcttcctagcagtagctcagatcttactgggacag

SEQ ID NO: 25533 - DNA, 1719 bp, Mus musculus
atatttataaaagttatcttgctcactttgaacattagagtgtaaaatatttcctggttgtttgcagagaagtagaaccctgaatgctgttaaatgactatcgtttatttaaaatacagagtgtacatgtctgtgtattttatgacaaggtcttatatagcacaggctggcctcaaatacgctaagtagccaaggatgattgtaaactgttggtctccctgcttctgcctccaggtgctggagttaacaggtcctagggatggagtaagctagtgagtatacagacctgctatgaaaggaacacagttcaggggagtgaaaggttagatcaccaagatctgtactgtccagaaaggaagagacctggctggatctagatcctggtaaaccccacagtaagatcagagttcaggagcttgcctccaagagcagtgttagaagtaggtcctgtttctagatggggagagtcccaggttcaccacagctccaaagagctcagaagcatatgctcacgttgtagccaaagtctgggtgagcctactcaggagtactgtcctccctgtgagccgagtggctgtagtgctgtgctcaggagtactgtcctccctgtgagccgagtggctgtagtgtctcggacagaagaagactggcaggtgccgagttcattctaagcagggtcaatgggacaggtatgatttatataaagtctttcagcacagtgagtggtgaactttgagactgcctgaagtgatagatgaattcatcagactaatgcttctggctacattgtagcaaaaccagtgagcctctgcagggatgtttctggcagcttgacatttaagaacatgttaccaggattaactcctaagctgcaaaggacagaaaagagtaggtttggggactaatgcctcttcatttacggcgacggctcgagctctccacaacacccatccagccacccacacacaccggtgagtgtcctcacttctgagttctcaaggaggtgctgtagggatagctgaagactctttgcatggaagtgaacccttccgcatagccccaatgtctgggagtctggtgtccaggagaacttagaagtgctttatggagagtacttgagctgagggcaaatggaggcctgaggtggaggagtgtcactctggtatgtgcaggcaagactgaatctccagaaaagtagaattctccaggtgagaagctttacagttttgcctaatttttttgttctttagtgctcttcttggactcttaattctggtggtgttttaatttgaacttgggctttaaattaagttgaagagaggatgaatttcgccgggcgtggtggtgcacgcctttaatcctagtactcgggagacagaggcaggcggatttctgagttcgaggccagcctggtctacaaagtgagttccaggacagccaggactacacagagaaaccctgtctcgaaaaaaaacaaaacaaaacaaacaaaaaaaaaaaaaagaaaggatgaatttctacttagactcaaaatgggcacagtggcctgtgaggcacttgacttggaggctggggcaggaaaagactttgaggccaacctgagatagctgttgagaccttgccaaaagaagagaaaagaaaactagctagctgttggagacccatttgtcttccaactcatttatacacacacacacacacacacacatatatatatat

SEQ ID NO: 25534 - DNA, 1113 bp, Mus musculus
caattttaatccagaaatgaatattagcttcaaataagtctatagtggttgaaactgtcttggttaagttaatatacttaaacttataaacatgcttatatagcatatctaagtaagttgtatataaaaggcttttttttcctatgagtttccactgtgtatcagcaagtttaaaataggcacacttcaatgaagagtcaatttttgttttttgagtatgtgtcatgagtcaaagcaggtggcaccagtaactttgacttcctctgaaaattaggacaaccatgtttaactctcaaaatgagattgaatgtgtaagggcatgagagttttcttaatttcaagaggataatatataagaaagaataagcttcaaactagactctagaagcactcagttgcttccattggtcagtgtcttaattagaggtgtctgttgttatgacaaagcatcctgaccaaaagcaactttgggagtttagcttagaattccatagcacaaccgaggggagtcggggtaggaacttggaggcaaaatcaagccatggaggattgctgctgcttggttgctcaaaatgctttacaacagcacctaggaccacctaggtgggacttcaaggacctgcaccacaggcttgcccacagctagtctagtgggagcattttacagattgagattccctcttccatatgactctgtcatatgtaaaagctgacataaaacttgccagcattcaaattcaagggacagataccattaaggttgtctgtttgaatccagtgaagtgagcctttctcagaccttaaccatgtataataattagccctatgacatgggtgaagagatggctcaccatctcttcttgggtaagagcatttgttgctctttgagaaaattggagctctattccaagcaccagggtggcagctcacagtcatccatacacacacgtacataaatgcagagttgatggtcttaagttggcaatcctcgtgcctctgcttcctgaatactgggactacaggtatggcccactacttaatactttcaatactgacatgagaaatagttccctcacagcctctctcaactgttaaaatattatggtcataagc

SEQ ID NO: 25535 - DNA, 1401 bp, Mus musculus
atttagtgttgtatgtttagtctcttagctcgaggctggcctggtctacagagtgagttccaggatagccagggctaagtaagaccttgtctttttaaagaaagaaaagcttctagtatctgaggaacattgaaaaataaactgacctgatgtcatcctgaccccaggagctcagttactaactttaaacttgaggccttcctttctgtgagtctgtatttggggagggtgagttggagatgtaggtggggtttggatgatgaggcctaagctaacgagcagagcggtgtgtttgggctgctctgcctctgcacctaaattgggacttagaagtaaagctacgcgtgagctcactcgcatctggcctagaacagtttctcaggcactcagcagccttcagaaagaagtatcttcatttttacctaattttattgttccaatttcctgtgtgtttcttaataaacaagcagaatttttgtcctgctttatccaggtattaaagacgagaagttggatccactgagttagtatgtttccttgaaaaagaaaagtgattaaacttaagtttaagccttcttttgtattgtaacttattcataaaaaacttgaactcttaaaccagttgaacatcattggacacagtggtcgtgcacattattacatgtacatggtcttatcatgttctgaaataagagatttatcaataaataattcgttagtattgactgcttttaaaggtacatttataaggccaggttcagtgacataattgcttatagtctcagacactgggaggcagaggcaagagaatcatttgatcttaggagttaatggcagtagacaagagttccttctcaacagtaggtgtttgcagtgggttaccaagagagggggtttttgccttaagcataatactcttgcgactaaaatatgtcattcttggaaaggcgagctaagatgttaagtgtccaccttgtaagaaatgggaactgagttaatccctagaaccagcattttaaaagccagcaagctccaatggcaaaagctacacttagaagacctgtcttggggaaagaaaactgaaggaagaaagggagggaggggccagagtgggctgggcatcgtgtgcagcacatgccctgaatcctagaaagtccatctcttgtgagcaaggtcctgtctcaaaacagcagccagcaggctgtgatgaagtgtactctaagcaaagccatgggccttgttggatagcctgagtaagcccagtcaatgagttccaggtccacagtggaagacctgattccaaagggtaaagttaagaaaatgcttctaccctaagggtggcttgaaataagcatgagaaatctagtcttagaccttctgcctctcacattatgtaggtta

SEQ ID NO: 25536 - DNA, 3163 bp, Mus musculus
gcatgtactgccttgtgaaagtttaggttggtgattttccagataaaaacacagcatttccaagtgattattgtcctacttgtacctaatttggggagtacttgtaacatcttttttctgtttcaattttttaataggtttctaagcatgaattgtggaagagaagcagcagagcagacgattggagcagcgtttgtttctccccaaacctagacattttagttcatatgtacactagccagtggttgtggacaaccatttacttggtgtaaagaacttcatttcggtataaactggctctgggtagcactgcggatcctgagctgtagccactgtccttgtgaatattaactgaggtagtgaaacatggtgtccggttttctattgcattttttttcaagtggaaaagttaactaaatggttgacacacaaattggtggagaaattgtgcatatgccaatttttattttatttttttgttaaaatcttttattttgaactatactgctttgagatctcatttcagaagaacggcatgaacagtcttcagccacagttgtgatggttgtaaatgttcacaattgtgtgttcttagggttttccatccctggggtttgcaagttgttaacttaaaacattctttaaatggctggcttcttgtttgcaagccagctgatatggtagcaaccaaagattccagtgtttgagcatttgaaagactctgcctgcttacctgtgctagaaataacagcatctaaagtgaagacttaagaaaaaaaacatagcgactactagattctctttaggactctgcattaactctataatgttcttgctattaaaaaaaagcatatttgtcacggaaatttagttaccgtcttacaactgaacatgtatgtgtgttgcttagataaatgtaatcactgtaaacatctatacgatctgggattttgtttttattttgaaatgggagctttttgtttacaagttcattaaaaactaaaaactgtttctgtaaggaagtgaaatttttttaaacaacaaaatgccttggctgactcactatgaagtgtgtgtgtgtgtgtgtgtacatatatatacatatatatgcacacatatatataccatccccagttttttgttttgttttatattttgagacagagtctcattttgtagctctagctggcctggaactttatagatcaggctggcctagaactctcagatcctcctgactctgcctctctaaagagctgggactgaaaaaaatgagccaccatgtccagctttccctaattttttgatagactacttcaagccatttgttatatgatattcctttgctgcaaaaggtttggttttgggtttttggggggggggggctgttcttgatctgaagagaaaggtattctttggctttctgtttgtagctcacaggcacactaccccgtgctacagctgtgggagctttggcattgacttctgccgccactgactagcagatgaactgatgacagtgaaagtgttaaagggtttaactatattacaaaatatgtttcttcaaaatccctgtgaaatggctgtaaggttgtcatacagtgtgaagttagtgattgttgatcctcaagccccacctctctaagtacctgtgcacgcttcccccagtctttcttggttgctcttcagttgtttctctgatccaagagaaggaaaaacttacagtaattctttaaatggtgtaatttattcatttacagcatgtcaagataaattaaaaagaaaatttgtctgaaaatgctgccaggagcctattgtgtaactaggtgttgtgtataatcttgaattgtaaattgacccatgtttggtaagattgtatcagaattgatttgtagtagttttccttttcttctcccccccccccttttttttgaaacagcaataattaactccatgattgccacattctgtcaccaagagatgtgttattaccgtaaagctgaaataatcttctgaggtggatctgatggtggggtggcagcttcatgcttgtcagtttcttgactaataaaccctttgatacttttagcgggaaatcagtctcataaagctattttgagtatagtttgtgtaaaataaaactgttcagctttggcaatagctttccaagttgaactccctctctctatctagcaggatattttttcagtgcttttatttactatgcacttagactatgcactttttctgaaatatttttgtaacacttttttgtatttttgccatttgaaaaggttgtggtgttgttggtatgtcattaagttgcaggtttgaaactgctgttagctttgtgactcagaatctagaaatgttctgtcctggtattttgtcgtcccatctacagctggagctggaatccgttgatcttctagctaccattcattttcttcacagttcacaaagaagagcgtgaaattcagtgaatgcagttactaatcctgtctggaaatgaatctcatttcaccaaatcaattgtgtttttccactaaaatgatggtgtatgttgaagacatcactctgagattggaagacctcaccactaaaggctccatccacagtggctggctcagctgaactttaggttgccattcttttctttgttcaccattgggtgatgcagctttttaactgttgggagatggccattctaactactgttgaatgtctctgttttgggaaggtaaaataagaaaataaaaaaagaatatatatgaagggagaggctggttgtctctcccatgtggttgtgaatatgctcttatgacccacaagtggacatacaaggcttatctttgctgtgatttcctctctgctttaagtctatcatactgtaaatatttcagagtgtactgtaacacgagctgaattgtgataaatcatgaactgcagagacagacggtgtagtctaagccagtaggctgttctccctggagattgctgggaataataaagaatagtttattgtaactcaactagaatgagccatgaagattgcaaaaacggccatcaaaacatctttaattttacaacatccgtgtaggtgtactaaaagtgggcctcccgactggtcttgtctgtattgcgctgagtctttctaggccaa

SEQ ID NO: 25537 - DNA, 1148 bp, Mus musculus
tcttaacaatttctcattaaataaggctgatgcgtgccttttttccccgtcataggggctgacaagttactacctctcacaacaacaaaacttgggtttttagagcattggggattggatgcaaggtctcatgaatgccaggtaagctctctacagctcccagccctggcaagctttgtttcctcgtttctgtatccgccttaggccttgtttgtatgtacatccacttatgtattatccttgtaaattctatgaacccgtatagtttaagtctcaataactgatgatgtgtaaaagatttgcccagtaaataccttaatgcgcgaataatacacaaggtaaacttgataaaggttttagcataagaggtcttatataggagaaaatgggaatgagaaattgatgtaaataaacttgcttaggaaaaatactaggtagaatttggcaaaagcagccgtctgaatctcttagcataattctgccaggcaggcaggacggcctgggttaaaggatctttccctttattaatctcttaagagatggagtgacttctccctgggaaggtctatggattctataacatcacccattctgctgcttctggagcttaaagatgtctattctaggactagactcagagacagcccttctacagactttgactggactacaaattaaactggcaccaactgggtcactagaagaaccaaaatctgttgtccacataaatacaagaatcccacaaaatctgagactgtcagaaaattggtgcttagatcccaccctcatccacaggacagggcttaggtctcctagaaactggaagagcagagaaagctataatgaataaaggtggtcttgtagacattgtctgggaggccctttgatacataaaactggaaattgtaaatatacaggtatacagattttcaacttctgtattaaaaaagagaaaaacacctctcgagttctctcatgattgcagtttcccaaaatactatcagctcaatacataccacagactattctgaggtggcatagtctagtctcagacctccagtcattttcaggagggaccctcatgagtaagtgtgtttaaatgaagccatctggctttggtccccaccatctccgccagatctaaccac

SEQ ID NO: 25538 - DNA, 1091 bp, Mus musculus
tgtccacctaaaatcatttgcagtgcacagaggaagggccatattccttgtgttcttccttggtgaactgtatgtatctcctggaagatggacagtaaggctaaggtgcacctgtccatccacacttgtactgggggagcaaggatgttgattttcatggtcctggaagccagaggagtgatctgcatcttgtaggaaccagtgcctgagttcatggggtcaccaccagacagacagcactgggttggcactgaagtctttgctgacattgacatcacacttagagatggaatggaaggtaagttcatcgtatcccacacccagaaagaaaggtggaagaacccctgggggcagcagagttggttcttgccagtaacaatgacctggccatcgggcagctcctaactcttctccagggagaaggatgcagcagcaggcatgtcttatgggaagtcccaggcaacatggcacaggttccccttgatgttaacagttggccgtggtgaggctgtagcttgctcaggagcttcatgagtagtctagaaggtcttgtccaacaggatcacataaggaaggatatagtccctgtagatgagcaatgtgggtgaccctgtctccagagtccattgggatgcaagtggtactatgaagacagcacagccttggtggctatgtgcatggctgggtgttgatgatctgggtcatctattcatgactggcttagggttcggggagcagcaccaagcgctcctacgggaccacacatgtcacatagtataaagtatggtggtgtgtcttgtcattcaagttggtgacagttaaatcctccatggatacctcagggtcaggactcttctcttgctctaggccttgttacccacccatgtaggaaacatggctaacgccaccatcacaccccaatacattgggctaccccaccatgaagcaggagacagacttggaagcatgctcacctatgaagccagctctgttagtgccagtgaaacaatatctgcctccatggcaattggtgacaggtggacccggcagcggaggatctgagagaagcctgtgcttgccaggtaaatgtg

SEQ ID NO: 25539 - DNA, 1134 bp, Mus musculus
gtggcattagttcggcaagatggctacaaacttcatggccgcaccattagacttgcgcaagtggaagtggcagtagagtctcagagaagactctgaacaggtcactggaaccaaaccttctcccagagtcaggcacctatgtctcctttatttattaagctggtttgtattatacacgagtccttcgtgtgctccgtttcggatttagtcacattggctgtatctctacagcgtcttattgggtttgtgtgacctgtttggtctcatcgggagtcctgccactaggcatttgaacaataggacacgtgtcgtggcctttatcaaaatgtttacaaaaatcatttaaattggtactctgatgattgaatccaaaatcttcttacctgtgttttcatctaactgctggaattagtgcagcaccttgtatcttatattttgggaagagggaaaaggtagggattggtttgacgtttaggtacgtagatgacgatgccttacccttgtatatgtttaagtcatgtgggctggcgtgtagagagatttcctaagactcctatctcatgcttgtagtccttgccagggtcacactcacacccctttctggtcccttttggaagggctaaagggtcaggccagccagtcttcctttcttgttggtaaggtgaatatatttattactaaactggtctcgagtctaagaacaggcaagccctggttgccgtgacaatacaactcaatcccagagagactaaaagcctccatacatctcaagttggagaaatagactttggggacttggcatgatggctgtcaattcaaaaataaaaacaaaatattaaggtggataatattttttacagtttataatttacacaaaagtaattgcctcccttgcatggactcagaatgaaccaggctatcctcctttctgggttggagaggacaagagacttcatagcagcaacaacaaaaatgaatacaatcagagtcctcgggcgcattgtaaagcagttgctgtcaccttcaccattccagtttttaaatcctgagtcaaaagcaccaagaaaaagaaatttttttgtatatttattattgacaaaaagaccaaagttctctcagttctgcatatgtttt

SEQ ID NO: 25540 - DNA, 1197 bp, Mus musculus
ttgaagggtgtaaaaagcggcaggggagagcccgctgctggaagagcccaggcaagagaggatagagtgttttattctggttctttggagagggtcttactaagcagccctgaactcgtgcttcactctctttggtgatgggactgcagtgcagggcatctcatccctaccaccatagtggagtttcagagatagcttacaacctgatgcaagtcgctgtgcgtacatctatttccttagtattttctcttgctgcttcttcttttattatttatttattttgcaatttagaatttgacttttgtgctaggtcttgatcattgatattttgcccaataaatacttgttaaatgaatgaagttggatgatgtcagtgaagatatgggtcaattttattttattttttaatatgtgtgtacatctatttatatggctacacctaggcatgcatgcagtcacaggactatttgcagtagtcaaattttgtctttaaactgtgtgggttctggggattgacttcagggcatcaggcttggtggcaagcaccctttacctgctgagccatttcgccagcccaagatgtagatgcattttcgggtcttgcttggtgtgctgttgcatgactttgatcacagcactagatctctgtcagtttgaagtcagccagatctatgtattaaattctagtccagccagagctactttttattttttccttagatggggtttccctgtgtggtcctggctgtcctcaaacttagagatctttctacctctctgcctcccaagtgctggggttaatgtgacctttgtttctggaaaaaaaaataggggacttggatgaacgggtatctgaatgagaagatggactagtgtttgagtttaattttttaaaaaggaatgggacatgccccttcagcaccctaaatcctcaccaaaataaagcttactgttaccaaagcaacttggtcagacttttgtcctctgcctgttcgagttccatgaacacagacacagtcttctgtatctttgatctcgtctaaggtccagctcagatgtgatagctcacacacactctcatcttcctcaagtggtgacctatacgaaatgcagctaagatgggggccgtaaactcttccaaataagaaactcgaggccctgaccaatttgtgagcctgtgtaaggttccccagcgtg

SEQ ID NO: 25541 - DNA, 2184 bp, Mus musculus
gaatatgagatcttcaaaatggagcaagacacccgaggccgctacctgctgttcaatggccagaggcccagcgatggctccagcccagacagaccagagaagagagccacatcctaccagatgcccttggtccagtgtgcctcttcctcaccaagagctgaagagttgttggaagacagtcaaggtcatctgtatggcagggcagcagggaggacagctgggtccctgttgcttcctgcctttgtcagcctttggactctcccacattggcgcatcctcagatagaagacatttcctgaaccaagactctttaccgtgtatgactttccttcacacagagaaaggacattgattcttttgatgcacttgaatgccttgagacctgccgttgcctctcctctccccacctcttccagcctctgcgccatgagcagtgtgtttgaagtttcagctttgaatgtcttcccgcccgatccgtggcctgagaacttcatagaggtgtgattgcactttatgtctgcagagagctggggcgagtgtgtttaggggtggcagctgccttcttctctctgtcccctgactcctgactgtgtttctgagctgagcttaaaagatacaaatgacaagctgcagctctctctgccattgcttctctttatctctccaaatcccttccacactcgaggttttcgacactggaacccagtgcagcgttggcttgggaccgccatgaagaccccatgtttgcgacaggagagcctgggttggtgttgagtacataagagacgaggcaaggttcagctaagtctttgtcccagccttaatgctaaccaacactttcagaaatgttgagtagagaggtgtccctaaagcttcaatggaacttaaactctgttgacaagcgagtgccggttttcacttgttgagaagagatgtgtgccatatacttggtttggtggctacagagtacagcctgctgcttaaccctcagaggagactgatccagttgggaaattcagagcagctcctgctccaggcagccagaagcagcagtggggggtgggggtggggattccttgtgttaagtgccacacaactgacaaggagatctgtggagtttttctccaagtgaaccaatcccctgtgtcctggctcacactgtggttagggtgggcacatccactctgccatctttaacacacagaaaccaaacatcagtgctccagtagcttactaatggaaagaggttggggtgagactcacccacagatgagccactctgctaggagccagctgtccctgtgctccttggtggggtctaggaggagtcaccctgttactagaattaccagcttgattcggcttcctctctgcatttccctggttctgccccacctgcgaggtccagagccatctcattcagggttcgccgcttcacagtcatccgaagggaggaggggatggccgccacccattcctttgtattattgcaactggtgctataaacaccaagtgctattgctcacagagacccatgaaggtaggtggaggagagacaaaaaacctagctggaactgaaagcagacatggagaccaggacccaggagaagagtcagtcgtgtatttaagagttcactttgtgaagcagtagctttcagtgcggtgttaaattataacgaaggcatggagtaccagagtgctttatatttagattatattttaagtcatggtgcatacttgagggggtttattaaaaatgaaagtactaacttaatgtctactaagtttaataaacaaagaatttggaagtaaccccacgaaatacgtcttctttgtcgactcaatgaattctgacactgtcttcaaagtgtgagcctatagacacacttcagtgaccaagagttgggtttatagccactttggttcactgcaacccacctggactcatctatctctaccctttaacaatatgctgcatatatgcccacaaagggatgatagatattaacatagtgtaagcaggatgagtctgtgaagtttgtgtgatcactttctgatgtaatatacatctctacagagaaataataacagcttattcataactcactgacacattgaagtatgtcaccatcactcccaagtgcattcatctcggcttggttatatcatgctaacagcaatagg

SEQ ID NO: 25542 - DNA, 1719 bp, Mus musculus
tagatgtctgactgaggagacggtgcatggcgccacctgaccctgctcatgcgaccattgatggtcacagagccagtgggagcgtggttgttccctcacaggctgtttacatgtgtgtggaggatcaggcccagattggacgtgctactcagtgacctagaaatggcactgtcagctcctcccattctctctgtccacttgcattgtacccgagccttgttggcaccatggaccatgaagaggcagaacaaaaacacgagagactctttttctaggaatataaaccataagaataaacaacatacttcaatggagtggggccttgtctcaaggtaaaaaagaaatttatccgtcagcatattagatacattcaaattgttgagtcttttcggaaacaagctttggacaaaagctttataatttttagctcagtagcccttgtgtgtgactataaaatatggaaggtagcatattaaagtgctgttgtaaatgtcttcagccctcccaaaaaaagtattgctttttcttttttcttaacaacaaaaagtatgactgttcaaacctacttggctcttgaccaaaataggactaggtaagactatttatatttatctagaatgacaggtgacgttcctgccaatctagtgtgcatgcatttcttacctccaaagtaattttggtttggagttaataatttaacatgagttatgctaggtactgcaaaaaataaaaagttagccaggagggaaaaaactggttttaaaagacatacttttggactgggttaccagtctttcatactgcacagttcgcccatggctatttcctaaaagttagttttgaagcattcctctttttaccctgtatggctaaggcccattcatgcttcgtgaactgacgaggttgcaagcagtagtgcatgctagagagtagtgctgaatggaataggactgtcaccacactccaccatgaataaagcatgcttagtcatgctagattcctgaaccctaggaaaagcattgctacggtactggtccccttgttgtgggagtgctcctacagattggcatcctctgccaggtgggcttgagtggctgggtgtctctgaacaatccctgtgcagattacaggtctgacacaaaacactaatgcaaggtttatgctttcccctaagttacctgcaccggtcttttggtcaccagcttattctctttaattacattgagattatgaataaagtggtcttccaaatttgtatttaaaaagggaattggtatttccaagatcaatattatgtttcaatccaaccagaaatactggtgcttgttgaagcaaattagcagacttttaaaatatatttggcagtactcaaaagttactttagactgtgttatggcccaggttattcaataaaaccgtgtggagggtcggttttacttgtatccaccataaacagcaattctcaacgcactctgaagcaacagtgagcttggttttaaacagcagagtatttaggcagtgcccgcctcccgccacccccatcaggagccagcgtgcaggattcaggttattttgcttggtgtctcaggaacatttgtccctcgtgtgcactttttatttttctacttgtattaagtcttcgttcttgtgagcttagtcagaaatggaaaacgtggtcttcacagcaagcagcgctctcgcgccctccctaggaaagcc

SEQ ID NO: 25543 - DNA, 1454 bp, Mus musculus
tgttgctgctggtgttggtgaatttgaagctcatacctccaagaacgggcagaccctcgagcatgctcttctggcttacaccatgggtgtgaaacagctgattgttagtgtcaacaaaatggattccaccgagccaccatacagtcagaagagatacgaggaaatcattaaggaagtcagcacctacattaagaaaattggctacaaccctgacacagtagcatttgtgccattttctggttgaaatagtgacaacatgctggagccaagtgctaatatgccttggttcaagggatggaaagtcacctgcaaagatggcagcgccagtggcaccatactgctggaagctttggattgtatcctaccacaaactcgtccaactgacaagcctctgtgactgcccctccaggatgtctataaaattagaggcattggcactgtccctgtgggccaagtggagactggtgttctcaaacctggcatggtggttacctttgctccagtcaatgtaacaactgaagtcaagtctgttgaaatgcaccatgaagctttgagtgaagctcttcctggggacaatgtgggcttcaatgtaaagaatgtgtcggtcaaagatgttagacgaggcaatgttgctggtgacagcaaaaacgacccaccaatggaagcagctggcttcactgctcaggtgattatcctgaaccatccaggccaaatcagtgctggctatgctcctgttctggattgtcacacagcccacatagcatgcaagtttgctgagcttaaagaaaagatcgatcgtcgttctggtaagaagctggaagatggccccaaattcctgaagtctggtgatgctgccattgttgatatggtccctggcaagcccatgtgtgttgagagcttctctgaccatcctccacttggtcgttttgcttgtgacacgaggcagacagttgctgtgggtgtcatcaaagctgtggacaagaggctgctggagctggcaaagttaccaagtctgcccagaaagctcagaaggctaaatgaatattacccctaacacctgccaccccagtcttaatcagtggtggaagaacggtctcagaactgtttgtctcaattggccatttaagtttaatagtaaaagactggttaatgataacaatgcatcgtaaaaccttcagaaggaaagaatgttttgtggattattttgtgtgtgtgtgtgtgtgtgtgtgtgtgtgtgtgtgtgtgtgtgtgtcagttttaagttattagttttcaaaatcagtactttttaatggaaacaacttgaccaaaaatctgtcacagaattctgagaccattaaaacaagtttaatgaggaaaaaaagagaaagaaacagaaggaccactcccaaatttcttctgtgaagtcagtattactgcaatactaaatcagttaaatacacaataacattacc

SEQ ID NO: 25544 - DNA, 3217 bp, Mus musculus
gacactggaagacttactgcagtcagacttgcagctcctggataattgcttgattctcttcggaaactgttaatcttttatttgttgccagtaccaataaatcattgcttttgttcagatggcatcactagtgtttgtagtgtaatcgtgatacatgcagttgtaaataaaagtcactacttttgccaagcttaagtcttcgtcattctatataaatgcattctctctctttttatttgaaaatttgctaacctcttgttttaggagttgtgtctagtatcacattgactaaaagttactctatctctagaggaacagaacgccacagggattaggagtactgtctatacacatggagagtttagacaggatttgaaacctccatgtatgtgtaatgtttggatgcatggatttggaatggttaaccaagttcaagtacattctgacttattttatcaaaaagcatttgggtatctaggctttacaaatttgttaaaaaacccaatttataaacacccagtactcttacctatcactggtagttaacagatttacaaatattttggttttaggttagcttcactgttgatatccttgggtacctgccttccaaatggtgggattgtaggcctgtaccactaaacctggtctcatgccaagattttaactttctgcataaacctaaacattagagtcaactatttcctttaataatgcaggtattaaaactgaattcagaaaaatttggaaattataatacatggagattatttaatttaaaaattaaaaaatatggaaaattagaatcaaatctattatctaaattcaccaaaacattcactctatatagatagagaacatgatttaagcttaaaatgagttgtcccagctgtttgtttgaaagatcttccacaaaagactggataagcaaatacttgttgttctaagcttttaaaacatttaatattggcaaatttaatgtttaaatactttattttgttttatgtttatgtgtgtttggcttccatgtatgtgtatattcgtgtgagtgagtgtggtgcccagcagaggggtgacagctggtgggaactgccatgtgggtgatgggaactgagcccaggcctctataagactgctgctccatccccacacattaatcttgtaattcattattttaaaagcatatataagactaataacttgtaattcatttaatacatttgagggcattcttacctatatagtgcagaggtttgcctttggatactaatgtacttatacgtaattatgagaaaaaaaaaaccaaactctggatgttgttgaagtagtgttgaaatagtccttttctgaaacttgtgtcattaagtaatgtttagttcatgtgtatgtgagctcagtaactggtctgtgataatgtctgtattttatgtatttcacagtttgttgacttaaagtgaaagaaagacaaaaaaagtaaacgtttataatacctgtaaaccatcctgaagttgttaatcacacctgaaatggagaagaagatgaacatgaaaagttgtagtttatacttagcctctttggtaatcattaaagtgcctcgtcttggctgtaaatggtctcatcctatttgacttgaaaaacggagtaaaagtggtttcacatttgcaaaggaccagacatcaaactttttgttgttcatatgatttctgtaactttgttgcaacatacaaacatcccacatcattcaagttataagtggtgaatgctagtgggaagctgacatgtgtcacaagttttattacaaaaaacccaaatatgcatagttgagatgtaaaccatcaagctaaaatgctattttctgttaaaatagtatatcaatatatatttataaatataaataagtatatttacatgtaacaattttcctgaaaagaacatgaagaatatgtagccttggctgtctaatcattagccatccattaatgcttactagaaaactaatatttattttgtcagccataaaaaaaaccaagaatctgtatgcatctcgtatctcacatcaggttgcctaattgagacatacagtgaaatgctgtcagcagaaacacagtattgctataggaagtcttttcagagaaagcctaacaataagactagcacttgttacttcactcaggtgttcctcttggtcctttataaatgtattttggctatctgctgccaagtaccaaactgccccatctcagtacatgaatgtattggatggaggtagtcacctagccttctgccaaccatatttttctaaacgattagatatgtgtaagacgttttttgcagtgttcatagtttgtgctattagtgtacatttaataccagcattgcttatggttgtcgttagtaataaattgagagtcttgggaccatgatgtcagcaacgagatacagtcctgtatgtgacagagagtcgcacccctgtcagattttaacaatatagtcacctgaacaagactagcacagtgacaccatcagctgacatgccaaaatggattgaggatatcttacaaggccaaatctctaaaataaatttcccagtattacccagggaaaaagtctcttgataggttatccagtccctagtggtcagccctaaatacatacaagcaatactaaatggacttgacaggttatatacatgcatatgtgtatatattttctattgctgtgacaatccctggccaaggtgtgttatagaagagttcattggtacttactgtttcagagggtgagtctatgactgttatgttggggagcgtggcagaggcaagcaggcatggtcctggggtggtagctgaatgcttgcttgcaatctgatccagaactatgaggcaaagagagccagctgggcatggtgtgggcctttgcaatcgcagcaggaaagagaggggttatgttactttaattacattttaaaataaaagactgctgatacgtaccttatttgaatcaataccaatacccttggtttcttttttattactccaaagacaagttttgtctatagtttcttaagtgttgtttatatatgaaaatcttatttgtctactcacctcatttgattatcatgtttgagaaatattgatccgggggaaattgggatttcctcctaaaatttttagtctcattaataaaatacattttaatatatgtttatttgtttgtt

SEQ ID NO: 25545 - DNA, 1100 bp, Mus musculus
ctctaaaaaacgcctgctgcccagctcccaccacggcctttctgactcagtttatgtacaggcccagcagtgccctgagagctgagagaggccctcaggtcagtctgaggcagcagcccgtgaagcaaagctgtgagagtgaagagcagctgtaggcagttctcaactgtagaaggtcaggacacggatgctcagagtgtctcagtgagcatggctctggacagtccgggtcttggtgagcatggctctgcagtgtccagctgagtcagcagagggcatcacgactagagtggagacagctgaggacctgcgaggctctctgtaactctcaattttgggtgattaaaaaatacttttcaagactttgctgtttcccagtatgtcaagagcctcataataagaacacagtgccatccaaaaggctttgtacaggaacaggatggagaataggtttaagaatagcactttcggggctggagagatggctcagcagttaagagcactgactgctcctccgaaggtcctgagttcaaatcccagcaaccacatggtggctaacaaccatctgtaatgagatctgacaccctcttctggggtgtctgaagacagctacagtgtgcttacatataataaataaataaatctttaaaaaaaaagaatagcactttcacatgtatctggtcaaataatagcttgaaattcatgcagataacctccctttgaacaaactagtaatgaagctggcagtatatttttaagagcaagagcaacatcagaaatccgtcatttttgctgtactgatagtaaacatcccagctacagagtcagtgtccgtgcatgtgccatcgcctgtgatgtcacgcgagtgacatgcagttagaataccaagtgttcgtaactgtgttgccacatgctaacacgactgtgaagggatacaaaactagttccgctagcaaaataagcaaatgtaatgtcagtggtttgccttgttgctaagtgattctgtgcgtatgctacggtcccttctacctggaattgttttacatcctttaagagagtccctgaaccactagcagccacaggtcatgagccgaaggcct

SEQ ID NO: 25546 - DNA, 1333 bp, Mus musculus
acttcttggtatctaattatagcccccatcgtgccccaaataaccttacatcctccagatgcagaattgcttattgtcctgacttaaaagttcgcaaacaagtgtatcctttatgttatcagcttcactaacgtgtggttcctcttgctttgtggttctgttctgtatattataactcagtgaacgtcggttccttgaggaccagaacaatatcccatcctcctctgtgccctttgctctgactcatccagagcaggcagtgtttgctgactgtatagttactcagatgtagcctgggtctcttcttagagtcacatcttaaggttcgtgcagtaccttgccctgggtagtatcatttatttcatttgaaagtgtttcatcttttccgagtaaccgccaagatggccgaagtggagcagaagaagaagcgcaccttccccaagttcacctaccgtggcatagacctcgacctgtcttatgagctcgacatgtcttatgagcaactgatgcagctgtacagcgcccgccagaggaggcgcctgaatcgtggtcttcggtggaagcagcactcactgctcaagcgcttgagaaaggccaagaaggaggcgccacccatggagaagccggaggtggtgaagacacacctgagggacatgatcatcctgccggagatggtgggtagcatggtgggcgtgtacaacggcaagaccttcaaccaggtggagatcaaaccagagatgatcggccactacctgggcgagttctccatcacctacaaacctgtgaagcaccgccgcccgggatcggtgccacccactcctcccgattcatccccctcaagtagccgaggccattaaagactggttttggtccctggagggggggggggggggaatgtttcatatatgtccagagctgagctgggggggcagagggtgtatctcagaatatggtctttgcattaatggcataattagaagaaattacttttcattgattccctaggcacagccagagctgaacattctgttgtggccgttactgctcctcctcatcagttaagtcctctaaggaatgagcagggagtagtcattccatggcgaagctaccttgtagagatgctagcaccttgtattaggcaatctttttatctcaaaggccagatactaacatgttaattaataatggctaactctttttgttagaattttggcatcattctgtaattttctaaactttttgtcagttgaatttacttttacatttagataaaaggttgcttattattactattgttattgctattaatcgttatcattctctctacagcgtt

SEQ ID NO: 25547 - DNA, 1393 bp, Mus musculus
ttgagtctgaactgtccgctctgtgtaaatcctgtctgcaggaagactaaatccttcttcaccagccaacagctgtgaccctgcctgaggacccgtgggatttgcagatgtgcagcctccagacacctgcggtggggacgatggggacagaagccacgtttgtctgggcacaaactgtgatttctctcttgcctgtgttttatcttattttatcttatttctcgcttgccctatgtaggccaaactggcttccagtgtgcctcccgctcccgtttcctgggcgctagttagcatcacagacatacaacattgtgttccttggaggatagactcgaaattcttactgagatttctattttcatatacaagtatagtgactgatcctggggtcaatttatcaatatggaatatctgtctactgggacatcccaggaatgagtttcacagttttattttatgagtcgcacacaaattctacacttattgcccaaaacaacttcctacaacattgtggtgtgtctcctcatgtgctaccagtggtgactgagatgtttacagtcttatggatatagctatcacttaagtgagtattgtgagtttatgaaatgtaatttgtaaaagaattaggctgagcgcacagcttgggatcatgtgctcacctgcatcaaacacaaaacacgatggtacctactcttttcccgagtccatggctacgggagtgtgagtgagttggagcggtcacctggcactgcttctgttgacagtgtagccactgtccactgccactgtggtgactgcaagagtctcatctccctccctggaaactgaaacaagtgcatgtttcaagagtgctaagattccccgggcgcatagcctaataaacgtgtgcaagttcagtctttgctgtgtacgccttcatttgagtccacagtgcctcagggaaggggactctgccttcttcctgtctccagggacagtgccaccaggaaatgctactgatggatatgggcttagctccccaggggccagggaaccttccagtgccatcctaatcttgactgagtgcttattttataaagttgactgtgtctgatagccttgaattttctttgtgaataagttcttaatataaaaattacatggttatagactaggccatttgtaaaacacaaagaaataactaatgtaataattatcattttattctaatcttttcctgcatatatgtgtgtatacacacacacatatatacatacatatatatatgtatatatatatatatacacacacacatacatatatatacatacacatatatatgcacatacacatacatgcatgcatatatagacatatatacacatacatacatatacacatacatatatgcaca

SEQ ID NO: 25548 - DNA, 1990 bp, Mus musculus
gcttaagatctggaaccactcctacagatagtattgaactaccatgtggatgctgggatgtggcaagccctctggacaaacagccagttctcttaactgctgagctaccttgctagctcctactgcagttttgaaaaaaaaataaattattaggtccgaccagcatctaatactgttctcactttcctctgaaaaatcaaagcaattagtttgaaaggtgaaatctcttcctgtcagatggttcactgaactgttcctctctgcatggtttatgaaggcgtgtggattgtgttgaattattactacagtgagctaactgttagagtgtggaaagttagctcatcgtagtaataattttaatgtgattagatacagttttaaaataagcactctttctctcattcatttaacagagaaaatatggcacctgtcctcatggagggtatggcttgggcttggaacgatttcttagctggattctgaacaggtatcacatccgagatgtgtgcctgtaccctcgatttctccagcgctgcaggccataaccatggggccctcaagcacgaaggaaatgaaaagttaagactgcctctgcaaaagaacaaacgcccaaatcgtcccttgacttcctgttgggggtagtagctttctcttgactttcccattatcagaaaaagcagtaggtatcacttgaacatcaagtgacattgatgctcctttaatgaatatactcattacaaaattttgaggaaatatatgtcatgtcactctttagtatggagatattttattgtgctataggttacaatcattgtattaaataaaccatacatgattatacagtttttaattatggtctgacatccagtaaaattccatctttttgtccttttaagtgtcgctgggattctcgaattcaagcatctaaaagagaaattggctgtttgacataaaagatactggagtcaaatacatagccctttacattcactgttagtcttttccttattcatatagtgtttataattctgaggggtatgagttgacaggggaaattaatgaaggggaaatggattataatttgcaatgaacatgattggatggtgggttattcaaatgattccaaccccgttagcctttagtttaagaacggggcagatggggcttccctctttgtaattcctgagtaacaaaagtaaatctgtttgcaaagactttgcacctgaatcttagccaccgtagacagctacgtcatccctgcctggtccttgggtgccatctgcactgccttgccgactcagcagggctaccagtggctgaagtgcagttgctctccccagatgcatgccgtgtgttctaatgggctgtatcccactaaccaataaatgagcagtggttaaaaaacaaaccaaaacactttgctgacttattttctcaatgttgaccatctctgactcacattttaaatcttagacagttttatttgttataattattggattctgaagttgctattattagagtttcatgatagtgacagaatgagttttttaaaatttgacggatgcttgggtcctagttacaactttttgtactttttagttgttagttttaaatacattaaattccctactgttctcaagtcagtaaatgactgatggaaacgggccattgtgacctagtacctggacgaagcagtaagctgtgcccagtcttagcagtaggcttcactctggtgaagggttgaggttaggctcagtttaccttgaattttatgtaaattgtataaataggttgatagttaaaacacaaagagaaccaggattggataagaaagatatcagactatgggacccaaggcctgaccatgagtgaccacaggccccatccatgtgtactttgtctcactgagattcttgctctactttcaggatcacaaaagccatccctcacccctttcaaggagcagcttgcagacagcccagtttct

SEQ ID NO: 25549 - DNA, 2119 bp, Mus musculus
gttaggcttttcactactgtgaagagacaccatgaccaaggcaactcttataaaggacaacatttaattggggctggcttacagttttagaggtgggaagtggcagcatgcaggcagacatgatgctggagaagctgagagttctacatcttggtttgcaattagcagaagaggacactctcttccacaggcagccaggagaacgggcactgggtggaggagtctgatcataggacctcagagcccacccctacaatgacacatttcttcaaataaggacacatctcctagtgccacgtcccatggtccaagcatattcagactaccacagcctttttaatttacaaaatgcatgtgtattttttcatggaaagaagtattaactgcaaaattatagtactgagttattgggtctctaattctggagactaaagctactaacaatgttcttaaattaacacctttctaaaaacttggctctaacatcttcagtgctgttaatttctattgtctttctcactctctctgctattctcttctgctttttccacatgtaggctccaggaggccatgagctgagctgtgacttctgggaactggtggggctggccccggctggaggagctgataacctgatcaacgaggagtctgatgtggatgtccagctcaacaaccggcacatgatgatccggggagagaacatgtccaaaatcctgaaagcgcgctccatgatcaccaggtgtttccgggaccacttcttcgacaggggctactgtgaagtaagtgcctgcctgcctgcctgctacaggtcaccttttgcaaatggtcccggtgctgtttggaagtgatggccacagcacacttgtctgctccttctccccttaacaggttaccactccaacactggtgcagacgcaggtggaaggtggggccacgctcttcaagcttgactatttcggggaagaagcgtttttgacccagtcctcacagttgtacctggagacctgccttccagccctgggagatgttttttgtatagcccagtcatacagggccgaacagtccaggacacgaaggcacctggctgagtatgtaattgtcttaccaaagcggctccttgggctggggggagaggtcagctggtagagtgcctgcttagcatataaaggttaagtccccagcatcacagagaagtgggcctggtggcacatgctggtaatctcacttgggaagtagaggcaggaagatgagatgttcagggccaggctgggctattataagaccctgccaaagcagaaagaaaaggcggtcggttcgttaggccacagctaaaatctgattttcctgtgaggtttcagtgaggcttgtgagatacccacagctcactctgttccccgagggtcaaaccttcgcgtccgtgtaaagtaggagcggcgctcgctcagctgtgtctgttcttcaggttcactcacgtggaagctgagtgtcctttcctgaccttcgaggacctcctgaaccgtttagaggacctagtgtgtgatgtggtggacagagtcctgaagtcaccagtggcaagcatagtgtatgagctcaacccggtaggtgtagtgtcgtctccaaatgaaaggatcccagtctttggggaagacagcatccctctattcttggaggcttggtgaaccaagtgaataatgtttcgaatatttaatactggtaaattgccagtgactgtattttagtttatagaagaggcagctagttgataagtgtttcttcatctgaaatactcattccgaatagtaatctgtctgcagaactgttttctatggtaaagagtttattgttactctatgtgtaatggtgcaggtggaaggcagagaacaacttcgtggagttgggcctcctcccacctccaaccttggtccacgggtaccaatcaggctttcatggcaaggactttacctgctgagccatctctccagggtctacatcccctgcttgtatttttactttatattacatatatttatatttatatacggatggatattttgcctgatgtatgtctgtgcagcatatgcatgccgtgtctctgaaagccagaagaaggtgctggatc

SEQ ID NO: 25550 - DNA, 1125 bp, Mus musculus
ttccattctgcggggcacccttcttttttcctttctcttcttttcttttctttctttcttccttcctttctttctttttttttttttaataaaaaagggttctttgctgtcagtttcttggaataatttaaagggagaaatattttttttaggaacttgcatcctaagtagaaatatttctttttcatctttatgtgtgtatctgtgtacatggtgtgtgcgcgtgagtgtgtgtgtgtggagaggtcctcaccgtctaccctgtttgagacaggctctcatgttcaccccagtgcacaccaggcaccccccatctcactgtaggacactcaggttgcaggtgcatgctacagcatcaactttgtggatgctggggttcccacctcaggttctcaggcttgcacaggaggccctctactcgctaagccttctctccagccctacattttaataggtcaaggcttacagaaatggtgatttatatgtgctgttaatagcatatgtagatctagtgtggcactttatgataactgagacttggtgattgttgacagaaagcctgtgattgtaaagaaaggagcaattaattgtgtgtgtgtgtagaaattgctattaatattaatataatacccaaacctcattgtgtggtgatatagcatgagctgtttctcctgctgattctgtcttactgcattttgagagccagagccaaccagctacctgctgtgttcaaactttaagatggagttgtgacttcagactcagtgaaaacagcccaggtgttctttaactgatgagggtgaacaacaaaacattgtgtgtctataccatgaatagtcccgagccttgaaaggaatgaagtgaagcaaccagccgtataaggatgtgtgatgtatgaacccacggacaggaaaatcggcaagcccaaagatacagaaggaagagctgctggtttagtggtgttgtacaggattcccagaggtacggctgagaactgggtgagctttggcattgtggaaggaaggtaagggcagttctgttgttagttcactatggctaccatagcaaaacaccatcccagagacttaaagaatataagtctatgttctcccaattctgcaggtg

SEQ ID NO: 25551 - DNA, 1138 bp, Mus musculus
ttttaaaagatgaaatagattatgatcccatttctcagtttgctattaatgtaatggaactgggctcagaatcttataagaacacctataaatttcagttctcagttttcctatttgtatgaaaataaggacctggtgcaaattagatgcaaattagaaagacaaactgtgtagcctgagagatcagtgccagagaaggacctctaggtacctcattagcatggagacctctgtcttgagcctacttgacggtaagatacgtttcttctgcgtgagaagcatagcacttgttctgtctggcaggggggctggaagtcgcctaagcctcaggtgtgtgcccaccaagtctccgggcctcgacctaccttaccttaccttaccaaacttcctggcatgggtttatgtcccactgaagacatttgaacaaagatgtaaacatgaagattaacagaaagacgggtgctgcccaacaggtttccaatgactctgccccacttctgtattttggatgtgatcatagggtggctcctgggtgccttggataggattacagtctgataaggaaaaccatgagtcacaggatagttcagcagggtgaagatatgccttttactgtggggtttccatgagagtctcagacatggtcaggttgttagttcaccaaactgtccttggtcacatgtgctaaggccttaggcactgctgtcctggcattcttctctgaagtatccctctatacaaggagtgttgctatacagatagatggccttggcagcacgtgttgttgctaatgtactgacattcttgattcacctgattctggggtgaagagctcttttccagggtcccctcatttcctccctctttttatggacttgtttgctctcgttggtttgcttggttgatgatgttgtccttctaagccttgtcttattacttgatatttttctggtgaccctcattcactttccgcctgaccttaacacatctttcaaaaccctctgtgtcaccagcaggtctgtgaaacagataacaccaccctgcagccgaaggctggagcccagggagagcccacagtggtcagtcagcggaagctctgaggtagcattaggccgtggtcacgagtacaagagcaggt

SEQ ID NO: 25552 - DNA, 1202 bp, Mus musculus
aatatgctctgtgtcactaagctaaaagccagccagttttagtgaataaaaataaaagttcctttggtctttatggggatgacaagaaatgtcccgagggggcattcttgctcccttagctattctttctaacattttttgtagccatttagggaccagtcgggaggactgtccttccttgctcccagatactgtgtcactcattgtaaaggagggcattccaaatagctgagagactcagaggttccaggtcacctgcggcagactgtacgtgagtcttaaaacttggctgttaacttccaaggtgcagtttggctgcagggcagcattacagagcttgagttgttccctaggtctctggaatccaccaagttccgcctatagtgtttggccaggctgcctctgggatgagctgtttctgtcttccccacgtttgaattcgctcacgctttgagacaggcaggcatcagcaacagcagtttttagcccagacagctctcagcaccgtcagctcagcacagcttcagagggctctgcctggtgggaagctctgcagggctctacctgggcagtagctacagagccctcccctctcagcaccttgctccgcccactcgttccaggctgtcgattgccggtagggaaactggagagaccaggattcctcttccattcttgctgttgttaaggaaaacagaccaaccatctgcatctagaccagccttcctctccctcgctcccttttagaggaggttttcctgcctggaatctggtaagtgtgggcaaaggctctgtctcctttcttggtctgtgcagaacggtctcgtgttgtggatctgtgagctttaacctacatgtgctagaatttagaggagtctttgagcttacaccttctctcgcttatagtgctccttgaatatttttagcatgccttgatacctgtatcaaaaatatagcatattttttccattactgatgtgcttaaacctgtgtcatcttgcctgaagcttcttctcactgtacagcgcaaaaaatgattatggagatagttctctggtgccttccccatgaataaatgatgcatttgtcattgctgttttcctgaaatgtcaaaaatagacacagtgaaaggatctgtcacacagagttcagaaatttggtacaaaattctaggttgaaataaggacagatcttttcttttt

SEQ ID NO: 25553 - DNA, 1182 bp, Mus musculus
ctcaagctgtttgtcaggaacagtaagatggttctttgggtaaaggggctttccaccaaggctgataaccagagtgtgaaacacagttacacgctgaagttgagaaccaactctcacaagctgtacacacacaggtgggcatgcatgtatacacacatgcacatacactcccctccttaaatatataaatgtgataatagaaatgactgctaggcttttttggttgcactcatacaattagcatcatggcaatatctactttgctacggtttccagtcagatgggtttcaagcagtggctcattttactctgtacttcccagcaagaggaactttttttttttttttttttttttttttttaaataggtttgccggttgtctgcatctattctctgtggcttacacattttgttttattttgagtcagtcttgttcctcagccaacctgcagtcttccagcctgggattataagtgcataccaccacactcggctcatgtttattaatagattccttactcacctttcctttgaatatgctgttcttatccatttctaagttactggtacaatctcatctgatcggaagctaagcagggtcgggcctggttagcacttggatgggagaccattactactctctctacttaaatcatgtatcttctactacacaagggttttcccttaacatatgccccactgtcttacccgcattaaattttgcccaagtcctcccacacagcacgattttacagtttcttacatttgcctcctaaaaactgtctgtatgcggctaggggtcagaagattctggggcttgtcagatcacactgacagaatcatccctgcgtccttcctgccacccccgctccagatgaagagatgatggagcctgctctgtccaccggatagcaacatgcttttctcaacgctgtgcatccatctatcccttgcccagtgagacagccacgcactctctgtttggttccaccgaattctttggaccttgaatctatcccacgtggctttgaccatgaaaacctttctcagcatccttccctcacattctgtgctcacttgatttccttccctcacattctgtgctcacttgatttccttccctcacattcaccttggcttctccccagaattatgcatttatcctttgatagaaacaccagg

SEQ ID NO: 25554 - DNA, 1154 bp, Mus musculus
ggacatgtgcatgcagaggtgaaagaacaagcttttagagttggttcttcactcccatcaagtgcattcctgagatttaaggtcttcaggcttggcagcaagcacccttgttgaaccatgtcactggccccaataataacatttcctgattaccaaggtttacatggtaagtaatagctattagaaattttatatagaaaataatcctcagatgtctaagagaatataataattgagtttttaagtgaaagttaatttttagggttcagtttttatagatcaaatgggtttatcaactatctaagcgcgtacctgctttcttttctccagccatcagtggtgagaaagttcaagttctgagctcattgcttcacttcctagaagctcaggagaaccacccggagctgactgatgtcaggcaggaggatccgtcagttcacgggcttcctgtcagggttagaatgacctatctgttcatgagatggctaaggcttcgagcatgaaccattgtcagggagatcgtcacagtggggtgaagatataaaacctagtcacatgggcgcaggaaggaattttcatatcactggggtaagaacagggcaaagtttgctgatagctcagaaggttgaagtgaaaactaaagtccccgagttcagtccccagagcccacatgaaaacagcgtcttccagagcccacaggactgacacaggcaggaactcacagagacagtgtgcataaagctgcacaagttcggggagggagggggggtggaatcccagcatggagaaggggacgtagacggagccctgtctctctccaagaagctgcatgcagttgatgccttctgggaaagagaaaaccaactttctccaatggagcaacgttgagtacatcaactgcactccagggcaggccccttgctgggaggagctagccaacacaaaacagatcccctgtttgtgtatgtgtgtgcgcgagttttggttcggtttggtttaatttgttatatttttatctttggggtttgttttgattttaggggtttcttaagagaggcagaatttgaagttgggtgtgtagggacatagtctctaggaggacttagttgggggcaggaaaggatatgatcaaaatatattgtttgagaaaacat

SEQ ID NO: 25555 - DNA, 1155 bp, Mus musculus
atgcttctcaaaggatggtcctaacacctgtcctgtaggcctcagggggagctttttagaaatgcaaaatttcaggccccagcacagaaagcctgaatcagaaaccggagtttacccctctcccaacaccgttgtagttccacaaactccacccggggattcttgtccatgttaacgactgagaaaggctcccccacacttcagcttcaggatattttggggcaataatttctctatgatccctctcagtcacatagagattacttcctgtttcatgtctaaatttatctccttaaagctttgaagggtggagcccgcagtcttcaaaagtgtaagatactgctcttacatgcctttgtgggtaacagcccagggtgggtctcagcagaaggggaaccaaggaggagatgaagacacagctggcaccgagaagggtataccagggctgatcttttgctctcctccccttgaccatcatttaataactggcttctccaagacccattcaaaagaggagcaagcatagtctgccacggttgagttttaaaggttagttagcagcatgggtctaaggcgttggggacagtgtatagtggagatgctgagagtctcactcattgcccaatattcgtccagaagtttcctgaagaaagaaaggagcgggggaagcagagtgtacaggcctccgtgaactgaggacagataaggaataaaaagaagacagtgatttagaacttggtgtttagtttagaggactgaacaatgtctttttagcatcctggtactttcatctgcgctaccttggcatttacccgagctcattgatgttgacaaagagtaaatcctcaagctcacacaccatcacccttgtgtagcaacgactatcgccttcctctcaggaaagcgtgtccttctggactgaactttcatttcctgtcatcaaaccaatgccggcatctttgcacattcttagttgtggtgtgtgtgtgtgtgtgtgtgtgtgtgtgtgtctgcagaggccagaaaagggtggtagatcctctggagctggagttatgggtgcttgtgggctactcagtgtgggtgctgggaactgaacttaggtcctctgaaagagcagcaagtactctaaaatgttcagccatctctccagac

SEQ ID NO: 25556 - DNA, 1233 bp, Mus musculus
caaacatgtatgtatggagagaaaactagcaacaactctttttataggaatatgagatgttggaattacgttatttaagctgggcagtgatgacacacacttttaatctcagcactcagaaggcagaggaaggggcagatctctgagtttgagaccagcttggtgtacatagtgagttccaggacagccagaaatacagagagaaatcctgtctaacaacaacaacaaaaattacattatttatctaaactgtcttttgcttttgtcctgttgtaagactttgtgaattaatttgttctgtaagaatgatgtgtggggcctgtaaatattgctcagtggtacagtgctcagctaatatgtggaaggttctggacttgctcatcattactagaggggaaaatgagttattagagtaaatatgtatgtgtatcagatattttcattttgaccactcataagagcaatgaaaatggcattattatagattgagttatgtcattagcacggaaaaagaaccctttctctttttcagagttattttatttatgtgtatatgtggagacctgagtgtatatgtgtgctaatggagaccagaagagggcatcagatactggaactggaattacaggcaggtgtgagcactcagtgtgaatgctaaaagctgagcccacttcctctgcaagtgttcttaacatctctcaaccccgaaagaacctttcagtcatcgggcttaataacttcattttatcaatgggaaaaacagaggcaatctgtcttacactggagcacagctgaagtctcagctctggtctcaaatttctcttccactgctttctactcttcaagtggtttagacatctaaaaaagtcttaagagtgtggtggtgcatgcctttaatcccagcactcgggaggccgaggcaaataggtctctgtgagtttaagaccatccttgtctacaaagaaagttcagaagagccagggctacactgagaaacctgtcaaaaaaaattcttagagctaaggtaatggctcacttaatagattgcctgctgcaaagtgtgaagaccagagattggatcccagaactgacctaaaggatggggtcatagacagccgaatcaatgacctctagggtcagtgaaagactgtctaatgtagaaagcaactgaggaagacagccagtgtcaaccttcagtgtcctgttgtgtgtgtgcacatgtactcacataaa

SEQ ID NO: 25557 - DNA, 2807 bp, Mus musculus
tcgatcccaaagcagcgattgagtccggacacgatgaccatgagagccacattaagcagaatgctcacgtggatgacgactctcacaccccatcatcctcagacgtcggcgtcagtgtgattgtgaagaatgtccgcaacatcgactcctccgagggggtggaaaaagatggccacaatcccacaggcaatggtttgcataatgggttcctcacggcatcctctcttgacagctatggtaaggatggagccaagtccttaaaaggagacacacctgcctcggaggtgactcttaaggacccggcattcagccagttcagccccatctccagcgccgaggagtttgaggacgatgagaagatagaggtggacgacccgcctgataaggaggaggcgcgggccggtttcagatcgaatgtgctgacgggctcagcaccccagcaggacttcgacaaactgaaggcacttggaggggaaaactccagcaagactggagtctctacatcaggccacacggataaaaacaaggtcaagagggaggcagaaagcaattctataaccctgagtgtttatgagccatttaaggtcagaaaagcagaggataagttgaaggagaactctgagaagatgcttgagagcagggtccttgacgggaagccgagctccgagaagagcgactccggcatcgctgctgccgcatcttccaaaacgaagccgtcctccaagctctcctcgtgcatagcggccattgcggcgctcagcgctaaaaaggctgcgtccgactcctgcaaagagcctgtggccaactccagggaagcctccccgttaccaaaagaagtgaatgacagtcccaaagctgccgacaagtctcccgagtcccagaatctcatcgatggcaccaagaaggcctccctgaagccatcagacagtcccaggagcgtatccagtgagaacagcagcaaagggtcaccatcctcacccgtgggctctaccccagccatccccaaagtccgcatcaagaccatcaagacatcgtctggggagatcaagaggactgtgaccagagtgctgccagaagtggacctggactctggaaagaagccttctgagcaggcagcgtccgtgatggcgtctgtgacatcactcctgtcatcttcagcatcagccacggtcctctcctccccgcccagggcacctctgcagacggccatggttacaagtgcagtttcctctgcagagctgacccccaaacaggtcaccatcaagcccgtggcgacagcttttcttcccgtgtctgccgtcaagacggcagggtctcaagtcatcaatctgaagctcgccaacaacacaacggtgaaagccacggtcatatccgccgcctctgttcagagtgccagtagcgccatcatcaaagctgccaatgccatccagcagcaaaccgttgtggtgccggcatccagcctggccaatgccaaactcgtgccaaagactgtgcaccttgccaaccttaaccttctgcctcagggtgcccaggccacctctgaactccgccaagtgctcaccaaacctcagcagcaaataaagcaggcaataatcaatgcagcggcctcgcagccacctaagaaggtgtctcgggtccaggtggtgtcgtccttgcagagttctgtggtggaagctttcaacaaggtgctgagcagcgtcaacccagtcccggtttacacccccaacctcagtcctcctgccaacgcagggatcacgttaccgatgcgtgggtacaagtgcttggagtgcggggacgcctttgccctggagaagagcctgagccagcactacgacaggcgaagcgtgcgcatcgaagtgacgtgcaaccactgtaccaagaaccttgttttttacaacaaatgcagcctcctttctcacgcccgcgggcataaggagaaaggcgtggtgatgcagtgctcccacctgatcctaaagccggtcccggcagaccagatgatagttcctccatccagcaatactgctgcttccactctgcagagctctgtgggagctgccacacacactgtcccaaaagtccagcctggcatagccggggcagttatctcagctccggcaagcacacccatgagcccagccatgcccctagacgaagacccctccaagctctgtagacacagtctcaagtgtttggagtgtaatgaagtcttccaggatgagccgtccctggccacacatttccagcacgctgcagacaccagtggacaagtagagtatcatttacatttcggtgtttcggggacgaggctggagccgcgagtgctttgacaaatgtcttgaattacggtggagaggggtgtgtgtgtgtgtgtttgtgtgtgtgtgtgtgttcaggcaagcacaggaaagggaaaagatggttttcatagtataggtgcagtgctgaaatacaagggtaattcttcagccagatagaaaagtgtgtgctctggttggattatgttaggtaattgagtaggcattggaagtctgattcttagcagtaaattcagtgtcctcccatcatatggagcgtttagcttggattacattggcacagtatctgagtcttttagttttggaattttgacaattactggtatttatagcagtaaaatgacttaaacatccaccgagtactacttaaaggcactctacttagagactgtggttcaaagtgtgtttaagtaatggtcatggtgattttaactacaaattgcaaaccatctggctcaataaacctttgtgtctgtgacctttttgaggtga

SEQ ID NO: 25558 - DNA, 1168 bp, Mus musculus
aaattggattaactggggttaatttcttttttcctgaggcaagttctggattgtgggaattgcagctcctgttgggcctgtgagctcggtagcgtgcgatagagtacctgtgagcacagtttacatgaagaccttgcttaaccctttgctctgggacaaaaatgcaaaagagacagaactggaaacattaaagccgtgttttctttatctcacactttggcaggagcctgcctccgtagtaattcttatttttgttttacaggatgacagtaacatgtaaccttcaggtttgctcttccctcgggcattagagtcctttctagcagtgtttaggatgagcctctaactaactgtactgcttaactaaggtgatttgcataccagccgtgcctagcaggaccaatcgtgtctccccctttggtttatttagaagacttgcactgtctgccagatgctgcttcctaaccagtgcagctatgcgtcacaccagagaatccatcagcacaaatctccctacacctgccccgagtgcggggccatctgcaggtcggtgcacttccagaaccacatcaccaagaactgcctgcactacacgcggagagttggttttcggtcagtatgtccttcactgataactgcgctgcggttttgacgggcctgtgcacatgcgtaataattctcagggttacctggcgataactacagctcacagatcctctaggaatcattggtagttgagttgatccatttgaatcctttaatgccccgttggccttgccagtccgtacagatgaggataaggggcaaggtagatgcatgcttggagctcgggcatgaccagcaaacagcctttgcatcctttgtcctcacgtagcctctgcaggagtactgtgtgtttctgtatctcttactgtttctttcctaacaaatacaggcatgatggattgtggtaaccacacagaagggcccggtgaataaccttttctgatatccatctttggagtttccccttgaaactcccctcgtgcctcctccctcacagttccagcctcttcgtctttacactgaccctggagattcccagatgtgtgtttttgacatctgctgactttcatgttactttagccagtgtcaggtgatgttctactttgctctcagactttgtttc

SEQ ID NO: 25559 - DNA, 1201 bp, Mus musculus
ggcactaagacaggtggtaacggcaggctctacagtcagtccagtacatgatgtccttccctaatccaggatccccacgatcttactgtgtcccctgtcctgatctggccctcgtggtccattagcctcactacacacacacacacacacacacacacacacacacacacacacacttcttcaaaatgttaaagatgctccaaacattgaccatttgtactgtggtccattagcctcactacatacacacacacacacacacacacacacacacacacacacacacacacacacacacttcttcaaaatgttaaagatgctccaaacattgaccatttgtacttcgtgatctacactcttaaacacacagaactgtctttactatgttgcaagcagaaaaaggcaaagtactttccaaaagccaggagaaacctctgcgggctgtgagatatgttcatgtcaccctgttgacacagtgacgttcactctcggcgttcggtggtctgtgctaatgacagtgttgtttctctaacagatgtgtacattgcaatgttgtgtactctgatgtggctgcactgaagtctcacattcaaggctctcactgtgaagtcttctacaagtgccctatctgtccaatggcgtttaagtctgccccaagcacacattcccacgcctacacgcagcatcctggcgtcaagataggagaaccaaagtaagtcaccccatggctgagtttactccgctgctctagtgctcatttagaggaggttgtcattgtagcaaatacaatttaaaacctggacatttgtcggctatgttaattgtgatgtgtgaagttctgctcgtggctcagcaagtcaccctaccttttccagggaaagtcggtatccgctcagcaaaggaacacgtgcccagttttattctttgctttagtgtttagttttttttttttaaagatttatttatttactatatctaagtacactgtagctgtcttcagacataccagaagagggagtgagatctcattacgaatggttgtaagccaccatgtggttgctgggaattgaactcaggaccttcggaagagcagtcagtgctcttaacctctgagctatctctctccagcccccacccattttattcttaagatgatttttttagcaagtaagttttaggaaaaaattaaaatataaaaaca

SEQ ID NO: 25560 - DNA, 1264 bp, Mus musculus
ttttctagttagagtaccatcattgagctgtattgctttgtttgacctcacctaaagaaacaaaaatcactccacattctttcttgggttaggatgcactgttcagttgaattgtccttttcaatctttatttttcaaagagaggaaggagggaggagggtggagagagagacagagacacagagagaaagaggtagagagagagacagagacacagagagaaagaggtagagagagattgatggtttgattttgatgtttcttgctgtgtgttacagtaccggaaggctttgtacaaacatgcccatcgcagcatggttaagctttctgaacaaatgttgctgagtgtgtcttagagccgaagacttacctgctgtgattgagcaatgtcgattgtcttgaaaagcttgcctcacagctaaaatgttctcgtgtgtctcctgtcaatgacttctacccccgagttccttagatgctaagtagtggctttgacgtgagccgaggctgactgactgtatctcgctgcgcttcttctgttctagaataatctataagtgttccatgtgcgacactgtgttcactctgcaaaccttgctgtatcgccactttgaccagcacactgacaaccagaaggtgtctgttttcaagtgtccagactgttctcttttatatgcccagaagcaacttatgatggaccatatcaaggtgtgtgtgcgcgtctctcctcccgtctaagtgaaccgcagattcatgcatggttgtaggccctggccgagctgcagatttcttagagcatgctgctacattgaggggaagagatggatgctggcccattgccacatgctgtcttcatgttctgttggctttggggtgctgtgtatccaggagtctcgctctgtctccccaagactgctgaaaaggaacaggtgtgcatgctctggtttaaaagaataataaagttattagggctctctgtatgtacatgaaactgatgactgtgaagttttctctaaaatatgaggtttatttttgtttaattatgtctgtttgggtatgtgcatggggttcaaatgcccttagagacagaggtcagactctcctggagctggaacaggctgtcataatctgtggcgtgggcactgggaaatgaacccgggtcttctgcaagttcaatatgtgcccttaactgctgaactatctctttagcttttgtagttgtctgttctgagaattctgtcatacgggatgaagaaataggagtttt

SEQ ID NO: 25561 - DNA, 1212 bp, Mus musculus
gaactccacacaagttaaaacagttaatgtttctttatctggctccctccctccccctccccccccactttatttttgagacggagtctcactatatcaccctagcctgcatagaacttgctacatggactagactggcctcaaatttacagccatctgcctgccttagtggatttaaaggtgtttgctaccatgctcggctccactgtttttaattcatcttggtttatttaaaaaattttttgtggcaagagggtcactgtgtagcccaggctggcctggaacttgctgtgtaagagatctttctgcctctgtctcctgagtgctaggattacaggtgtgcagcgccatgtctgacttctcccttatgtgtttaaaaatgtctatttctagtttaggagatacttctctgaatgattgtcaaattctgttgaaacggtgtgatttgtgataggcgtttcttttctctttactatgcagtctatgcatggaacattgaaaagtattgaagggcctccaaacttgggtataaacttgcctttgagcgttaagcctgcaactcagaattcagcaaaccacagcagagaggatgccaagtccgtgaatgggaaagagaaactggaaaagaagtctccatctcctgcaaagaagtccacagaacccaagaagatggccagtctcgggtggacgtgttgggagtgtgaccgtctgttcacacagagggatgtgtatctgtctcacatgaggaaagagcatgggaaggtcagtgagagtgacagccatgctccggcaccaggaggggacgccggtggatgctggtgaccctccgtcattcagtctctgccagtagttaggattagtgtgacctcgatgtccgtgtgcctcacttaaagcaagtggaatggacattcccaaccccttccagtccgacctgccttctcttgtacactcagtagtagccgtgacttgtcggtcatgtctgttgatcggtcatgtctgttgatcgctgaggatgctgcagatgaggctaaggctcatccgagtgcttgtgaccagcaaggaagagaggaggtgcagaggcaccagtgatgctgccagcctggttctgctgctgccctctgggtacccaggtaccattgcacaccaggctgggcagaaggaatgaagcatatttgggcagtgggttccacagaactttagtctggcagtgag

SEQ ID NO: 25562 - DNA, 1166 bp, Mus musculus
ttaagtaagttacctctcctggatagctgcattttaatctcatgagtgaataagcatttccaggtacaaacacaagttgcatttgtgctttgaggaatctaggctagcatttcatcatgagttgcagaggggagaggggacagggatccagaaggggccatctgcagcccggggcatctctagtgtaaattcctagggctgcactgtgccactgtgaagaaaacagaaaatccagttttctccagttttgtttatttttttatttttaagattgaagccatctagaattgcaaattaaataatgctttagccaaacctacgcagaaatttgctcttttaatcagtaccttttacaaaagcctagggataggaccttttcccagtagggagtgggagtcatagcactgcttgttttatttggaggccccagtgtcagctctgcctccctgagcctctgcagtgagcagccatagttccactctctgtcttgtgctcacaggcactgcccagactcccggcggaccttcaccaagcggctgatgctggagaggcacatacagctgatgcacgggatcaaggaccctgatgtaaaagagctgagtgatgacgctggtgatgttaccaacgatgaggaggaggaggcggagataaaggaggacgccaaggtcagacatctcagctctgctctttcactgtcacctgtgctgacaagtgtcccctgttcactctcaacagcattttgtgtagttgtagcttaagtcagatcttgtcaagtactacagtaatcccttgtagcccttcccggctcccagctgctcctgaaagacaacctctcaaaggatctcttaatctacctcataaaattctatatttgacttagggaaattgtccattaaagaagtgtattaagcacatgctagtgactggctgcgtcaggagtggcaggtgtgcagagggactctctgggatggtagaagatcagatcccacactcaagccatattcttctctttatgggtagtgagcctctgtcagctgatggtgtgtatatgcaggagcccacacacacagcattgggtgttctgcttgctgttaaagttacagaaagcaccaaacagcagtttttcctagctttgatggcaggatcagtctagaagaggctgacac

SEQ ID NO: 25563 - DNA, 1276 bp, Mus musculus
gtaacagcggcagttcctgaattcgaaccaaccattttgtatgttacaaatttgaatgagttcaataataacaggctatcatgccttttttagtgttttttaatttttagaactcgccacataaattgtaagtgattgtgggtctcacaacactagcaacttttaagtgtcttagcaccacacgcagcgtgcctgctcctagcaaccgagggctccaaggacaacatcacccaggtgaggatgtggcctgagccaccccagacagcgtcagccttccaggccctacctctgtccacagtggacaaaagaggtcaggagttcagtagggtgtccttcagtccatctgggagagtgaggaagaagagattcaaaaagtggagacagtggagctggcgagttttctaggttagttcacaggctgacttacagggcactaggaggcaggctaggaaaagggcagcctgtggtcagagttgaaagtcataattagacctatagctctctattgtcaggttttgtcatagaactcaccaactattccgaagacatatatatacttcaagggtatcaagtatatctctggttcttgatagggacaaaagggcaggtttgacttaaccctttgctgtctacacagttgggttcctgttctgggtgctactgccaaatgttctggtacttaagtgtcgagacgcccagcctcaccaccgacttagcactgcagcagcctgtactctgcaactggccatagacgagccaccaggcttctagagtcgtctcagcaccctctcaaggtcacctgactggagcactgccgacgacgtgctcttggtcacatccctgtatagttctctgggaaagctataaatatatatattttggttattgttttgtgttttccgttacattttatatcttgtatttatcgcccgatatgttttgtacttttgttttcctaaaacaaagaaatccatgtgtgtgtatatagagacttgcatgctagactgtagtcaatgttcagttccttgaaaagtcttgctgctgtcgggtgtgcaccttacaccgccgcgactgtattcaacccatttcacatgtaaataaatgaggaacgtctggcccttgagcttcttcaagagagttattggtgggtctctgacatcatacagtcgggggagtgactcattgggggacaggctgcagaacactgcaggcttctttccccctctgaagaatggcttctggttcctatcggcgaccaacttgtcgccactctgcc

SEQ ID NO: 25564 - DNA, 1161 bp, Mus musculus
tgtgtgtgtgtatgtgtgtgtgtgtgtaagctgtcctctgggcacagcaggaatggcagctgccctcttgaagcatctatgattacctgcaagacacttgcatgaagtatctgtctgccatggaggggcagggctcattggactgaccccttcctaaggatttatacagctaacggttgctaagtgggagagtccacacgaggggaggggcaggtttatagacagttaacagcagctgagagaagaattctttactatttattttatgtgaatgagtgtctttgcctctgtgtatgtctgtgcaccatgcatatctggtgtcgggagagagcgtgggatcccctgggactggagttgcagatggccgtgtgggtgtgggagttgaacccaggtcctctggaagaagtgcttttaacctctgagccatctcccaacccctgaaaattctctctttaagggcacaaatttctatatatttcccatacctataagtgacactgattaaactaatagtttcagcaagccacacaacagtctgtgagcgttggagctgaaataagcagctggactaggcctatggtgatctcagtgcacagccaagaacccttgagtaagccctgctgggttccctgtggctgggctggaaaacccttgagtaagccctgctgggttccctgtggctgggctggaagggtgcgggaacaacataccagaaacagcagacactcacgcaaagggagggagggcaaggttccaggcgcccaggagtggggtaagcaggagggcttagcaagtactttcagcttggactagtgaagctaaatatcctgagaatgaattcttattaaatttatgacctaggcctgagagatgtctcagcgggtagaggtgctaacaggaaggtctattgatctaggtcagtgcctggatcccacaaggaggtcctttgaacacacatacatggtgacagcatgaatgtacctgagagtgtgtgtgtgtgtgtgtgtgtgtgtgtgcgcgcgcgcgcgcacgtgcacacacacacgcgcgcacacacacacacacacacacacacacacacacacacaatcataaataaaatttaaaacctggccactgggaagaagacagatcaaactgacagaaactgacacacaatct

SEQ ID NO: 25565 - DNA, 3422 bp, Mus musculus
cccatttctttcccaagttaagtgttgtacagagcatctgtcagtttttttttttggattttctttctttttcttttttaggactcagcaagaagcagctgccaaaaaattcttttgaccttcattttcctatatgtacatcatgtatgtatgtgcaaatgttgtctttttgagggaatttagtatttaaattgcttcatagtctaagttattaaattttgtatgaaataactcttgaaaacattcacttttcagtaaaaaataaatgttaaagacaaccacattttgttcatagtactacatgtctttaaatgtcagtgagtctgtggtaggcagagtgcagcctctgaacagagtaatggcaagtcaagacttaaagacagtcggggcagccactggctgtgggtgataccctctgtgtctattattggagggttctttatttatgtaaataaacttatctttttcccccagaatatgaggtctaaacaagagcaccctattcatgtaaccaaaggcatttttagaagtgagaattccctaatacgagactggatttagccatcctttggccctaacatagctccttctgggatcagtgacttgtctgagagctttaatctaaatgccaggagtcagcgcatttaatgaaatgcttttctcctgtgttcagtgtgcatttcatttttaaaggagattttggtggaaaaaccaactagtttcttgcctccatcattttggtgagaacagtcctatggtgagaacttttcgggggtatttcccggtagtgtattcactccggatggggggcactgtcctgaaaatgttccggtaatgtcaatgatagtatggaaataatttttatacttttaatttgtgaaattcatttctcccattttgtcgaacatgtagtttagctccaattgcatgttctgcggctattttaatttacaggccttaccagtacactctggtttacattcaatctctgtaacccaagtttatgacttgcaaactcttaaacagaggggactgtagtggaagcagctttgagctaattgaaagcaaatttgtaaagtaaatacttaactgtttgtcctttaaacactaaaaataaggatgttgtgaaacatccattagtgaattaaccaggaaacactgggctggaaagagttgctgtcagcccagagttagtcgtagggatttgcgaaaccatctgtggcattttaaagtgcagatttcacttttcttttcacagctgggctagactttcgctggcttcaagacaatttacctcttactaaagtaatgggctcgtttgctatgggatccagaacaacactgtttagtatgtccttccaaaattgttgtaagcctttgtaagtttcctctcaagtgtcatttgcatttttgtctgacaacctgaaatctatagaagactttatgagaacacttacattgtggcactacctagcttgcaccgtgtgtgcagtcttgcattttctgctggcatttatcctagaagtgtcacagcacactcacagtgactccacaaaactcactgcagcacacagtgctcctgcttcctcctctgtggagctagcatttgacactcgtgctctaacggagtgtcatcttccagaactcacttacatttttaaaaacttccagacaagtgtcagattgtagactgtgagtcttgggaaatcttcctgagataaaggctacgaaagccactgttacaaagtccgcagtcatgtgtgcctgaatgctaaaggaatcccaaatctgggcagtgtacactttcaggctcaagtccaaggggaagtacactggtcattcctaatgcgattgcagacagtcagtatagtggagcaggagcaggggtccttttacttctaaatttcttttaaaaaatcactcagcaaggtagttcacatagtctgtctgtatttgtttctatcaaaatcattaaatctaaatagctcacttctgagcaaaaccctgctctgtgggaaattatcactgccagaactccttcatgtctgtagtgtcttgtgtgattggaataattcaacttctcacaccagcaagtattttacaggtgccttggattgagacaaaatttattttaaaactttaaatctttatttatgatgccacttttaaaagaaatctcaattatgtaaaattgtcgatgggcttgtttaatatgccgcttgtgatagaattatttaaatgcttttttcagttaaaacttcaccgtgaagtcacagacaataaccagtattttatcatgtattgaaggcacataagtgtttttcagagtatggcccatgggccaaccattcagttcctggaatgcttattaagaatacagattccaaggccaattcgagtccatccatgtcacaactcaggtgggcttcagagtgtccattccccagacaccacagacatggcacactgacaggtgacaagcactagaatgggggtaggggaaaggtttgctgggtgtttattatgggctcagagccgagccatgcacattttcactgtcactgagaccggcgtctgctggttcttctgtactcttgagtgttcgctcaccaactctccactcactaacaactacaaaccaagtccgggttgtcggctgacctctcggctcccgggtgatgactctgaaacctgtacaatcatctttggctcatggcagagcataaccgcgcccatggtgaagcttgcctgccaaagcccttgccttcctgacggtcaccactgctcatctcagatgccgcgcacgtcactagcgtgaggaaaatgggaaagacttgaataagggttgctcacctgctgctctcggagaatcagtcttgtaaaggacagcccgctgtggttacccatgctgactctgcagcgcccacatgctggttggaggaaggcagtgaacgctttagtcatcaggaactttgtgagatcagggtgggatcagctcttacaacttcttaaatctgtatgctgcccgttttaatatatttctcttctgatgttcaagtttaaaagggttttctatccactgtcaattttaattatataacattttgtcaaggttttgtttggttttgttttccctttctgattgttacttgatgctagctggaattcaagaaatgtcaatgactttattcaaataaaagaaatattttagtaaattggttttttcctccattgatgtctgtatcctgctgtcctgtttccagttgctcacagagcagctgtaagagaggaactctattcattccgcttgtaatttccagtcagagcccatcatatgggggaagcaaggctagtcacatccagtcaagagcaatgagaagatgaatatatgactgctcacttgtgctcacacctgccctact

SEQ ID NO: 25566 - DNA, 1184 bp, Mus musculus
agtgcttagtatctgctggttttatgtctggtttattccccatccgctcgaatgatagagactgtacttgacgaagcctgtgtctagcatttgaacattgtaaagtgcagttctcacagtggagggtggtatggtaaacggcatcatttgtgcccatagcttgcagctgcctgtggaaggtggatagagagcacacttggcaatcgtggacagttgtgtgtgcccttttaagcatctccacatcagaatatgtttttctaccccagaaagttctctggcactataagcacactctccccatagcctatccctgttttgatttctgttacttcatatttgttctccctagtaaaattatatagtgcgtataaaacaaaaaaaatgattttaagtgaaaaagttcaagtcggtttatagccctgtgttggtcatgttctggtttgggtatttgtcaacacttggcatgttaaccgtatttcagagtcacagatgtgtagagaattgcagttaacttgtgcttactttttagcggatgacatcttcgagagcataggcgatcgggagctgagacaggtgtttgaaggacagaatcgtattcatctggagatcaagcagctgaaccggcagctggatatgattcttgatgaacagaggaggtacgtctcgtccctgacagaggagatctccaggagaggagcaggaaccccgggacagcctgggcaggtaagctcagacacggaggagagtgggaacagcgctgtgctctgggtggccagtggatgctaagctgcctgctcaccgtgtttccctccaggtctctcagcaggaactggacaccgttgtgaagagccagcaggagattctgagacaagtgaatgaggtgaagtaagtacccagctgtcctgcttcaggggtctgtacccgtgtcctaatgaaatgtgtgtgcccgctgtcccgggttaggtgccctgcagcagggtgagctgcacatccgagggtcaggttaggaggaaacagataatatatgcaaattgcaaacatctaaattttaaaaattatcgtaagctgaaaaaagaagaaaaaatgctttagccaagaagttttctgtagtaatgagaccaggtgtgcctctctggaaagtatggaaagaatgtggagtgacatgtcctaactccctgagaaac

SEQ ID NO: 25567 - DNA, 1218 bp, Mus musculus
ctccacaccaatactgctttgtactcatacggcacattaccgttttaagtacttccaaaactgtagattgttctgtacaacccaagcaaggaggaaaaagatgtatagccatttttttttttcagctgtttgccaagtccagacaaaggctgtttctcggggtcacacagtcaaccccagaaagtcccggtctggatttgtggtcctgactgttgagcacacggcctctccagaggtcactcagtctgtagtgcaccgagttctgcttccctggacgcctctccggctctccccaggacaagcagcatagagcagcgcatcacacttgaaataattcactccgcacagtggatggggccagccaggatggtcacagctgctcactgctgtgagacccagtctccttagttcctgccattagctgcaacaacttagtaccgatctgacttaaacggtttagggaaaatagaagtattattgctgtccagttgagaaaagcaagtgtgagagaccagagctggtgcgtttggaaataggtgggcagggttttgagtgatttgaacacggcatcatcatgcaggagactgggaacgcatgggaagagccttagacacttcctgttatctccagctgaacatgtctgctgcgctgacttagggagaaaggtttggggtagttctgctatcagtcttccataagtaataaatacaaatacccgacaagtcagtcctcaactgtgaaacaagtcacagcacctcctaaaaccgtttttcaatttgtagatgaccacgacgttctttctttcctgactttccaactgaccgagcctggaaaagagccagtgagtatacacgtttctccagttcattttcagttctcaggggtgttgctccagctgtagactctgagaagaccgacctcagcctgggtcttgtttcagttcactgccatttggtcttactgtgtccttggcaaaaccgacgtctgtttagtggccatctcttggtgtatagtgctaaatgagacagatgcttagagtaaatgctcattaaatggtaactatgattttgggtagtaataaaactaagagtgaactgtctgtagttaactaagagactatcttgaagctagtgtcggactagtgagtgtgaggacaggcgacaagctgtctcagcagtctcttacttttgacctgttgtttctctgaaaaagcctaca

SEQ ID NO: 25568 - DNA, 1131 bp, Mus musculus
aaagaatgatgacgttttcaatgaaagatactaaaataagtctattttctttatttctagaaaaataatcctgctatagtagttataggcaacaatggacaaatcaattatgaccatcaaaagtaagtgatttctgcattggttttgttttcagcttgtttttgcaatccttgagaaatacattgcttcaaatctcaacactcttcaaacgaaatcagcgtgttcccttccactagctgctgtattgtcagtaggcaaaaaggcatgcgttctcttcttgttttgaagttctttctgtgagccacactttccaggttaattgaaaggtatctttcaaaaataaatttagctttcaccaaattaacgagtagccagtctgagccaccatttttcaatgtcagtgtcactttaaggcagtcagtgagttgcagagtctctaggtggtaagtgtaagctccttgcttctccgcgcctggctctgctcttcctaccgtggagactacaatgctgccggttctgtataaaccccatggagtggtttaaaatagaaatgcctaggtcagcccttcagagtctgcttcagctggcttggaaggagtttatatagacttgtatctttaaaccctcctcaaggggctgagaatgtagctgagtaaaatgatagcatttacagtttgaatacttgccgagcatgtatacgacagtacgttcagttcctaacagcacaaaatataaaaactgtaaagccccccggaatgatgtggatgccatcctggtcccatacgtagcatatcctatagcatgttacccctcccttcagcgtgtgtgatgttggccttcctttccagtgttgccagagttctgacaggaaagcctttgtcttctaactgacaaggactgtcataagcctcgttgtaacttggtgtttttgaatctacagtgatggtgccactcaagctttagcgagttgtcagagggactttcgtaataaaccctatcctgtccgggcaaagattacgtattaccagaagacactgacagtaagtgacagtaatcaaatactcggggatctaatactgcttttttttttttttttttaattcttgacagaagataatgtaattaaatgtg

SEQ ID NO: 25569 - DNA, 1197 bp, Mus musculus
gcgttttgtattagcttgtaccttgcttggtgattgatggtcactgtgggaactgaccagatgggaacacctataaccacctacaatgaaccagtcagcctatgactccgccctctcgttgtaggcgtggcatgactccgcccacttggtgtgggcgtggcattctagctgcactgtcccacatgtcatacattcagcagcccactctgtacaggtgcatttgtggcttgttttgttttcagacaggatctttctatgttgcccttgcagcggcaaactcctgagttgggactgtacccacacctgcacaggtgacacaagctcacgagcttgcccaaggttacgcttctaactgggttgagagctagttagatcgcatggcttctctcctgtaggatttcctacaagttacaagctcgtctcgtctttcattcggagcaacagaaacgagcacagcttcattgtatcttggatataatgctatttttgtttcaccagtgtgaactcacagtttagctggggttaagctgctcttgggtttgtttcattatgctatgggtgcatgatgtttccatggggacaagggcacacacacacacacatgtccagtggcctgaccttctctgcctgctcttgtcggcctcagttttgtcatggtcaacagcgttgcaatggaaggggatggttgtatcatatgctctgaagaggaagctgaactcagagagatctctcgtaaactgaattgctcccaagaggtaggagacctctgcgctcatgtctcccaaaggctccacagtcagatgccctggctgttagtcacccggctcctcttccctctcttagtggtaaccactgggattgatgggctaacaaggtgactcctgaccagcaggtgccgggatccagtcagtgtgaccgtgagcccgagccgaggctccccttgtccgctccagtgttgctgcaggtgagctgggggaggagtctaagggccgccacccgccaccaggagtttctgagaatatcactgatgtcagcttcatttggccagcactacccgctctaccgggccagcgatgctaactgttcaggtgaagatgcggctcccccagaggaaaggaacgtcccctttgaggagaaatatgatgttctttctcgggaggcctcacaaaaggtatgtggtgatgtgacctcatgcca

SEQ ID NO: 25570 - DNA, 2038 bp, Mus musculus
tcctcctgagagggtctccatgtttagcccaggctggcctcatgatcccctgggctctgcctcccgcgtgctgggattatagctgtatagcataatgctggctcactgtagtgttacctgtgagggacgagaaaagtacacatattttcctattgcaaactgaaatttgttgttgatattttagaaaatttgtgctgctgcaattaaattttttttcttaaagatttatttattattatatgtaagtactctgtagctgtcttcagacaccccagaagagagggtcagatcttattactgatggttgtgagccaccatgtacttgctgggatttgaactcaggaccttcagaagagcagttaactcttaactgctgagccatctctccagcccctacaattaaaatgtttacagttgtcatcgaccgagaactttacattttctttaatgctgccatattttatatattacttagaacatgaagagtgtcgagcaggctttgattccagctgcatgcttttaaaacctctcttctagcctgtcagtacctttctcgagccatctgtcctctacaggtatattcctttctctgtacagtggcagccgacaggccaaatggtgtgggggacaggaggaacgcttctgagagccatccctttataggctagataacaataacttacagctatgcctgcacaccccacagatagatctcatgaaacctaaatatctactcagattcttgcccaaattgttcatacccacttcagtactagatgatgctgggtctgatggggttggtagcaaatctaggagaccacgttgaatctacatttgacttctgcccacttgcaaaaaaaaggagatctggggaggtgagactgtatttcattagttttaaatgtcctttgcatgtttatttgtttctttgatactatttgttttttgaactgtggtactaaagcagtgacattcattcaccaggcaatatgtgtcgagcaactcggggactgtgcgtagccttccctctgaatgtgatgtgagggctgtgtagaatcctgtgtgagactcaatagccgcagtccacctggctgctgcatagatcctacccaatatggctgagctgtgttaagaaagaggtgatgataaaggattgattaccaaggctgaggtgacagtttgaggtggatgtgggtcctgagggaacaggatgatatcagggatttgggtctgaaagtcaggtgtcactcagggtggacagtgtcctgagaaagcgaactgccggtgaggcaggtgtgggggtgttctgagcttctgacacatggacagccagtgggattcccagccgagagagactgaccgcatccacaggagaggtagaacgtggggaggctggtcagttggctgcccacaggatgctatcaccccagcctgggctcctgctcttctctttgggagagtcccaaatgcccctgtatgacgtcttcctctgatgactctgttttcctctgatgactccattctcctgcccgggctgggctgatacatctaccactgaaggaagtgcagagaaagagagcagtgatcttacatccacagtccctgagtgacctacaactcacccacccccacccctgttatctcaggagccagcctaggagggaactctgaaaccttcgccagcatttagtcccttctctgcctgccaccccagtgttgcagatgaaacccagggtccctgtgaagcaacaggtcattagcgatgaaaagcaggtgccctttggagggtgcgctggttttccagtatcctgaccccacccgagaaaccagctgttttccttatatgaagtcatgttaaaaggggatgtgtttcttttcatttctttggtttgattttgtgagacagggtcttactatgttgccccagctggtcttgacctcaggattttcctcccttgatttccccagggctgaacttacacagccgtcagtgtattgctgttatttcgtctcatcttcctcctcttttccttctgtt

SEQ ID NO: 25571 - DNA, 1127 bp, Mus musculus
cagagccttgtgccctgctactacatacgctcttctcctgagtgttggacttgactcaggctgagccccctgccccagcaggttcattgcagaagaggccacagcctccggggccaagtgtgtgctcacccacagcccgacctggatcatcgaccccatcgacggcacctgcaactttgtgcacaggtgagcaggagttgggagtatgcaattacgggcctccgtgtgaccccataaagtattaaaaacataagtgtatggtagatttctagtcttgtaagagagaatcaaatcttaaaaggttttccacttgtgactctaaagaatatataaagaaattaatttttaaaaatatttttggcaaggcacgtggcttttaattttagtactcaggagacagaggtaggtaatagatctctgagttttaggtcagctaagccaatacagtaagaccctgagtgtgtgtgtgtgtgtgtgtgtgtgtgtgtgtgtgtgtgtgtgtgtgtgtgtgtatgtgtgtatacactttgggggggtgactaggtatgctggtgagcatctgtaatcccagcatttgagaggtggagataggaaagtcagaagacgttcaaggccagcttgagtgacattttagggggttctttgtttctttaagtgtttttgtttactgctgacctatagcacaaaggccaagataggatcacaagtttgagactagctttccctatacttaaatattttactgtactttaaaaacaattgcctatagatgagactaatttaggagtttgtctacagctataagacattgaattgaattgaattgaactgaattgaattgaattgaattgcggctcctttaagaagttgcccctggaaaagagggttcagaaaggaagcctggggctgaggtacagaaccaaaatatgtcagtgacatttgagagtcactccttcaggagccaacgttgtgactgcagacggggcttacaggaataaggctgaagggctagcggtccctgacagtgacaggtatgggagctgtgtatacttgccaagagccatgtattaggaaccaaagacgcagaggcaagataggaaacgtggcttccctggagggtgggtatt

SEQ ID NO: 25572 - DNA, 1354 bp, Mus musculus
agtcagggaaacacatcacccccctctgcctgctgtgtggtgaaatccaggctattccactcccattctggtctctcccagttttacatgtcacagaaccatccatcatagctctgagatggggcagcttcggtgctcagtactgtgaagccctggctacgttcccactagggcagggtaggtatcaagagccaccacacctcccacccggccagcttcattccttagctgcgtgtagggactccaccctcgcctgtgggctctttttcctctgatgtgaagttgctgtacgagactgacgtccatgcaggcttccataacccaaatgtctgttcgctctgtccacaggtggaccccttgacctcatgtcgtgcagagtcgtagctgctggcaccagagagatggcagtgctcatagctcaggccctacaaactattaactacggccgagacgatgagaagtgagccacacacagctcgaaggctaaaaacgcagcagcaacctgggaaagagctgtcccggtggcttaagttccaggacagtctaccatagctctccctgggccttgcctcggtgcttagctgattctctctaatctcgtgtagccccttttcaggtcggtacgtgttcttttcatcagagccaaacccagatcttgtgaggggtgtgttagtcatccatcctgattgtttttccagaatgcaaatctcaggtgatacagctttagaacgggctctcaggccctcccctgaccgtggtaagacggaatgcaataaatcagaattatagtggtctgctttgggtcttcctccagcctctggttctcaggcaaggctgttactgctattaccccactggtcgtctatgctcagcttggatgtctggcacccgaccatggcgacggtgaaaactttccctaaatatcagtctcctgatctacaggttgtatttaactacacatagataatctttagccatttttttatactgccttcagttgaccttcagggagtacgtgtatcgtataaattaaaatgctgtatacagaaccctttatcgaagcccacgtgtactgaaagtggaaaaaaaatgagaaactgaaaaacagtgctaaaatattttgtgacaaacatttttgtaaacataaagtctttcaggagttgcaactttttaaacagtggaattttgggggggtagggggacgctggggtagaactcaggctctcatgcagagtagatggactttgtaccactgagctatatcccagcactagggaccagaattttggttccaagttaagctgggggcctagactgttgtgccaggtgactgcagacaaggcccaggtggttc

SEQ ID NO: 25573 - DNA, 1150 bp, Mus musculus
gtgattctcaaccctgtgggttgccgctcctttaggggtcgaacaacccttttagaggagttacctgagaccatcggaaaacatttatattatgatttgccacagtagccaagttacagctataaaatggcaacaaaaaataattttatagtcaacatgaggaatggtattaaagggtcacagcattgggaaggttgagaaccactgccatggagacctacctgcctttctcaattaaccaaataataaacgccctgccatccatagcagggggtcagccaggtatgggtttgtgctctggtttgtatcctcagggaagccactagcctcttgcttatggcctgcccttatatcagaactctcgagggacatccctgggcatcacaggaaagccaccaaatgcatagcgtcagggggatttgctgtcttgctttgtgtttagtgaatttatctccaacattctccaaacagctacagtgcggtgtcctgtacaaattctcccctgtagttccgttgtcactggggtgtgctgtgtcagtgaccagctcctgcttcggtgaagtggctgttgcgtttggtggcaaagaacagtgacatcagtctgtcacattttatcaaagccatggcctgttgctgtcttgtctgttctcttaaaaataatccgatacataaagatgtaaaagttatatatttatgagatacatgtgatatttcaatgtgcactatgtaattaatgtttaagtcagtaaagcctacctggtgatttgccatttcttttatgagaaaacattcaagcgatttgttctagcattttaaagtatatggtactaatcattatagacaggcactttactgtgcacaattaattattatttaaaagttcaaagattgtaacatctcccatggctcaatagattgcctcaccttaatattaaaggaaaccagaaatgtcttgttgggctgctccacagcttagacagattgaaaaaccatttgcattctgcactccgggttcttggtatagctcagaatttggtgcctgtgcctctcctcagatggaaacaacatttatctctgtttttcctatggaggcaaagtgtaattagagcaaatgtttaaaagtgtaagcagggtccagggaggtggctgg

SEQ ID NO: 25574 - DNA, 1150 bp, Mus musculus
tagccaaacgcagcggtgaagtcactttatggatgcggctggaggggcaggcagagaggtgcaagctaaatacgcgtgcctagggtagtgagacaactgaaagaatccacgggtcccaaaggtcgccttccacccgcagggttatgggtggttctcccagctctcgtgggagcgtttgtaactcacccgacgacagatgaccaataccctgggtactaacagtaccgtggtgcagaagtctagggcttccctcccctcctcgggagtcccctccagtccaccctgctcctctctgcccgacgcccagggttccagctgtcaggaccaagagcggggcttgggaaccgcccgctagtctttgggaggggcggggacagcaagcgggacagccagctgctattggaggggaaggcgagggcggaggggccgagcggggtcaagtcccgggagcgcacggccggccgcagtcacgccgcagtcgggagagccagcgcccgagcgcagacgcgcccgccatgagggagattgtgcacatccaggcgggccagtgcgggaaccagatcggtaccaaggtgggtccgggcgcgcgtggcgctcccgcgggtgggcgggtagcggcgccggcctcggaggacccaaccttgcttctccgagccaggctgaccctgctcactcctgggagagcaagtcccggagagcccgccctgagtccccgcgggcagactcagtgatccggtccagagagtgggccagctgaccctcgggatccggctcgaagtagaccaccggtcccagctgtgggttccagagggtgcgccctggggcccgactcagagagtgggccaccggtcccgaagggcgcgtcctcgagaactggccccggggactgaaccccaggatcctgaagcgacctggcggggagaggaagccatgggtctcagggggctgactcggggttccgacccagggtttgcgcccgagtctgagggctccggggagccggtcacaggtcccggtgcgggtggcagggacttctcaggctcccggtctgactctctgtcccttcgccgttccctcgcaagttttgggaagtgatcagtgatgagcacggcatcgaccaggccggaggctacgtgggcgactcagcgct

SEQ ID NO: 25575 - DNA, 1104 bp, Mus musculus
catggccgctacctgaccgtcgccactgtcttccggggccccatgtccatgaaggaggtggacgagcagatgctggccatccagaacaagaacagcagctactttgtggagtggatccccaacaatgtcaaggtagctgtgtgcgacatcccaccacggggcctgaagatggcctccaccttcattggcaatagcactgccatccaggagctattcaagcgcatctccgagcagttctcggccatgttccgccgcaaggccttcctgcactggttcaccggtgagggcatggacgagatggagttcaccgaggccgagagtaacatgaatgacctggtgtccgagtaccagcagtaccaggacgccacggtcaatgatggggaagaggcatttgaagacgaggatgaagaagagatcaacgaatagggagccataagatgctacagtgaacgtctgctcttttcttagccttgatggtgtgggaatggtgccctggtctaagcatgtcactggcccctctcaaaccaaatgcaccacactgttctccaggttacctggaacagtcccagcagaccagggagatctcatataggaaccctgaaagcaaagtagggggctcacacagggctaaagaaagtgaccaccttttgttaagcccccttcccaccccatcagagttagaatagggatttgtttttcatcctcggtgataaaaactaaagccacacagtgctgccttaagtgaatgcacactatggaactttatgacaatccattcataataaaatgctaaacctgatcatcggtctcttgaacttcatcaaagcactgtcatgtggtctcatttttcaggtatctatttggtgagatagcagaacatcacatctatccaggaaatagctgtttggagtagggcctgctgtgtgtgggtcaggcttcaactggctacctgccacacggctaaaccttgccattcccatccctgtgcagaagagggcaagggtgaggtgggtaccactgacatccccacaggtgcaaacttttgtcattcttctagtacaagagaaaccccactctcctgcccctaggcttgccagaacctgg

SEQ ID NO: 25576 - DNA, 1142 bp, Mus musculus
gaagcttgttaaacaagagtggcctgtgcagcctcagagcagggatgttaaacattgtatgcattactttccaaactggcatgctgttaagtgaaggcttttctggaggctcaggcctcctcataagagaagtggcgtctgaggctaacaccaggattatgctgagcatttaagtgagtaactggaaagaaaagaaacttggatacaatagtagtagctagcagtactgtgcatactgagataggagcaagacatgagagcctctgtgtgagacagacttgcttttgttgttattgctttagagatataaacatgccaagattctcctgtgcctcacgtaaattacaagattctcctgtgcctcacgtaaattacaagaatattttaaactactgagtttttgaagtttgtcactgtttgccctgatatctgaagcacaggaaactcagcagctgaactgttgtgtgttgtctctctagctccttcctgctgagcatgttgcccaccgtactcattatcgcttttctactctacaccataagaagagggcccgctggcattggtcggaccggccggggaatgggtggactcttcagcgttggggaaaccacagccaaggtcttaaaggatgagatagatgtgaagtttaaagatgtggctggctgtgaggaggccaagctagaaataatggaattcgtgaatttcttgaaaaacccaaagcaatatcaagacctaggagcaaaaatcccaaaggtaaaaatctacttggagagaattaactccaaggtgtgtgtctctaaagatgtcactaatgacctagtcaactcgttgttcatcctttctgaacgttgtttctgtctgattcagtttttttttttccttaagatttatttattcattatatgtaagtacactgtagctgtcctcagacactccagaagagggagtcagatctcattatggatggttgtgagccaccatgtggttgctgggatttgaactcctgaccttcggaagagcagtcgggtgctcttacccactgagccatctcaccagccctctgatccagttctatagcttgttttctatatctcatttataaattttgtgtattcctgcaagtgttttctctcctcatggaa

SEQ ID NO: 25577 - DNA, 1190 bp, Mus musculus
caagctgtggggtttgaggtatctttaagatattcttgctcctttttcctaagtcaatgaagcttgccagagaagtttcccttgaatccaaggtcaagacctgctctggggtctcttagcctcaatctgagctcagcttgtggaagctgtgtgcaggtctgtgtgtggagagagagagtcctggtgtgaagtctaagctcttcaggttgtttcttcatcaactagagctaaaccatccctctctctagtcagatgtctcaccaaaaagagtcaaagaagaaaggaaaggaagtgtggacgaataaagaagacgagaggcaagtgtggctggggctcccgccaagtctggaagaggtgtctgctggaatctttcctcccagtgcagcatcaggcccaggcgccagctctgtgaggctgtttgtgtgaggccgtttcttgggagtggtgtggagccctggtctgctgggctctgctgtaggtgctgtgggcactgtgctgggcagtactgggctgcactgcccctgtgttggttttaagcttttatttgcttctggaaggagtgttacttctgtgtgctggctctagtcactccaccaaaagagagctcccctttcctcatgccctgccagctaagctggggtaggtcccccaaacctttcccggggggcctggctgctgtcctctgttcctggtagtcccatgtccttatagtgtcccacttgcctctgaaggagaatagaagttgctctctggccctcagggtccccatcatgccctgcatccagagacagtttgggagctctctgcacaggccactatggattccagcagcaactgggatgtccatactcaagaccggccttgaactctgtgtgtgactgaagatgcccttgaactcttccttctgcttccccattcccaagtcctgagaatacagacttggactgctatacttgactctttttggttgttattcttgagacagattttgctatgtagccttggctgttctgaaactcatggcaactctcctgcctcagcatctcaagcgttggaatcacaggtgtggaccaccatacccgttatgggatgcttgtcaagtcccaactgtcctttcaacaggatctcttgacaagcctgggtgtcccttgaagacggtgggaacctcttgctatctacaaagagctgtc

SEQ ID NO: 25578 - DNA, 3644 bp, Mus musculus
tgtcggtcccccccacacacacacacaggttctccacaaaatccaggtctgtggacaagtccgatgaggagctccagtttcccaaagagctcatggaggactggagcacgatggaggtgtgtgtggactgcaaaaagttcatctccgagatcatcagctcaagccggcgcagcctggtgctggctaacaaaagagccaggttgaaaaggaagacacagtctttctacatgtcctcggcgggcccctcggagtactgcccttcagaacggactatcaacgagatctgagccctgtgccttcccgctcttttgtgtgcagagcgggcagtgcaacagtgctgcaggactcttcccaggggtttccttcacaggctccgtctgcagcaggtcaggcctgggctgcacctgagacacagactcaaggctgtgttcatatcagccgatggttggtaggaggcaggtcagccacttggtcatttgcactcagaaagcctaaaacttgattttgtgtatgtgagtcgggaagctagaaacttccttagttcagttcctcaatgttcttcggataatttcctgactaaggcaaaaagcttcttgtgtgtgaagtctgtctgacggagtgtggatgttagcacagttgtaagcagtaagtcatattggcattccacgtgacagtgttcctagctcatgtacataatgtccaaagccctgccacacaccggctccctggggtgggccaggttggctgtcttctcacagcacaaatctagaaggccttgctgataattctctttggggctctggctgcatccagcgcagaacaatcatgtgagctgtacaccgcacgggtggcccttctctgagctcagggtctgccccggcacaagcctcagtgtttcctgagctgctaacaggccttcattcctattgtgaatgtaatatggttttgaatagttttataatacacgtctaagaattaagattttgtggaagtttgaggaaaaaggaagactaaaatttcatccaacagatgagctggttttggttaactgataggctgtaacagcagggatgccagcagaaaggagctatggctcatacattttcacctacattttccataactttatagtgtggccatcgtgactaaattaaccacagtttggtatctgagtctcaaactgaagattatttttataaatgaattttaaaagaaaaaccttggctgttttaaaatctcaagaaaatgaacctgctgccatgcataattttttgatgcttttgcactaggtatcttgtaaatgtcactgcatttctgatgaagggcgactgacaggtagaggtagtattgtgtgtctgaaattgttcagctcctatgacgcaccatgggctgccctcatttccatatgcttagaaataactgggcaatcaaattaccactaatgtttgggaaatgagtgaaggcacatgcacagtgtaactcctgaaagctctgacaaaccaccctcattaccaccactgatgacatctccatttgataaaaggcatgccagtcgcatttcaccatcattaagatacagtaacatttcccattaaattgacaacgacacctcagaaatattccagtagtcatttctaatgcattgaaatttatagtttagtaaatgcctttaaattacttatactgacgaaataaactttaccagttgactaacgtaatgcatgttagtagttcatctgtactgcatgtagaagtgggccgccagaaaacccttacagtccagctgtttttaagactaagagctgtaaaaattgcagtgtgtgaatcccatttatacagttttccctgagaccaccagaacgttacaccacagttagataggaccaccactgctatggctccaggcatacatacattccagactggtttcctggaaggaagcaagaaagaaggaatacacctgtgtggctttataagcatgcacatagggtagcatgcttctgtaaaatgatgattaattagcatttgacttcccacataagacactgagcccaccactccataagtcacaggtcacattcacaagtcagtgatctagtaaatgtcacagattggacctcattccttcagcctcacagtactgtgcatagtgtttgggcattaggacccctttaccagaacatcaggatataaattttccagcacattaatgggatttgccaagtgtgttaagagttcaagtgtataccatgcccagtaaacaacctgcaggaagtagtggggaaaaagggcacgagacaaggtagaaagtatagaaataaaattagcattgtttgggagacaccaaaaaagacatgtgcaagactggctcttccccccacgccccaagcactcataccaagctaggattccataggctagggctttgggccagggagctgatgctgctggtgtgacttggtttaaaagtcctagctgacacggttcaagcttcctgttcctccagccaccttgtgcaggaccgtttgtcctgctttcctgctgtgttgctctcttagtttgacatttgtttatggctgaccccagagtctgatgcatctcctgaatcgatctgaatgtccctcctgacccctccaggtgtgagcaccagccattggtcccacagaccttgaggtcagagtatgtaaaaatgcttgtaaatattgtaacatactcattaatatttgaaagtcattctgtcattggcaatggaaattaattctcccaagataagcaaaaattaaataattgattttgcacattgacttaatgaccttaattacttgatttcaagtctcagccctttaaaattaaacccaaaagttattatacagtcattctaaaaatgatgttttgaagagatatgtggttaataccgtgaactcacgccatgaaatctgtaaggtttttatttttctaactgtactaatggaggactaaacttgaggtatgaatgtaggagacatggaagtttttaaattatgttgctatttgttcaaataaaacagaaattttgcacattgaaggaccatgaagaaatgtgtcccactgactgggctctgacctggcttcccaaatgtaagcagagaatggctgacattccagggaaaacgacagtgctgagtgtgctccagtgagtagtatttcagccaggagtgatgccacatgcctttatttccagcattccagaagtagaagcagaaaatctttgggatttcagggccagcctggtctacacagtgagaccttgtctctctctctctctctttttttttaaggtattttattttagaatttttgaagggggaaataaactggctttcatcataacttctgtgttgaattcctattgtaaaatggtgatatctttcaggaattaagcttttaaaaatcactcagtttgtaaagacaaagttggtacttgcagcagcagtttaaaaatattttaaagccgggaggtggtggcgcacacctttactcttagcacttgggaggcagaggcaggtagagctacaagtttgaggccagtctggttggcagagtgagctccaggacagccagggaaagaatttgtctcttttgtctctacatacatacatgcatac

SEQ ID NO: 25579 - DNA, 1162 bp, Mus musculus
gcctataagtgactaatgtcattgacaaaaatcataagaggccattgagaaagcatgtgagtttatatatttatcttaaattgagcaaatttaaatgttttaagagagcaaagataagcattaaaaagtaattcaacttactctaagtaacgaatgatgaatattttgactgcccattctgtgtttctgtgcagagggttttattgtcttattttggtgatactaggaattagatcaagggcttcctacatgctaggcaaacattaccactgagctatacccacagtgtctcagttatgtagccctggctggcctagaactcccagaaggttgcttgcctctgtgtacagtttcttagtttagctgctttatccactggtcttcttaagaaataagtgtatgccagcccactatccaaattatttattcttttcatcacttgctgttgcaaataaaatgattttatttatttatttagttttggatgtcttgactttttttatagtgtgtgtatgtgtgtgtgtgcttgtacatatgagcgagtataagccttagagtttgtagcaatcaggccaactttgaggagcaggctctgtctgtcacactgtgggctctggagattgacctcaggtcagcagtcttgccagcaaggaagtaaggaagtgcctttaccccctgagccagctcgctggcctaaaaatggttttttgaaattaaaatctaaagataccatgcctagttatggttgcacaggcctttaatcccagtagttgggaggcagaggcaggcatatctctgagtttgaggccagcctggactatagaaggggagttccaggacagctagagctacacagagaaaacattgtctaccattaaaaaaaaaaaaccaaaaaaccaacaacccaaaacaaaacaaaaacaataatctaaccaaccaagcccccccccccaaaaaacaaaaaccctaaagatagctagatactgtaaaacttaaaaaaaattacaatatttataatttaatgttttttagaagtcaaaatattactccttcttcattttcatctcttgtaagactgacatgactttagagaattaatctattactagaattatacgtaaatccaccaacagagaatctcttgtagttttcaacttttgag

SEQ ID NO: 25580 - DNA, 1182 bp, Mus musculus
gttctgcctccttccaggtctgcgttcttttgattatcctccattccctcccaaaagaattgcttccattgacttatttgcgggcaaccagcaataacggttgataaccaaccagttcagattgcttcttatgttgctcaaaagtttcacctcttaaaaggctcaatttttattggcactgggtatttgccattagttttagaagcctaaaactctacaagtggtatttatctactttataatgttataagttgctttcctgtttttgttttgttttgttttttgggggggttgtttgtttgtttttgagacagtgtctctttgtttagtttgtctggctggcctggaactcaagagatcctcaggtctctgactcctgggtgctaggaataaaattacaccaccaccaccaggcgtaattttgtaaatcttaatgtgtggtttctccatagatggatgtccatggcagaataagagaaattcttgcagagactatacgagaagaattagcaccggatcaacaacatttatcaacagaagatctgatcaaagctctaagacgtcgaggaatcattgatgatgtaatgaaagaacttaattttgtgactgtgagtagcagtttacaacataaggtccacactcgtggcttctcttagaactaccataagttcactctgtctagtaatagccatttttcctagtttttaagaagaatttatatgtatggctgttttgcctacatgtaggtctggtgctcacagtgttcggggacagctgtgatcctctggaactggaatgagccaccagcacgatgctggtggggggaattgatctcaggtcctctggaagagcaagtgctccaaactgctgagtcatcactgctgcccctgtaatgttcttccctctgtcgctgcttgtgtttccagactgggtttctatgagtagctctggttggcctgaaactcattttatagaccaaggtcttaaattcacagagattgcctgttgtctgcctcctgagtgctgggactaagggcatttgtgttcattgtcaccgcctggctccttttctgagaggttctaagttggccccaccgtgagttggcaaatagagagttcatgagataggagttgttggacactgtatttctttcgctgacgtgacagaaacttacgctatgc

SEQ ID NO: 25581 - DNA, 1197 bp, Mus musculus
tctaacgcaattgatggtctagatcaatacggaccctaactacataaaaacatttccacggataaagcttagggattccccggtgcgacttacaatgcaatatatctgcaatctacaaacgctacaggtcgcaggcaacgaaagtctcagctagcagacaggccttgatagggctgacaaagatgctaatcggacagccgcttctagggataacttccaggtttgtttgtttgcaagctaaaagcttgaagcagaaacatgtgcccggctctcctaaggccaggtggcgcttcccgggtcggggtggcgatcgcgtcaactcaagtagagactcaccatcaggagtgtaaagttcgttaggtcggggaccgactccccgcagggaacgaacatgactgcagtgggcgtgggagcagcttgagcgcccgccgggatagcgaggccacctccttgggacagaaggcgcaactcgcgatcgtccggggtccttcgggtccttcgggtcctgcaggcgtccagcgcgctgcctgcgcgcagggcagaacgaggctggagcgcgcggcgggtagcgctccccggggggcgtaggtcgaggactggcgacggaggacgtggggaccgcgcgcgcgggatccgcgaggacgaggaggcggagcggtggacggcgtcgatcaggcggctcacaggccagccccggcgtctgtcagtcccgcaccgtttgaagacagttaagttagttggggcgccgcggctgccggattcccgccctgccaggtctgacgcggccgcggcgctttgtgctccgcccgccgctgatgctgcgcgcccgggacgacgggctccgccgctgcaccgtgtgaggtgggcgactagcggccgcgaggcgccagcgccggcatgtcgctgcctccggagaaagcctcggagctgaagcagctcatccaccagcagctgagcaaggtgaggacctcgggcggaccggtccccgcaaccggagctgcggagcgggcgcgggcgggcgggcgggccggcaagcttcggtcgggtgtgagagccgagggagccgctgtgaaccggaggcggtcccggcgctttccagatgtccacgtacaagttagcccgaggccagatgtttagggtccctttacaccaggaaggccgatggcagtaagaagttatgggagacggggcgctcaa

SEQ ID NO: 25582 - DNA, 3009 bp, Mus musculus
taatcaagaaattttgctgtttgattttgaggttttaagtatttgcaactatagaaagtgtttccagttactatggagaagaacaaattattttatgaaggaaagcatagtagagttaatttttaaaaatctggttttaggttacagctttagttctgtgttattttcttccataaatagctttgatctgttttcttattgtgccaataaccatctatgttagatctgtgatgcattctccttctccgtttgtgttgtgtcctttaacagaaagcacagctgagtacaagctagctggagtaactttgctgttttgctgcttgttgcatgcacacaggaatggaaatcaactccttttccccttccccagcgccgtttgatctcttccaagatgcaccagcagcccgttcactactacacacagtccaaaaggcctttaaagtgacagtgtatataacttttgtactagtcagcctcctgacactataaatggaaaggctttttgttgacacatcatcaccaaaacaattttttgggatgttctggagactaacttgggaaagcattgctattatcctcataagcatttgggaggagggaaaatataattttattccgtttggagaatataggaatatgtcttttattttctaaaacaataagctaaaatgatgagtttttataattttaatttgaaaatcgaataaatattttcttaaagattgttttgagtggtaatgtgtttaccttttgtagaattgctctataggtgatattatccacacaacgactttacaggtgatattatccacacaatgactttacaggtgatattatccacacaaccactttacaggtgatattatccacacaacgactttttcttgtaattaaaaatactagtaacctggcaccacagtctatacaatggtttgtagccaagcagcacattagcatttgctagtttagaagtggaaacacttctaagttttcatctcatacccattacaaagatggatgtttctaatatatgcatgaatgtttatggtatgatcctacacatcttcgtttcttttaagacaatttggaaacataagttgacatttttcagaaaatgtgcatgcaattgaaattccatgtctcaggatttttaatgtgttgtttcaatgagttcctgtcttttgacacttttgactttgatgacaaagttatacacctttttattgactaaactgcatacatattacgggtaagttataagatggtagatataattctatgagccttttttgcaccaaaattctgtagctattctaagttttttgcaggaaactaaggctgtccaatggttgtatttttcaaagcctgtggcatgaccagctttcccgtgtagtttattggagttggttctcagtatcatgtacgcacctaggaggtgtgcctgccgctgcagcacatgcaggactgctgacagtggaaagcaatgtaaatgaaagaatcagatgggattagacaaggcttcacatttataaaatgaatgtctctgtaacataggtactggtaatttgggggggcattttaactttaacatattgtattttttttcaaacttttatacttcttaagcaaccttgattcaagtgcaagtcttgatttgtactgttgttctatcggttgtggcatgaatatacaagctttttttccttccttccagcatgttttctcttctttggttctctttgtatttactgcttttctctttttcttctgtttccctccctcctttcccctctgttgtttttgttttggtgttttgttcctgtcttcattatttcaggtatttctttccccctctggattccccacgggctggatcaagatggtccagttgtgcccagctccttcctcctcctgctcctctgctagagcactcttgcgatgccaacctccagtatcctcaccctcgcagaggatacctctctcggcctcttaaccccttacctgagaatgaaggggtgtaaaatactgacgtaaaggccttatccagatgcttgtaaatgcttttattctgggctgctttttggtttcttcattttcttttagaagatccttcttatttagggcatgtcttgcatgtatcacaactcaagtgtttgaaaccaaacctttttttgtacttctgcacaaggaagccttggcttcactagttggttacctttgatgagaggagcttcagaaaaagcaatattaactgtgaaagattcccagtatctgattcaaagtgcctgccttgtaaattctgtgtggagttgttaccatagagttcaggtttgtctgttgataggtagcttcataggagagcgtatcattgtgaacttcactctggacttcagacattaagaaatgttttgaattttatacgctgatgttacagatgactgtaaaataaatcattcctgtgtataaagcagcaaatcataaggatatttttgtcttttttttctttttttaaaggaaaatgcctttcactactgggaattaatacttaaggattttgtaattatcctccaagtaggttatttaataaaaatatttttaaaaatgtgaatctgttgtcttataaaaaagccacatgtacttgggttttgagagtctgtataggctgacctggaggtgaatatgtagcctagcacagtcttgagctcctcacataacctacatttacctccctgggattacaggcttgtccccatacctggctaaaatggatgcactttaagataatttagacatggcgtccttttcccatgtcacaaaacaaaaccaaacacaagaaaacacaagccagaacaacctcaggggataagcaagtcttacacttaaaaagtacagtgccaggtgagatggctcagtgggtaaagatgcctgccaccagacctgaccacccgagttcactctagaaaccacacacatggtggtaggaaagaaccaacccctgcaggcagttct

SEQ ID NO: 25583 - DNA, 1143 bp, Mus musculus
ttggccaagacagacggtcagtgtttacctccagaatcatgaaaagaaaaaaaagaatgaaaaaaaatagagaatattgtcaataattcagaattctttttaaaaagattcttttaaaccgtacttattaccagagcattagtagtaactagtaatactagttatagtattacaatactataattcttacctgtttttaactttgtataaaagacatgcagcatgcattctttttctttggctttttttgctttaccttttcttgctaaaggactgtgtagtcagccattttccttagtgtgttgtgttgtgttgtgttctatgagtgttagtgaatgcttaggctatttgatatgctggaacagtctagtgcctgtgccttgtcggctgacccactccaccacccctgtcctgtgcgtgtctctgttgagtgcaactgatggttcacacataaggttcgtgacttacactgaggttcctttagaatagtttttggagcagctacaccaatatagttgcctcccagtggtctgtaatgatttgtgttgacatatgacctctcctcacagagtggtattttttttataccttttgagtagctctgtagtgggacttctttgttttgatttgtattcttctgattgctaatgaagttaagtacttttatacttttattggtcttttaggtagtttctttgtgaagttccatttcatggatttccttatatcttttggtaggtcatgaaagttttacctatttcctttcagtctgtgacttgtccccccgaccccctttttttcttcaagatagggtctcactgtatagctctagttagacttggatgaactctgttgtccaggctgggtttgaacttctgtgagtcttcctgtctcagcctccctgatgctgtgatgtcatgtgggatccaccatgcctggcttattagccttttcacgttttttatttttaaattacttctttaattttattttatgaggtattttattggtgtgaggaagtcagatttcctggaactggaggtacagatggttgtgagctgtcatgtgggtgctggaaattgaacctgggtcttctgaaagagtagccagtgctcttaactgcttactcagctttccagcctc

SEQ ID NO: 25584 - DNA, 1203 bp, Mus musculus
gaaaaagtatccatgccctgggttatccagagtaaatctggtttagcaaacatgagagaaactccttctctgaggaccggatttgaagatggagaacctaactttacatccagtcaagatatttcttccgaaagtagggaacccttggaagctggtaagatgatggattcaacatctggctccagtgagcaggacctgattggccaagctctcctggacaagccagctctaaaccaccggtctgggccagctgtaccgaacctccctgagttgatccagaagactgtggatcaaggtcaaagattatcatctactcgtctgtcagctgccagcagtgaagctagcagccaggttcctaatccgggtgcctctggaacccagcacaatcctgcaccccacatttcagctcatgcttctgttgctaaggtgatgaaccagcctgctgtgtgtcctgccctctggactgggcactctctatacatagctcctggcgccccatctgggaatgccaccttgtcacagtgccatgcaggcatgcaggtctgtgggatttcagggtattctccgtatcctgctgctgcaccagagcttgtggcttctgggctgtacttaggaccaagtcttgcctctggattgatggctccctcttctctttacaacctgtgctctactgctgcaccccagaacttgcttagtacagcaaagccatttcctatggttacaaactgtgaaactgagccacgggactcagggatgatgcctgcgtttggtaagatgcattttcttctctagtactgcttgttgttactacctaaaagttgatttcttttcaaatgggtccacaaagcgaggtttttttttttttttctaaagcaatggtgttcggaattaatttctttaattttttttaacctttaagatttatttatgtgtgtgtgtgtttatgagtgtatgcacacacacatgtgcacatgtatgcacacacacatgtgcaagtgcctacagaggctacaagagggtagcggatcctttggagctggagttgcacgtggttgtgagctgcctgacctgcatgctgggatctgacttaggtccttgttgttgagcagccagctctccagccccctccctttagttagttgtttttccctatttaaagacacaggatgtcaggttgaccttacacttgctatgtagggaaaa

SEQ ID NO: 25585 - DNA, 1184 bp, Mus musculus
tcctgcccatgcgtaataccagacagtggccatggtgtctgaagctctgtcagtagcatacttgaagccacctgagacttatttttccatttaattgctgccaattgcaagaacaccagaagccattggaaactggtatttttggaaaatttggtgtaatgaagttcaagatatactcaaaaagtacgaggtttcaccaaacgagtgtgctttccctctgtgcgtcccatgaagatgaagttgaggtaaagcctgtggtacatttattaggagagcagatttcctaggaagtattcccagtcccaaaaaaggaaaacagaactgtgtgcagcaacgcatgtgtattcttcactgcctcgacagttgtgtgccttgtgtatagcgacaacatccacaggtcctgcacccagaagaccatgtgtggctaatatgcccattccttcaggttggagagcaagaatgatgggccctcattggccagcagttgtcacttcatgtggacactgaggatctggtgggctgcccctgccttaagtggccccttgtctttagctctgcttgactgaaacaattatgcatgctttgttaaatgaaaatttggaactacctccagcccgggacattggttatctgaggtgagctcttgaacaagctaaagcctgccgagcccaaggtccgagctgctctttgctgtgtgtgggaagtatttataaaaccaagccacctcagaaccccattgccaaagattttgtggcaaatagcatgtcccaacttacctcagggtagcgtgagattctcagcacatggggaccatgtccggctggcggtccctggaagagtggggtggcatggttgtgcttgggttcccagccacacttgctgtctgttcaggtgattgttttatactcacaactgaagaaatgctaagtgagaatactacgtgacagggtaaattacaggagccactgaacaggactgctgtggtgtcgaaagatttcaagggaattctcaaggcctttggggtgtgtagtgtagtgtagtgtagtgatcgctggtgcagtcacattatcaggaccagcttttactcttaactttttttttttggaagtaaaacagagcaaatgaaatttacattcttgaggcaaaagttaaagtcttgacaaaaatacagcatttgaaactga

SEQ ID NO: 25586 - DNA, 1457 bp, Mus musculus
ttttggtagctacagttcatttgttaatatttgtttcagattttcaaaaccgggtctgcatacgaccaaaaataaagcaaatttaaatggtcaaaagttctccctgacctatttaagtgcccttcctgcacaccattcagttgttggcatcaagaactcactgttgagttgacttaagcaagagcgtgatgtcagagtccttggagccttggccttaggcctgactagcaaaggagcgtgtggtgaggatgtgtgggtcttggagttggaaatttgcagaacaggggcaggagaagcagtgagaagggtgtcacgtattcttcaaatagtaactgtgcttggtctccattggcccatgtgtatggtatttgccaattttgaattgagtagggtatccatttaaaaaaagaaagggaaggaaagaaagaaaagtcatatacctaagggacaggaaagtttggacctcatgtctttcctgatgaccggaatggcctcaggacacttctttcccagaatccctctttcaccatgaactttggccttttaaagagactttcctcttatactctgagcttctcacaggtgagtgctgagtgaggctcactgagttgattttccctgtgggttttttttcctttccctttgtgacgtctgtgtcctttgttcattctaaccagtcaaaacaagttgatatctcctgtgtctccaggattgagctttgaaaattaaggtgtattcttccttatacagcattgatagtcactaacagtaattacagatcctgagtatcccgtggcaattatttggttattttgataagaatggtcctcttagcaggaagaatgcaccctgatgcagaacacttgagggcagagtgggacgtggcttattctgaggattcacttgaatggccttgataagaaaggactctcagtctcagagcatggctccttagggagtgagccatggggatcattgctgttttctctgggaaataatctaaagaacaaacctcgggagatgagcgaatggctcgctcactgccacagcgtcgcctctgcctcctcctggccgcctccctttgtccagccttttctgccttgaatgttgcccgatttaaaggttagcaaacagtccctgaaccgaggacacatgcagggagtgctggtgggcgtctgctcggcagggctgtgaagcctaacccctggtcaagcgtgcaaactctcacggagcgtacttccgagggcctgaggcttccagctgaaacccaacttcctttttgtttgaacaagatgaaatctctccccctttttaatccaaacatatagtaaaagacacgttttgtcacatttgacaattccattcaagatgctgcacaaaacaacagcatctctgcatcatccttttccaattaaatgtttattctttatcctggatttgacttggggaagggtaac

SEQ ID NO: 25587 - DNA, 1335 bp, Mus musculus
caaattgtgtatctgaaattggcttctagtgctcctaatggtgttaaatggatgagtagaattttgtttttaaatatacttaagtgatctatgtctacccccaaaccactgaaatcatagaacgtagagaatgaatgatgctttccttccttggtgccgtctgagaacatagccctgatgccaggagtcactggatgctgacgtctctctctgttctttaggtatctacttggtctttgcctttgagaagcagcagtgagcacgttgctttagagcagcactccatcctcccaggtggagcagaccatctcagaaacatttgacagctgtttgtttattttaatagtaagttctcaatgtgtaggatgctgccacaaacttcagtgtatgaatttgacacttactgtctgtgacaggttagcataatgtgtgtacatagggatgagttgtcttgaagatctatttttaagtactgttgtaattgttcccctctactgtcaaaactctagcaaggcatgtcagagcagctgacctccccagtgctgtgatgtgtgagcagctgacctccccagtgctgggatgtgtgaatgtgtttacagagctgatttgacagtcgctagaattggcagaggaacgttcacgtttccttacagtgtttttcaagatttaatggattgtgttctgtatacttgaatgtaagtgttcaatatatattgctaaagttataagattaaattttgattttagattgtcctaagagctacctggctagattttgaccgtgtttcaataaaataactatttgctaatacactgcaattctgagactctatagacgaacttagatggcagcacagagttagtgtggactggttggatgttctctttagaatttcttaccgtagcaattagcatatctaattactgaggttgtgattaaggtacgagtaacttcactggacagtgattccatggctagatttccttaaggttttgtgaaaatgccacgtcctaattgtgttccataatgttttccgatggatgtgtgcacgtgcagtaggaacagcacagtgagatgcatttcagatgaatcctcaccaataagacaactcactcaccaatgctgtatccttccaggtcccaacatgcagctcctgcccgtctcacaacactgggactccctccctaaggcagaccccgctgtctaattgtctttcagacattaactgttgagacgttaatggtgtagtagtcggcgtggctgccttccaagggtttacttgctgtcccacagccatcatgattgtcattgtcagttagagagccgtcttctag

SEQ ID NO: 25588 - DNA, 2031 bp, Mus musculus
attgatggttatcccaagcagcaagaagagaaatgtggaggtcttgggcccttccctgaggactcagagaaaactggcctgggtctgagatgggctctagtcattatacctactgtcaaagacataggagagtttccatgatgtcaccctacagaaacagttcaagcagctgcctttttccttttgtgttcctctctgttgaacgtccatccctccacccctccttgcagaagttcagtgactcaggatggattcttgaggacaagaatgggaaggtggtcttttccattgtttcaacaaataagactttgcccagcattcttggaacctaaatgtttaattttgtcatgacttgtagtacctgatgagaaaggtgtggcttttcattgcagtatccagaaagagtcccttctcttgggttcagtgatgaaaatggttcagatgggctgttcagatacgtctaggcctgtcacacagtgtatgctcaggttgtttccaaatgaagatcaggggctggagacagagatctcaggttaagagtgcttgcaactttcagaggactttagtttggttcccaacacacatatcaagtggcttagaactacctgtacctccaattaaaggtacttcagcactctcctttagtctttgctggcacccgcacatacatgcagatacctacacgtaaataaaaaatcaaaagaagagcatgtgggccatttttgggaatgacacaacttgaactagaggtagttggcttggggacaaagctgcacagcagtaggacctagaacatggacttgtttgggtctagaatttactcgggaacagtccagtgtatagtgttgatggagagaagctgaggagttgtctgtccctccccatccttctggtaacctaacctgtacagagagctgcaagcctgtcagagctggctcacacaccacttcagtgcccctgagcacattagggactcttaacagcaagcaaagactaagtagagtcactcataagtagtggaccctgtctgataactgagtggcagagagaagatagagatttctcaaaaacagagccctgttgaaacttctactctgtagtgggcttaaagtcgtatgttcacacacttctcagggtgtaacaggtggttcctgcagctttgagtgatacttactgaggccccttaacttagatgtattaattcctgagtaaggcgctttagtacataaggtaccctggcaggaatagagatagattattcttcacggtgtggagacctggtcctctaaccggacttgtgaaatgtatgcactagaggtgatggtgttcccccaaccttattgtgtggatctatcagtgcaaaagagcctcttaagagaagatgctgtctcagtgtgaattaagtaggcaggcctcattatgtgaatttgcttgcttaaactctgttgaagtgttgtatctatacaggcgatcagggattcttcacagacagaacatacatgaatgcagaagccagaggttcccttttgcctactatttcttccacagccaccatccacttttaagcaaaatccatttcatctggcttgaaatatgtgaaataaaataaaaaatacgttccttggctttcactcggcagtgttcatgagactcttattctcaatagctgtacattgttcattctcatgattgtacagtattccgtgtatgaataaacaacattatacagtggtggtttgattcatttctagcttgggaaccacaggtagccaggaaatgagtttttgtgtaggtatccacatttcctactaggaataagattccagagtcatagcgcatgcaccaattcatattcattatcagctacccagaagctgcaattaccctgcgttcttgataaagtcaactgggatttgagtgagaatggaggcttaaagatatgtttaaatacttggtccctagttggtagatgagaagaattggaggtgtggccttggaggaggtgtcactaaggaaagacccaaattaata

SEQ ID NO: 25589 - DNA, 1215 bp, Mus musculus
gggtttctacatcatgttttattacatggatgcagtgtaaaactgactcaggtctgtgcccaaacacacagacacactcacacaaaggaagattaaatctgttttaaaagaaatggtgtttacggctactgaaactgttgcaagttccgttaacagtgatggagtttcccaaacatttgacaagtttccctttggagaccttttgttagtgtctaaaaaaaattcctgattgttttgcaattgtgtgtgcctgtgcatggtcatacacaggtggggggggggggggttagagatggtggggaaatgaaatcagaggcaaatctggcttccggttttgtgggctctgctgataaattttcttcctggccaatgtgctactgatcttaagcccatgtcttaagtatgtattttgctgggtgacctttcctgcagtctggcaaacaagacctagaaggtgattaaaagaatgtaagatgtaaggccctgatacagtgcagtctgccactagaagaaggagtgtgtgtgtgtgtgtgtgtgtgtgtacacatgggtgagtatacttacctatgtggaggccagatgttaacttgagtgtctttgattattgttctctaccttttcggatctgtgttgtttgtgtgtgtgtgtgtttgaagtacttgtgtaatacaaggtcctctcaatctgtgtgtgcagaggaccaaggagattgagcctttccatctatcactctcttcccgactcctttcggacaagggtctctgtgaactacaccagtggccagaaagcctccgtgattctcctgtctagcccccatccctctcctggggatcacaagagcatacaaccacgcctggctttttaagtgggtgccgggatttgaactggggcccttacacttaactagcgaacattctcactctctgagccatggcccctggccttgtattttgagactcttcactaatccagaagctcaccatttcgtctagagccgctggtctctgtctcctgggatctccagtgtagatctccctgtcccccagtgctgcagttacagacaggcatcgccacagccagctttatatggatgctggggcctccagctgcagaagaagcactttgccttctgagcatctccccggcactatgctgtagaatttttctttatgtgggtgtgtgtgtgagtactggtgattgaatatagttttttaa

SEQ ID NO: 25590 - DNA, 1193 bp, Mus musculus
tcccctgggattttcagaggtacacggttagaatgctacaatgttaccactgtgccttccaatgtttatatcatcggaaacataacataatcaaagtggctgtgatttaacaaaaaaaacgattcaagtgttacctacctgtgtagccgaagtagtgtgcagtgaccgagacgtttctgaatacatggtcagattttttttggaaaaaatacaaaaattaaaaaaaaaaaaaaaaaagaaaaaaagaaaaaaaaactaaaaaagaaagtcaagttcaaaaaccgtcaaatgagaaaattgcaaggagtgtgacagagctgattgatttttgttgctttcttgatttttttttcaaaatgggtttactaaaaagtagatgacttacctgcctcctccttcgtctgaaaaaaaaaaaaaatgccaaccaatcatgcagcattataacaagccttataagccctaaagcattaagttgcacttttgtgaggaggggtaacgcagtattctctctggccagtatgagtgaagtttatacttaacatttgatagaaacatagatcaaactacggcacagcaactcatcagatagctagcgttgactctgggcacaattgaaccaattcccatcgtaagtctttccaacaatggactttggtgtgtagtgcagtgaacacataggactcctacgtaagcatttgtcagcatccttttgtctctaactcggttctgttttgacagccacacaatcttggcatgtattaaggaaaaaaaaaatccctgttgaagtagtttttccacctatcagcactgagtaaatgccataactccgcggaaatggtctaaataccccatttgttgtcctgaactaccagttacatagtgacgaaacacatctgtaaattttatgcaaccaatggcaaacctatcattattttgaaactgtgtatgtaaaagttatatttttacatgtagactcttgttattatgtgttttaatacattgtatcagttttttgtttttttttaaactgtgtggttttaaaaagtcatttaaatgaaatagtgagctacaagaatctgaaatttatgttcatttctgaaaatgtaagaacaaataagatagttaccacgtggtcaccttttacaaacccatgaacattttgattagctgtgtgcatgtgtgtgcgtgtgtgc

SEQ ID NO: 25591 - DNA, 1140 bp, Mus musculus
aaaaatagactgtagtacaccctagtaggaaaaaaaaactaaatttaaaaataaaaaaatatatttggcttatttttcgcaggagtaatccttttataccatggatattacaaaaaaaaatgtcagattctgagtatttcttctttgtagatttttggaatcattatgagtaaaagtttgttactttattttgctatttaaaagatgttattttaccatgtgttactgaaaggaaactgtatggtagagcttctgtttgtttttgttttcaggttttttttgtttgtttgtttttagttgtaggtcgcagtatgaactttttttttgtttctcgttatgttttgttttgtttttgcgactgtacacatagctgcagcattaaaaacttttaaaaaattgtttaaaaaaaaagaaaaaaagggaaaacgttttaaaaaaaaagataaacagttacaccttgttttcaatgtgtggctgagtgcctcaattttttcatgtttttggtgtatttctgatttgtagaagtgtccaaacaggttgtgtgccggacttccttcaagaggcccacagcccagcttggtctagacctgttcccatctgtagttactcgatgaagtcatgtacatgaccgttctgtagcaataaatgtgccatttttataaactgtctctgacacttttttcatttcacctctcgtgcacatagccctcttctgtaagaccaaagccactcttcctgtattctgagtgttggaggtactgaccgttgaacaaaacattaaaaaaaaaatcacaaaaacaaattgaaaggcaaagtccttggtttctcaagaagagatgcccccttaatgaaaatggaacaggatgcttgcaagcacacagaaagctgtctagaggagtaactaattaaaggattgtgattaatgcacctgtaacactggagcaatgcactcgaagagccctgaactgtgccagtgtttggggttgtgcggcaggttgctgagtctgcagcccaaacctcctggatcagttggttggctatttttgcagaacattctcagctagacctttccaatcgaaataaatacaaatgaaactccaggacaattttattttgtatcacttgttgaaagctgcctat

SEQ ID NO: 25592 - DNA, 1233 bp, Mus musculus
tgtgtgtgtgtgtatcaccttgtttctgccttatcataaaagaggctccatcctgatgaccttgtctgatctgaatgaaccgccaagggtctcatctctgaacaccacaaccagtttatctttccaccctgttaatgaggattaaactccactgtgaatttctgaggagacaaactacatccaaaccatggcaattgaccattaaagcctgtaccctagtgaggtgtatggatatgtggacacaaagcagagcgcagtgaatctcggcatgcatttttagtatgtttatggaaccccaagaggtcgttgactctagataaaaatccatgcattaaattgaaattatatgtacagtgaaaatatgcgaacatgatgaatttgaatacaaacttcaacagcgtcaaactaagatatggtatcaagtatgtaggatattaaaagtacggttggggcaggtctgcgtggagccgcggttgcgggtctctattccgcaggatggggtttgtgaaagttgtcaagaataaggcctactttaaaagataccaagtgagatttcgaaggcggcaagagggtaaaactgactactatgctcgaaaacaattggtgatccaggacaagaataagtacaacacacccaaatataggatgatagttcgtgtaactaacagagatatcatctgccagattgcatatgcccgtatagaaggggatatgatcatctgtgcagcatatgcatatgaacttccaaaatatggtgtgaaagttggcctgacaaattatgctgcagcctattgcactggcctgctgctggcccacagcttctgaataggtttggcatggacaagatctatgaaggccaagtggaggtgaatggaggtgaatacaatgtgggaagcatcgatggtcagcctggtgccttcacttgctatctggatacaggtcttgcccgaactacaactggcaataaagtttttggggccctgaaaggagctgtggatggaggcttgtctatccctcatagtaccaaatgattccctgattatgactctgaaagcaaggagttcaatgcagaggtacatcggaagcacatcatgggtcaaaatgtggcagactacatgcgctacctaatggaggaagatgaagatgcgtataagaaacagttccctcagtacatcaagaacaacgtaactccagacatgatggaggagatgtataagaaagctcatgctgcta

SEQ ID NO: 25593 - DNA, 3184 bp, Mus musculus
cctctcggctgcagagcacttttctatgattcgtgcatctcgaaacaaaaatggtcctgcactaggagggttatcgtgtagtcctaatctgcctggtcaaaccacagtccaagtcagggtcccctatcgtgtggtagggctagtggttggaccaaaaggagcaacaattaagagaattcagcaacagacccacacgtacatagttactccgagcagagataaggagccagtctttgaagtcacagggatgcccgaaaatgttgatcgagcacgagaagagatagaaatgcatatcgccatgcgtaccggaaactacatagagctcaatgaagaaaatgatttccattataacggtaccgatgtgagctttgaaggtggcactcttggctctgcatggctctcttccaatccagttcctccaagccgagcaagaatgatgtctaactatcgcaatgatagttctagctctctaggaagtggctccactgattcctattttgggagcaataggctagctgactttagtccaacaagcccatttagcacagggaacttttggtttggagatacactaccatctgtaggctcagaagatcttacagtagactctcctgcctttgactctttaccaacatctgctcaaactatctggactccatttgaaccagttaacccactctctggctttgggagtgatccttctggtaacatgaagactcagcgtagaggaagtcagccatcaactcctcgtctgtctcctacatttcctgagagcatagaacacccacttgctcgaagggtgaggagtgacccacctagtacaggcaaccatgttggccttccaatatacatccctgctttttctaatggtaccaatagttactcctcttccaatggtggttccacctctagctcacctccagaatcaagaagaaagcacgactgtgtgatttgctttgagaatgaagttattgctgccctagttccatgtggccacaacctcttctgcatggaatgtgccaacaagatctgtgaaaagagaacgccgtcatgtccagtttgccagacagctgttactcaggcaatccaaattcactcttaactatatatatatacataaatactatatctctatatggactcataaaggcatgggtataatggtacccccagtaaacttcctaatgaattcttatgactgttatcaggctttattgggattaggctaaagttgttagtacacttataaaaggctgctatggtaacactaacctaagtggtctcttgtctattagtttggtttgaattattaatactatcttgtagactcagagacatagcttgtataggaattgttaaagtggaagttgtacttggctgtgtaacctaagagcaaaatgtatccatctgagattgtagtcagtgggtcccagagcctagccgcactaagagtttatggagggtgcctggcatctcagatgactgacacttccagtgctgccttcttcacactgccagttttgacaaaaacaggtttgtttttttattttacaacaacttctgcctaattctgcaggattgcaagtaactttttaaagcattgattacttactagtaataatagggctgatggcagtttactagatcactggttataatttgggacaaaaactgctacattgactctcatctcgcccagagtgctcaaggctggtatgttcagtggatcaggaatacagttgtctttgattgtgaattcctacccattgcctctctcagtgaatgtggaaatggccgcctgggttttcccatttcaggatgggcttttggaagcacctatattggctgaaaatttgagaatgcgaacattccattcattagtctgatcaagctattaattaatatttagactgtagctcaaaatgtgaaacattttttgttcaatccatatttgtcttgcacattataaatatatttttattttttagtaatgtaggggatggggagggagataataatgcccttggcatgattcatgaaagcagctgtgacaacctccaatcagtttacttcatttcaaacctatttccaatcacaaggaaagatttctttaagacacacttgtacatttcacctgtggatgttttaacgtcatcctcagtatgtccccaaatttgctggtatggaaaggacaaaacattatagtggtgggtttttctactaattattttttgaagcgttattttcccaacacaaaagagctttttttctcagtataacaaaaattgaaatcttatgtgtattcaatagtaaatagacaaaattttattttttatttccacttgaagagttacatttcgtataaagtttacaaataacggtttttattttgatttttttcagtataaaaaagttgccttgatggcatattatgatgtaatgctaactgcttgtaggatagttgattgtcagtattgaatcctaatctctagctgccgtcttgtagatatggacgaatgccaccaagcatgtgtttcctattttgttgcatcgtacactgcaactaataagccaaggaatcgacatatattaggtgcgtgtactgtttctaaaaaccacaaactaagaatgataaattatcaatatagtttagtatttgctaattttactacactcttttgttatgtatatgtagggaagtcatagggattataaattcaatttgagtaaagtttaaaaccatatattttatgataaagggcctttaacttaagatggccaaagcactgatattatatatttgctgtaaagagaattataagagttttatttttctgatattaaaagttacttaataaagacttgtttccattaacttgaatgtattctccttggtgttttttcatataatttcatctgagacaaactagttacttaagaatgaaattttcctaccaaattttcctcctttctaacttacactcctggttgtaatgtaagagagagagagacagagagagagtatgtgtgtgcgcacatgcatgttcctggtgttaaatgtgttttttctagtctacattcacctcttcaggaactgtctaccttactttctgtgagacaggttctcttattgaacctggagctcattggttctggtagattggctctgcagagagcttccggg

SEQ ID NO: 25594 - DNA, 1064 bp, Mus musculus
gccttattaagcagtaaaacttttgaaaaatgagccgtttattggcaggagctatttacacaaatcagaatattataccatttctttttctctctctcctgtctctgtggacctccggggcttctgagatagacagtactgcctagccattcgaaatgcccaagccagctggggttgttgggctctcctctcccttcctccttcctcacagctcctgctcttgcgtggttagtgagcctctactcagtgtttcctgtcctcgctgctcaggcgagggaagacgacaactgatagtcttagagttcacctttctgtcgggggcggcattgttctgattgctgccatcgtctccgatccttgatgagttttatacgattgatgtggagagaatttaattgatattcatagcccatagctgctcccctctccctggtgttgtggaagatttagtttccaccgaattcactcaaaaagctgtcctgttggcaccagcaaaccacacgctcttttagaaaacatctttgcttgttttgtgtcctgaccctgctctctggcctccttcctctgtagatacttctgacctataggtgcctttatgagaattgagggtctgataccgtgccccaaggaatagctgatgcaatgagtgatgtttttcagggattttagcatcaaattaaataaatgaatgaaacttttaagtccttcttttcttttatttttttaatgcaggaaggactgaggagacgtcgggtgacgacaatcatttctctgtgttgctgtaaaggctttcacacagtttaagatgcttttctcagtagctccagagttgatgttcttgttcaacctaaagcaggctctggactcgcccagaccgttgcacttgtagtttacgacttcatgtgtcctccctcggcaagtcattcccttctctgggcctcagctgcctcgtctgtgaaatgaggggttggactattgtgccagctctggcttctaagtgaccttgcccgccctgcagcaggttgagatgcgctctttaccttttttctgctgtgtgaggggga

SEQ ID NO: 25595 - DNA, 1943 bp, Mus musculus
aggacctgcgccctcacagcctccacacttgtgcttctttccgttaggtctgtctgctgctgctggcatcggtgtggatgacctccggcgattgtgcattctcaggatgagctttgtgaagggctggggcccagactaccccaggcagagcatcaaggaaaccccgtgctggattgagattcaccttcaccgagctctgcagctcttggatgaagtcctgcacaccatgcccattgcggacccacagcctttagactgagatctcacaccacggacgccctaaccatttccaggatggtggactatgaaatatactcgtgtttataatctgaagatctattgcattttgttctgctctgtcttttcctaaagggttgagagatgtgtttgctgccttgctcttagcagacagaaactgaattaaaacttcttttctattttagaactttcaggtgtggctcagtgcttgaagatcagaaagatgcagttcttgctgagtcttccctgctggttctgtatggaggagtcggccagtgctgggcgctcagccctttagtgtgtgcgagcgccttgcatgccgaggagagtcagagctgctgattgtaaggctgagaagttctcacagttaagccacctgccccttagtgggcgagttattaaacgcactgtgctcacgtggcgctgggccagccagctctaccaagagcaactttactctcctttaaaaaccttttagcaacctttgattcacaatggtttttgcaagttaaacagtgaaggtgaattaaattcatactgtcttgcagacttcagggtttcttccccaagacaaaacactaatctgtgtgcatattgacaattccttacaattatcagtcaaagaaatgccatttaaaattacaatttttttaatccctaatggatgaccactatcaagatgtatactttgccctgttaaacagtaaatgaattcttctatatttctaggcacaaggttagttatttaaaaaaaaaaaaaaaagcctaggggagggatttttcccttaattcctagggagaaggttttgtataaaacactaaaagcagtgtcactctgcctgctgcttcactgttctgcaaggtggcagtacttcaactgaaataatgaatattttggaaactgctaaattctatgttaaatactgtgcagaataatggaaacagtgcagttggtaacaggtggtttggatatttttgtacttgatttgatgtgtgacttcttttcatatactgttaaaatcatgtatgttttgacattgtttaaaattcagtttttgtatcttagggcaagactgcagacttttttataccttttggttataagccctgtgtttgccatccttgatcacttggcggtgactttgtagagattgaagtggaggagttaagacacattgactgtaccacagacacacatgtatactttctacctagttactagcgtaaataaaactgagtcactatacgaagtggaattctagatttggtttttaaaatgctttccttttgcacttttgagtccagtctcagtggcaagacaccttctgctaaatgacaggtggcagccagttgtaccatgcagcgctggttccctcccactctaccaggactttcccatggacactgtgcatcatgtgtagttggttattttttgagtttttattttactgtagcaaaaaaaaaaaaaaaaacttggataaatagtgtgaataaaatcaagaccatggagatgtttttaccctgagagttttctgtgagttttaaattgcagtaggcatttgagctctggaaaccccgtgcatagcagttctctttgtgccaacagaaatgaccacgtcctgcagcctgctgcggaaggttccagaggctctgagaaaccagagtgctgcagtgactggggtcca

SEQ ID NO: 25596 - DNA, 1201 bp, Mus musculus
taattttatgattgggggtcatcacaacttgaagaactgtatcagagggttgcagcgctaggaagggtgggaactactgcttcacagaagtgaatgctaaacaccagtgctcagtatgagttctaataaataactaaggaaatagctaaggaagagtttgaggtaaaggcacatttggtaagactttatttagtatgcctttgcaatagtgaggagaccggaatttataatggttttggagtatcaaaactagctttattttataattaagccatttcaaactttaagcatttttaaaactatgggcattgagtcttttgacttaaatggaacagtttttcttccccaaataattgtatctaccttgtgaaatgtgttctcatgtctctttttctttcttaggtcatcctgctcaccagatgtcttgacagtttttcttgcaacattggccattggttttcactgccttcaaaagatcaaaattactccagaaattggagagttggatttaaaagaaaaaacttgaacaaatggacaatatgtctataacaaatacaccaacaagtaacgatgcctgtctgagcattgtacatagtttgatgtgtcatagacaaggtggggaaagtgaaacctttgcaaaaagagcaattgagagtttggtaaagaagctgaaagagaaaaaagatgaattggattctttaataacagctataactacaaatggagctcatcctagcaagtgtgtcaccatacagagaacattggatggacgacttcaggttagtcttgtatgtcttctgtgctggtagagtaatagatatttttaaatttcctcttaagttactaccaatttaatgtgagctccacctccatatatttatttaatatatttagatttatttttatcacttctgtgtgtacagatactgaaagaggcgagaagagagcattcccagatgctgccatccagctgcttgtcataatagagcactgggcattctcagtgctgggccatctctcaagctcagtgactctgtgtcttggcatactgtgtatctcttgccagtgtgcatgatgagagtatgtggaagagtacacaaaagatggctgttatcatttttatgttattattaaaaaattgtgcagtgaagaaaatgggaaaaccaacgagaagccctgtattgagagctaacccctgtcc

SEQ ID NO: 25597 - DNA, 1127 bp, Mus musculus
tgctacttcttttcaatcccagggtttaggggcaatgatttcagtcttgtttgaacattgaaatttcttggagagctttacaaaacactgatgcctgactcctacccacagaaattttgatttagttggactgggctgtgtagccatcttagaaaccacagtagttgagccttagggtcctcatcttttaagctggttggtcgttttacattctttctcttttttatttgtttaggagacagggtcctatgatgtagatgtggctagccttgaactttgggcaataacaggcctgtgatatcttttttttttttttaagattttatttattatacgtaagtacactgtagctgtcttcagacaccagaagagggaatcaggtcttgttatggatggttgtgaaccaccatgtggttgctgggatttgaactcaggacctctagaagagcagtcagtgctcttaactgctgagccccaggcctgtgataatttgctcagttcggctttacgttcctgttaatgctgtgatagattcatgcagaaggtaaccattgcaactctgatttagtgggtccttcttcctctcttgtctacctccccttcctgtccccctcactttattttcaaattatttgtattgtttagtaacaaattttaggatgcttttcttatgataatgaaattggtctcaaacatttaaagtcccaatagaatttggtttctttttaaaaagatttatttctattaattaaaaaaaatccaatgtatatggatttttcctgcttgtatgacttcaccactgtgtacctggtatgggggtggtaaggagagggggctgtggatcccctgaaattggagttacagatggtggtgagccaccacataggttctgggacatgaatccatgtcctggaagtacattcactggtttttaacctttgagccatatctccagtcccttattaatttttagctacacatatgtgtgtgtgtctttgcaggtgactaaggaggccacacacccaaggtggatgctaggaaccaaactccagtctctgcagaaggaacagtgtgtgctcctgtctagtcagttcttcagctctggaatttggttgtgttaagggatt

SEQ ID NO: 25598 - DNA, 1264 bp, Mus musculus
agccctggcattcctggaactcactctgtagaccaggccagcctcgaactcagagatcctcctgcctctgcctccggagtgctgggaattgaggacgtacactgctccccctggactgtacacctggcaggaaatgcctttaaaaaaaaaaaaaaaagatttatttatttgagtacactgtaactgtcttcagacacaccagaagagggcattagatcccatttcagatggttgtgagtcaccatgtggttgctgggaattgagcttagggcctctaaaaaagcaatcagtgctcttaaccactgagctatctccccagcccaacccaggaagtactatctttcaatccaagggtaacatcagtgttcatgagtcatgttctgaaagaaccctgaagtttgttggagaaatgttagtgtttgtggcattcacctgtctagatgctttgagggacaaagtttgttcttcttttgagattttagcaagctgacctgaaactcactctgtgtccctgactttcttccatgcatgtgttgttatcatagccatgaaccacaatggtcaggaacaaaacttaaaaatgctcaccccagaatggtggcagtacagagcggtttgtaggtacataccagtgtgtgtttatactctataggcaaaggggacttcttcccatcttcctgcttaagattgacttgaagttctgaaggtgtgttcagactgcttagtgtacacgaccttgggttcagtccacagggccaccccagagaggcagtcttacaatggcattgcagttttaagtatgggtggacacgatggttaatttaacataagtagcagtctgttcaatacaataatgaagtaaatcattgattgaaagatgaatacacaggtacgagtctagtactgaagcaggagaatctcaacttcaaagccagaatgtctacaaaagaactcacaatgtgattgcaagatggttcagtggttagggctcttgtgtctctgagcctccacatttaagtttaattccaggacccatatggtggacagaaagaaccaatttccagaagttattttctgattaccctcccccgcccccacttgccacacacacacacaccataaataaatgaacaaaaatgaagagaaacgtttattttttttcatgtttttatttaattctgtctatgaaatctaaatattgaatgttacaagtatacaaatgtgttgctggttttttgggtttttttgctcagtttgttaacgg

SEQ ID NO: 25599 - DNA, 2256 bp, Mus musculus
ctcatgggaaaacaagattccagagtcttcattttcatctgtagctagctcctcttgactctcagccttcctagctaatgcaggtgtgtgtgtgtgtgtgtgtgtgtgtgtgtgtgtgtaaagcataacagattaatttctcaaaggtcaaagggatgattcccatccccaatctgcacgtgttagccctagggggtggtgggcaggcactgacataaaagcgcaatgtctgatgggcttttcaaatcaaccccatctttctcctctgccaggacactgctgcacacagcatgagggaggctgagcagcaaagctggaatccccagagcgaccagcagcgtttcagctggctggacagatcaaataacacttgggctggttaacaaaagatgcaagtgggaaggtgttggaagccagagtgtggaaatttacccagcgttgtttctttgacagggaaggggactttgtccgaatgacgctacattcctgcagcccaaaggcatcctgccgagcatcctctgtcaaggtgctgcagataagtgggtgaaagaggatgtcctctcgtctgaagcctctgaagggtcctggcctggcagctgagttctttttgtacttgggacagcagatgtaactgcagagctcgtgcgagagtgtgactttgcccaactcctgactcaccagactggttggggttttggaatcaaaacggaacttgtagaaagataaactggcagaaagaaaaagaagcccctagaatcgtctagaatccattaactgagtctgctcttgctgctcagagcacagagggaggctgtgatccgattaagctctgggcccacttaagtaaagcaacaagcgcgcgcgcagcaagcagctcctgcacttgagccacacagaaggattcaaagttgccggatactttttatactctgagatccatggagatagaagataacgatacaggcttttatttctaataatgccggatctagaagatgtgcgaaccattttaagcatccaggagggttcttgaatcgcaggagttggtggcaaaccctccaagtgcaggtaacaacaaccttagcagcatccggctaagcaggtcgggatgcaaggacttgcagcccttcctgtcccctgacagctggcagcagcgacctcaccaggagccaaagcatccctcagttgtgagatttgacagaatgaggtgtgctggggaagccactagctggaacctggcctttcctgactgcccctgcattttccagccggccccggaccactgaggcaacaatggctgagaaaggtgactgcatcgccagcgtctacgggtatgaccttggtgggcgcttcattgacttccaaccccttggctttggggtcaacgggctggtgctgtcagctacggacagcagggcttgccggaaggtggccgtgaagaagatcgttctgagtgacgcccgcagcatgaagcacgcgctccgagagatcaaaatcatccggcgcctggaccacgacaacattgtcaaggtgtacgaggtgctgggacccaaggggagcgatctgcagggcgagctcttcaagtttagcgtggcctatatcgtccaagagtacatggagactgacctggcgtgcctgctggagcagggcacgctgactgaggaccacgccaagctgttcatgtatcagctgctccgtgggctcaagtacatccactctgcgaacgtgctgcacagagacctgaagcccgccaacatcttcatcagcacggaggaccttgtgctcaagattggggatttcgggttggcaaggatcgtggatcaacattactcacacaaggtaggttggcctggaaaggctgctgctagtggcctgtgggatcctcaagggtgcacacagttgttccagagggtttatgatcaggagacagttgtgagtgtgaggggaggcagaaaggtgcagaaagatccacggcctgggacgttggccgggatggaggaatctagttcctagtcatggctctgccacatgcctttggccaataacactgggccgcacaagtgaaaggtcagattaaacaatgtcagaaacttcttcccgagctctgtgtggttggtgaagttttcttttgcatctgctggtcctgggtgtcttcatcatcctctcagagctcaggagaccccagaagactccccacactgggaacactatcctctagtttgctcccctcaccagggctggcccatcctgggtccc

SEQ ID NO: 25600 - DNA, 1135 bp, Mus musculus
ctttaagttgcttaaagtaagacagagaaaatgtgagattgtggtcatgttgatcatggaccaagacacactggtagggagtagcctattgttagatatgggagatgactgatgtatgcagacgataccttaataccacttaagcttgacaccaatttcctagatggagccaacagactgtatgtcatgtcgaacatccctgtgccatgtagtttctgtcagggatttacaacttgatcttgtcactcagaagagtggcacctcccgggttgtcacttcctatttcattcaccaccacaggggctgcctgaccttggtcagacccagtctctgcttttatatacagtaagtaattcattcctgactctcctgtctacggggaacctttcctaaatcctagtccttgctgattatttggaaaatgtagaaagaatttataatcctaacaagctggtttaaaagacacacaattcacgtattttatttacaagcataagcctagattgggcagatgtagggctatagtaacttactccccagctataaagtctcttgttacttgctgtttctcctggccatgtggttctggtccatggctgctgcttcctcctctgtcttcctctcttctctctctgcctgaacacacacacatatacacactcactctcgaacttccagtcccacctttctctccccactgcccaatcacagactgtagccttttattgacaagttaaataggggacaaagagggttcatgagttatcactttgagtacatgaggatctgttcttgggggtgatgtgtgtgccaacgacatcttgagaaaccagtatttagcatgagaatacaagcagcatcaaccaacccactacgggaaaggcccaaacgtagacttgacattatgttgcttttacatcatggggggaaattttgcttcagattttcttcactcatgccttcccctttcttaggctgacgttgaactgtgctcgccttccaccacgttgtttaccgaagtctcacctagttttgggatccatatagtgttcagcatctctgtcgctgggtctcagaatcctttgaaccgtggcagtttcttatcttctcctgttttctcaggaaactgagaagt

SEQ ID NO: 25601 - DNA, 1196 bp, Mus musculus
tacaataacagtttcagtgactgtaaacatagcagtgggtcactgtgaacactaagagattctttatgtcttgcctttgtcgtggtttaggggaggcccaggctgtgagtagatggatcaccttgttaggccctggatgctgcgtaggctccctctgttcctcagcgtgtccttccccaccgctggctgacagtttgctgtgcccagacactcgcacttcaggcagggcggtgcttgggactaaagctgttagcctgacccctcttttcctggcagctgctctctgatgatctttgcttgtttcctgccctcagcccaaaggtttgttaggaggctgagtgaatttatacactgagtcctacccgaggaccagtcttggctcagccttacctcatttcccattcttaaaatgccaaaaagtgtaaagtttgttacttagtcaactttacagggcaggactgtacctcaccatatgtgtgtcctgtgtaccccatgtattagctttgtcccagctctgctgtcttaggtaatgcagatctggatccctctcacagacagagctctgccaccgtggtctctgcctttgcctagttgtgtcctagaccatgctgctcttcaacccctagagcgcacatccacttgtcgcttgtatcctggtagctctgacagtgagtggtgtgttaagggacgtgtgcgtggttggcctttgacttgtgaatgaagattctgactactatgtgtgtttgactaggggataatcaaaaggtcagaatcagtacaacaaaggctggtgtatgcatgttaaggacgttttgggagacgttttacattatgtaatttgcagctatggtttagcggcctctaggactgtcatttatatataatgctgggacttaatagtattcaggatggggagtcaggaagggtagagtattctggatggggagttaggaagggtaggtggacatatgggagcccttgaaacaagagttggaattcaagaagatggcctggaatccatgcagcgtctcaccgcctccagcttcagtgatgtttatatcctgcagaagaagctagtgtccttaggagcagctggcctaggactggagaagctaaaggaagatcccagggcaattgtagcagctaaaagcctggctggaggccaggctgttttccccataccaaggtgagacagc

SEQ ID NO: 25602 - DNA, 1141 bp, Mus musculus
tgacataacagctgaaggagatggtttggggatatcctttggtaactctttttttctttttgtgagattcactctgtcaatcaaaagctgtgtgtgtctgtacccaagtggaagtggcattagatgtgaggtgggattttttttttaacttcagttcagatggacaataccaaaagttgatcatagctaattatttattgtctcttcattacataattgatgtctcttagctcctcccaaactttcttgagcatccttttgaaactgtctacaagctagcacacctgagctgtgtggtggctgttctagtttctttaagaacacagggagtgagaggtagatggtcttagaaatgaggcagactatagacacaccaggctgctgtcttttgacatgtagacttaggaggaaaagcgaagggatcttttcttagaggaaaatgtttgccacctgatggagcagtccaacatctttgtaacagctggtgcacacttaattccaacactcaacctcaaaagggtggtttcatggaaagataaagctgagtgagcttcgagaggcattgacagaccgctttgttgaggagtggaattctctttccaagagttggaagacctgggagacaaaatttacaaagtgaagtatttaaagcatccctacacagtccctggggctctcttctctggaccaagggaatgtgctatcctttgacttccagagtccaggcagcaggactcctatagtgaatatagggggagaacccagaccaacagtgaaggaagattataaatctagtgtgcaggaatgattgaaatcccagaaactctgatctttaggcctggtaggctcatctatccctagttgttccttttacttatttgtgttttgatcgctctccctacttctatagactgtaagcaataaagattagataatgtattcacatagttcaaatttcagaagagatgagaaggaccacagtggttgtatctttccgacctttgacctcaatcaggaaattcctttcttgtaagccactaacatcatcagtttcttgtggatctctgtagacctgttgttattcttatgtatgcagtggcttgtatgtatctatcattttacagagaaacaattcctctct

SEQ ID NO: 25603 - DNA, 1245 bp, Mus musculus
accacttcgaccgcacaccccatctgccctatcccaggcttctagaggcaccgcccactcgctttctccaggacaggactggagccaagaactcagcatcaaccccaccccacatcccagaaaaagcggaggtggggtgtggggggatggggaacgggcggggccgactggtggagggcgggacctgttatcagggggcggggctggcggcggtgcggtgggattggctgcccttgcgcctgcgcagccttctggcggcggcctgtgctaggtcggagcggggcggtggcgggtagctggggcgtctagagaagggaaggggaacgtggtagagcagggagcgcttgggtccccgaggcagccccgagtgagcccgatgtattttccttatatgatcaggcctctcgtaaccggcgctgctggtttggagcctgagaggattatgaaaacgtggcaggtgatggggtcaggggacctggagcggggaagcagaggggagagggactgagtggggaggccaggcttcggggaggggataggtttaggggtacccacgcctccagctgcaagccctgccaatgatgacatgaccactgcgcaatctgagttctgggaaccaggtgatggagtgtgctgagaacactgaggccaggcgagctggaggcggcctaagcagagagaggggcccggggcgaggggaagataagagctcggggccccggggcggccaagtggcctgggctgagcgtgggaacagggcgtgggtggtgctgttgctttcttttaactcgtcaatcactgtctacccttaagccagctttgtgtgtgtttcaccagctcccttgaagtggggactacctttttaatctctctctcccgctttttttttcttttttctttctcctaacagggttatctgctgttctgaaactcgccctatagactaagctaggaattatgtgattcgcctaaatgctggagttaaaggcgtgcttcaccacacctgggtctaaccacctttttaaaaaaaaattatttatttatttattttttattttttgtgaaaacgtcagacacgtggcaaggttcgtgttggggaacatactgtttgctgtttcacatctactcattaaaactgtattttaaaaccttgcacgtttacttcaccctatgtacacttcacacacacacacacacacacgtttgttacagttctcttaggaattttcacgcagcgactgcaaa

SEQ ID NO: 25604 - DNA, 1099 bp, Mus musculus
ctccccaatttttgtgatttttaaattgatgtgccctttattatgtgtttaagccagaaattagtatctctgtgggttttttagattaatattgaaataagcattattgtccgtagagccgggtatggcttgcacctataaactcaagagtttagggggctgaggcgaaagcttgccacacctccccgaccaaggtgaactgcagaataagactctgtcttaataaatagaaaaaaaaatatgtaaggtatgttactctggcacacacaactgaggtctgttcactttacccactggtgtctttaagtagattctttaacatcagcatttcaacaacattaaacatttatttttatgttactgtaaactaagacacaatatttgtttaaataaccactaattcataaagcctttgtgtttctcaactcatactctggataaagtagaaggcattttgttgtctgttttcaacaggaaatctgttctaaagatgctgaggtcgtcttgtgtggaggaacagagagcatgagccagtccccctactgtgtcagaaatgtgcgcttcggaaccaaatttggattagatctcaaggtttggaccattaactatcttatataaattcttctatttatattaaaagttttaataatatatcattttaagggagaaaagagtaactttgaacccagctttgttcatggaatagcaccaagatttgtatggtttaaaatttacaggccagacgggcgtggtggcgtacacctttaatcccagcactcgggaggcagaggcaggtggatttctgagttctaggccagcttggtctacaaagtgagttccaggacagccagggctatacagagaaaccctgtctcgaaaaaccaaaaaaaaaaaaaaaaatttacaggccatgtcaaatctcattagttttagtgtttgaatctacaaaggattatacttcacatctcaaagacaccatggggagagtggaggaagaagagaagtagattcatgaatgatccttaggactagacttttgctgtggattgtgggaggtcagcttctggggcggtgtcttttgactaggtttcttcatcac

SEQ ID NO: 25605 - DNA, 1203 bp, Mus musculus
cacacacacacacatatatatatatgtatatatatatatatatatatacacatacacacacacatacatatgtgtgtatatatatatatatacacacatacacacacatatatatgtgtgtgtatatatatatatatacatatatatatatatgtatatatataatacacacacacacatataattgcacatgccacccagcatgtgtgtggaagtcagaggacagcttgcaggagaatgcttctcttcttccaccacgtgggttctagggattgaatttaagtcttcaggcttggtggaaagttcctttacctgctgagccattttattggccccagtagcgacttttctatcctttcttaggcgtcgaggtggaaagtacgcagtgggatcagcttgcattggaggtggccaaggcatcgccttgatcatccagaacacagcctgaaggcatcacaagcacactgcccacacttactgggccaggccacggaacacaggagaccttcgagtcagccctgctgagacagtgattgtatgtgaccaagccttgatgaggcaagatgcattgggttctgtctacttcatacctgtctgacgtgttagaataaaaacaccaaccatcggaggccttaagagaaatggtatctgtcagtagtcaccactgtatgccttccatggagtaatacaaactgaataaatgttgccttaactccagctaaccttttcttgttggtttttttaattacataaagtgtctcattgtaccgggttgtaagcgtgcagttcagtaccattgaggacactgacaggactgtgccaatagcgacactgcctactgtcaggatctttcatcttgtaccgctgaaactgtttctattcttaaaatgtgtcatttttatgtgccatgtgtccctgggtatgggcatgtgtgttgtagataccctcaaagaccagaagagggcattagatctcccagagctgaagttatacccagttgtgagctgtcctttgtgggtgctctggacctctcgatgtgcagtgacttcattaaccacgggacgcctctccagcccctcccccccccccttctcattttaagaaatgattctccattcccctctcacagtctgagcaaccaccattctattctctgtctctgcatgcttccctgctctgggaagctcatgtgagcgaacccac

SEQ ID NO: 25606 - DNA, 1172 bp, Mus musculus
catttcagggtgcaggtactaatggattacccacaaaaggaccaacagaagtctcggataaaaagaaagactagtgtgggtctcctgaaggcccttggctgtttgcaaatggacctaatgatatgaagccttctttgtctctgaccttttttctctgagaccaggaatctagataatagtttagcttctgcctgatactgatccgggagcacatgatatttatatttaaaattccagtagttatatttaatgatctcacccctgagtttctttttcattaaagtagctttcatttctattattccaatttactgatatgaacaaatagaaggtccgtgtgagcagacgctcagaacagagcccttggcccttcgagttctttcttacgagtttgccgttctcacttctgtgggctcctataccttgagtgggatgagtcttagtgggaaacagtgccgtccgaggtgggatgcgatgagaagatgtgatcactgcaggcgcagcggcgagtggacagctggccgagaccagctccaaggcagctggagaaggaaggacgggagcttccttgaaaaatgtaacctggacatcgttgtcaatcccacaacccctgactctctgtgcttctagtcctgacggtgtattaaacgtccatttaacttgtggttcctgctttttgtcttttcatacttgaaagttttttttgttgctgatgtttttttagagtttggtttggtttggttttagataaggtttctctgtgcagccctgctgtcttagactttgttctgtagaccaggctgaactataacttacagagatctgcctgcctatgccttcctaatgctggaattaaaggcatgcaccattgttcattgctgccccagcgatgtgtgtgtgtgtgtgtttgtatgtatgtatataggtcaacaagtaaaatcttagaacagcgatgaagacagtgggtgagtggaagtcactgccacagtgagtgacttccacagcaaaggcttgcctgattttgtctaaagcagctgagggtctggtcttgagaaaagccaatcccgtacctgaagcctataatcccagctacctgggggctgaggcaagaggactcaagttcacacctggcttttgctacagaatgagtttgagtctaacttaggcacatc

SEQ ID NO: 25607 - DNA, 1136 bp, Mus musculus
ttataatgacaaatacttaagcagaatatttattgtcataaaagccatggtcatcaataatacatgcaaaaatctacaagtggaccagagaatatagaaattaccttgtcaccaaaaattgaataagcggagttttgcgcttacaacatgtgtctcattgctatttggttggcacattcctctgctgatttctatgtagcaacctgccttcagtagccagctgtgctgcactggccgttacatttataattacttacaattctatgtaagtgacaagcacatgcttatgcttaatggttggaatcgtgctgtctggtgtggagacagcgccagggtcaaggtttgggtcaggttgtgagatgctcacacgttccctgaggtagtcctagggacaaacatattctgtggtgttgtgcagaattaggtgactctgtgaacaggagtttgattttaattttttttttttttttttaccctttctatgtagtcttccctacaccagtaaacttgtgaaaaccttattgtataactttatcagacaagaaaagccacctccgcccggaacccatgtcttccctcagcagtcggatgggggaggactgctgtatggactggcatcaggagtagcaagtaagtccttccgtccttcacgtcctctgtctgtggaacctcttctgattggccacacgcagttctcctcacttggttgctgccaggagccattctattgagtctgggtagctggctaagtgtaaaagtgcaaaggcgttaaaatggcaaccctcccattctctgtagtgattcatgttaaatgtatgcaaataatgagtagattatttagctgtagaacataattgttcaagacgaatgtttatacgtaattatggatatcatgcaaggtctggctctgaagagaaagtaacatcaagccgtcggatgcttttcactcggtgcctgtaggcaacatctttctgttcagagactccattggctggggtttcactgcacaatctcagagctttgttcagtgacaaattggtagacttggaagactttgcagctaactctgcagcagcgtgggatggggttgctgaagaaaagccctttcctccctcacagtaggcgtcgtttctgcc

SEQ ID NO: 25608 - DNA, 1201 bp, Mus musculus
ctgcttgagaggattcctgagaaagaactgtcctggggacactcagctagcttcctgtgagtccagggcgttcaaagaaacagactgaaaactcaaggttttctgatgaaagatgtctgttttagaaggtgtcaaaggactgggatgcggagacatgggggtgtgcatgccatgtggctctgagcccaggtggatgcagcttacgactctgttggccatggtaactggtaatatacggcatcgcggatgatggtcttaatctttcagggtagagtaaataataaatcctacttgtagtatgtgacaatttgtctttatgaggttgtcgatcccttggccagggaagtattcagacctctgggagcctgtcttattgtgtggtcagatctgtccagtgtaagaaggcatggctttaccagttatgaatcactgtacccttgtaggttagccagaaaacccacaccacattcattcatcatttctaagctcacttaatcatcttatacattaaaaagctagagctgctgtgggtctgtgtcttgccccactactggggtgctgggcagacaagagtggagatgttaggctgattttactctgggctgccactgtcgggtgctggactacagggaagcaccaacacacccctcagggggccggaaaaacacagtctaacatgtgggaggctgaagctggggcttccaagttcccaggtattcagtcgctgttggaaaaccacacagaggagtcgaggacaaaggattagaggtccacgggcctgcaatgaggctgggcctggagcctcccaaattcctggacatccaggcatacatatgtgcaagacatacatacatgtattatctttataaaaattgtaggcatttaaatatagtgacagtaattcattacatcacaggacaatctgggcaagacctccaagagtataacatagtgtttgttgaaggaatgaagcacaagtaagggccattcgttaggcgaagtcaagagatataaatgcagtgctgcaatgggcagagccagcaaaacgcatcaaacggaaacaccactttcgccgtcgtgaggtctccctttcctcgggggtgtgggttctgtggagcaggaaggacagaggaagggtcgtggttgagagagcctcctctagagtcggaacattagtgtgggtccacacgtgctgtcgtgg

SEQ ID NO: 25609 - DNA, 1140 bp, Mus musculus
tcctggcccttcttttcatcaggaggcagtgcagaaaaataacctaaaagtaggagtgctttgtcacgcatgcaggcctttggctggtgtgcattcttcataagtggtatgtaaatgataacgtaagcaatgagaaaaattgagagtggaaccttttatttgtagattctaaattgattctttctgggtatgggtattgctaaagttaatttttctttacatcttttagtacatgaaattagtatgttaattgtttataacaaaatcataaatatttcaggcttcaatcttgatttttatttggcaaaaataaagaatttcgtatacacatttttacatatcaaaaaattaatctgaagaacgtgaaacttgcaagcctcgctgttttcctgtttactaaaacagtgatgggtcacagtggtgtgcagacgccagaccaccacgaagaggggtgtttgctctctggggaccatgtctggacagcttcacatgccacagttttgcagtatgacagctggggacagaagaggtctgtaggaaaacctcgagtctaggtgctttgccaggcggggtggggctttgcgttgtgggttgagtgcacactgtattgttttaaaaagacttttttttttttaagatttatttatatatgtgagtacactgttgctctcttgagacacaccaaaagagggcatcagatcccataacagatggttgtgagccaccatgtgattgctgggaattgaactcaggacctctggaagagcagtcagtgctcttaaccactgagccatctctccagcccccagtggaaaagactttttaagtgggggtgcttaaggggcagtttcaagacagggtttctgtgtacccctggttgtcttggaactcactctgtactgtatgtcaggctgacagacgtcctcctccttctgcctcctgagtgctgcgattaaagacatgggctacgacacttaggaaaagacgtaagtgaaacttaacaagaatatagattattagcatttacttcagttaattatcataaaatcagcatgccgagttaagttaaatggttcttgtgtaaccagaatcttttcttagccattttcctaacaccttttctttctaccagcaaagaaa

SEQ ID NO: 25610 - DNA, 1142 bp, Mus musculus
gttgttctcaaatttatttctaaccttactattaaactcatcatttctgatactatctttccagctcctaagagttcagtttcgctcttaggtgttgtctgtatgccacctccttacaggcaagtccctcaccgggtgagtaaacgccacagcatttctttcctgtcgggtcagtggtgctctttgggaatcattggcaatgagtttctattgtagacagtagcctgaaagaaccggttggaagtttggtacccttggggcgctgactggctgatgcatcttagggtagcctggctgggctctctgagatcagttctgtagatccattcatcttaatgctgttcagtttccctgatcctaggcggatggtggggttctctgagtccttgaggccttttcaagtggctcgtgcacacgtacatatgcacacaccagtctctctggtccactgcttgttaaagagtaaagcatctctgcttctgccaaatacaggaaggccaggtgtgggcatgaaagatctgatggatgtttaacataggaatgttcagtcaggcttgtgtatgggacctgcgcctcccagtcctaattgcctgagttctagagtatacaatcatccacttctcttaatgtccacctattccttgtctccgacttttctcatctgttgccatgatgttaaattcaggtggtatatttacaattcccacatgtatatacctgccttaaacccagactaatcagctgtctccttgaactctctgcttgcctaacaggtgggcatctcaaatatggcatacccacaggggatgtggtcttcttgaagcttctacccaaccaccttcctcgccttgctttttccagaatactctctaaacttacagtctaagagtgaatcattcaggagagagagcagaagtagagtcaccgtaatcataaaaggcttctcctggtaggagacacagttgccatcaacccagatcttagcacattcccgaggtgtacattccatgggctctgttggtagccatgacgattacttcacccactgtggaagtcagtgtggaagtgcctgaaaaacacatagaactgccaggttctcatccggctgcattacacctgagcatataaccaaaggagtgagc

SEQ ID NO: 25611 - DNA, 1171 bp, Mus musculus
gccatagcctcaaactcacaaagatctatttgcctctctgcctctctgcctctgcctcccaagtgctgggattaaaggcatgtgcatcactgctcggcaaatatctccaatttccatatctatcaggcctatattgtagatatcctaaaatatatttaaccattattacattattgtacactttcattgtttccagtgtttcttatcaatttgtaactaatgagcagtttgtaaataaattaactcacatttcggttatataatttggggctctttttgtttgcttgttattcgaggcagggtggctctaacgccctgcctgaaggagactttgatttattgtctgtctccatccatctcttaagtcagggtcacaggtgtacactaccatgtctagcttatcttctggtgtagttttaaaactggaactttactgagtcacaccgtaagaggatatctgtatttccacaatcagtacatcgcctccttttcttcctcctcctcctcctcttcctctccctcttcctcctcctaacctcgtgtgggctcgcacctcagcaacaggtgttctcatggttgccactgccgtagccatgatgcagaagcccagtgtacatgtgaatttcttctgctgagcctgacattttaggcagttctttatatcctcaccattataagctagtgtcccacatagacttactggtatttgcatacttgagaacctccacgtcacatcttaaatacaccttttctagagaacagagggacaggccattgccaggcaatgtttgtttagcatgcaagaaaacttgggtttgctctcacccctcagttgggagcacagaagtattttttctgattccaaattctccttaactgtggatttaattttcataaactcctgctttcattttgtttaaatgtatctaggtggtttgcctacatgtgtgtatgtgtaccatatgcatacagtgcccaagggggccagaagagcaagtcatagctcttgggtctgaagatacagttggttgggagccactataaccactgagccatctctcttcctcataaactactttaaaaattgatagctattagtattaatgaaaccatgaaacaaattattacccaagggatacccatctcaaattgtccctgccttctgaaataa

SEQ ID NO: 25612 - DNA, 1198 bp, Mus musculus
actgtcgaatcctcgcccaaggaatgagtcctgttttaaaattgagccctttcgtttttccagttttgctcattttataaattttcaacactaagcacaattaatatacatgttcattattaaagttggaagtggctcctaagcataatggaagttgacttttgctctgtgtactacgccagcagaactctgcagtgtagtaggcaggcatcctcagctctactgaggtagctgctatcctcagttcacatgactgggtagcatctcactcccatgagttctgaataacccagaaacttcctggttctttggtcttttctttttgttatcaaattacttatcctaaataaagcaaatttaatactgactccctaggtctaagagtctgcacctctcagcattaccaagaatataaagtagaaattaaaaaaaaaaatagtttgtggctacaaagcagtggaagtggatcctgtggcttcagaggaagctgcaggccgccacggttccctcctctgctctgtgcatcggtttactggtgaagagagccagctttgccctccgtggatcgctggtgcatcctgggtgctgtggggagactaatgagctgcaggcctgcctgcaccagcaagtcctcgagctccagacgcactctctttactctttataattaagggcctgaagccattatttcagacttcccctcctcctgccccgttgtgctcacttggctgttttatgggctatttgtgcgtactttctaagcaagcccggagtacacatgcaaaatctgtcagtttaacctctgacaggaaactattcagatttggtaaatacattttaagtgtatgcttttaccagttctaaattaatatgaaggtgttcttccttttttaagtgtaagtattatgtgcagaactatatttatgggaattggtttttagtttgcttaaacccaaagatactcattttcagcttcaagtagaaaaggcctcgtccttacggagggtgggtgttcacatttcagataaatgtgtttcaaaaaaactttgagggactttctattcctcagaactcctcagactttcatttgggactggatgaggggaggattaagttaaaatggtgaagagattaggcctgttcttctcatgtcgttttataggctggtgtttgcagccctgcaagttaaaggacagga

SEQ ID NO: 25613 - DNA, 1525 bp, Mus musculus
gattttttttttttttttggcagaagaaaaggaaaggaagaccggctgggttcagcaaggaaaaaaagggggatgtaactcgtggatacggtttttttcccccacccttccaacatcttgttttactttgtaaacattttctcttttaaacccgggctccatccggtgccctccagacctccgaggtgcgaggaggtggtgtgttttttcattgggggctttgcatattttggttttgggggttttgagagaccctccagacatctcacgaggggtgaagtctactcggtcccctccctcaagtcttcgcgtgcacagaattcgaggagatccggttactaaggatatagaagaaaaaaaataaatcgtgcctgccttttttttttaattgcctgcttctccccacccccaaattaagttgcttagcaagggggaaagaggctttttcctccctttagtagctcagcctaacgtctttcgtttttttttttttttttttgcccccgaggatcttccatgtaggaagccgaggctggcgagcccgacactcgggagccactgtaggggggccttttttgggggaggcgtctaccggggttgcctcggccgcccccagggaagcggcggccgcgttcctccagggcacgccggggcccgaaagccgcgcagggcgcgggccgcgccgggtggggcagccgaagcgcagccccccgatccccggcaggcgcccctgggcccccgcgcgcgccccggcctctgggagactggcgcatgccacggagcgcccctcgggccgccgccgcttctgcccgggcccctgctgttgctgctgtcgcctgcgcctgctgccccaactcggcgcccgacttcttcatggtgtgcggaggtcatgttcgctccttagccggcaaacgacttttctcctcgcctcctcgccccgcatgttcaggaccaaacgatctgcgctcgtccggcgtctctggaggagccgtgcgcccggcggcgaggacgaggaggagggcgtggggggtggcggcggaggaggcgagctgcggggagaaggggcgacggacggccgggcttatggggctggtggcggcggtgcgggcagggctggctgctgcctgggcaaggcagtccgaggtgccaaaggtcaccaccatccccatcccccaacctcgggtgccggggcggccgggggcgccgaggcggatctgaaggcgctcacgcactcggtgctcaagaaactcaaggagcggcagctggagctgctgcttcaggccgtggagtcccgcggcggtacgcgcaccgcgtgcctcctgctgcccggccgcctggactgcaggctgggcccgggggcgcccgccagcgcgcagcccgcgcagccgccctcgtcctactcgctccccctcctgctgtgcaaagtgttcaggtggccggatctcaggcattcctcggaagtcaagaggctgtgttgctgtgaatcttacgggaagatcaaccccgagctggtgtgctgcaaccc

SEQ ID NO: 25614 - DNA, 2300 bp, Mus musculus
ggaagcaactcttaatttaggctatttctgaggccttatcccgctcgaaacagcaggaccaggttatcaacggtcccagagtctgtgcttctggggacaagtagacactggggctgaggctgcaggctcagatgagacgagaagggaagatgacagcagtaagcctcgtaattaaaggtggattaagatgtcttccctccattagcactgtagaccctacagctagcccaggcttaccctacagctagcccaggcttaccctacagctagcccaggcttaccctacagctagcccaggcttaccctcactccctcttttgtttttatactgcttatggggacactccacatgaatgcaccgtgtacaaatgtgtctatgtatattcgagaaggagaaaaagaacccggtctctgtcaccaccaacggttgtctgccatttttgtcttgcagattcccaacttcttctggagcctggggatcggtcacactggtgcgtggtggcatactgggaggagaagactcgcgtggggaggctctactgtgtccaagagccctccctggatatcttctatgatctacctcaggggaatggcttttgcctcggacagctcaattcggacaacaagagtcagctggtacagaaagtgcggagcaagatcggctgtggcatccagctgacgcgggaagtggatggcgtgtgggtttacaaccgcagcagttaccccatcttcatcaagtccgccacactggacaacccggactccaggacgctgttggtgcacaaagtgttccctggtttctccatcaaggcttttgactatgagaaagcctacagcctgcagcggcccaatgaccacgagttcatgcagcaaccatggacgggtttcaccgtgcagatcagctttgtgaagggctggggccagtgctacacccgccagttcatcagcagctgcccgtgctggctggaggtcatcttcaacagccggtagtcggtcgtgtggtggggagaagaggacagggcggatcgtgagccgagcaggccaccgttcaaactacttgctgctaacctttcccgagtgattgcttttcatgcaaactctttggttggtgttgttattgccattcattgttggttttgttttgttctgttctggtttgtttttttttttttttcctcctcctttctcgtcatccgtgtgtcccgcttgtcttgttctttgagaaattagcttatggtgcggatttttgttgggttgtgtgtgtgtgttttgtttttgttttgaggtggtgggtgtggttggcaggacaccccctccccccatatacgaagacaggaaacgagagtcagcactgccaagcatggtgtgtgaaagtgggcaccaccttccctttggatcagcgtttcggttgtccgtgcgtaggggtgtacccgagcgacagatgggggaagtgcttttttgtgtgtgtgttctttatggatgcccccggctgagaggctcatagtgccaagctgtgtgtctctctagccttttggacacgctcggtggggcagaggcagtacctgggcagactggcagcaggtgccaagctctgctccagcctgccgaagctgccccgccccgccccgcccccgcccccacaggacacgggcctatccacaggcttctgagaagccagcctgctagaaggctgaaccagaaccaattgttttcatccctgtcttactgccgcctgtcacccgctgccattgtcgagtctgtcttttttggccatctgctcctggatctctctcttgagatgggcttcccaagggctgccgggacagccccagtcacagtattgctaccccagtaccctctcaggcccttccaccgggtcccagccgtggtggttttttcatcaggtttctcccagatgtggaaagtcagctcagcaccccatcccccatcctgtgtgctgagctctgtagaccagcgaggggcatcagggagggacctgcgcagtgcccccccttcctgctgagaagggtgtagccccgtcacaacaaaggtaccatcccttggctggctcccagcccttctctcagctcatacgctcgctcgtatgatactttgacactgttcttagctcaatgagcatgtttagaatttaacataagctatttttctaactacaaaggtttaaatgaacaagagaagcattctcattggaaatttagcattgtagtgctttgagagaggaaaggactccttaaaagaaaaaaaaagctgagatttattaaagaaaaatgtattttatg

SEQ ID NO: 25615 - DNA, 1215 bp, Mus musculus
ggggtccccactggaatcctgtgttcctgggcccctgtcctgcagtgcctctgttctgtccactgctagcttccaaagggctggactgactgccttaggacctgccctggctcctgttactggcaaacggggccagaaacgaggctggcaaattacaaccaaatgcaggtcttgttccgagcaactgttgagggaagagcccactgctgactccacagatcttggagcctccttcatgatcccatgccgcatcccaggcaagacccacaagccctacctccaaggctgctggggagagggggaatcattgggtcctgactgggacggtttggtaggcagccagatagacaatgaagttcttcaggctagaaacaaagtcctggtttcttgggaggctctggtcccagggagcaaccacttctataaaggctagggaggaggaggaggccatcagagaggctggtcttactgggatgactggtggctcctccccctcatctctggggagctggaacccacactttgatgacaccccccccagaacatgtgtccaagcccatgcactggacctgggcatacctagaccatggtggaggctctaaaccagtggttctcaacctgtgggtcacgacccctgtaggggactcgaatgaccctttcacaagggtcacacatcagatatcctgtgtatccgatatttacctgacgattcataacggtagcaaaaattgacaattacggagtagcaacaaaaataattttgtggttggggttcaccactgcatgaggaagattaaagggttgcagcatcagggaggttgagaaccactgctctgtaggcctcctggttgaattcaggctgtctcgagtaaggatggtttctcctaactgtcccaagtctagaagagtagaaagcgatcagggtggaggagggagagttcccgagttctctgtggctgtctccaactcaagtgttcaggtcccaagatggggcctctgaagagggctgctgagaaaaaggaataggggtcacggccaccccagctttgatctctttccttttcttctcctccttcctagccttcttttctctgctgcttgctgccttgtctcccatcccagcccttaggctgagcctggagcccagggacacgataagccccacaggaggtgtggagggaagagcagggcaggtggagtagccagagaagacac

SEQ ID NO: 25616 - DNA, 1165 bp, Mus musculus
tggtgtgagatccggaaggtgccaagaggtctgtataggcggggagcagtgagtgaggccttcctctgtgcacacttgttgaatgagttaagttttgcaggagggacattttgacaagcacagaaccacactgctctcatggtcaacttgagtggtgagccatctatctgtctgtctatctatctatgcctttccgcattttgtacaaaaggaaatcagagagccactactagggtccagctacccgctgccttgcagtcacattcgcccaggttttggctgtaccctcttggggaagaaatagggcactctgggcttttctcaattgcaaaaaaaaaaaaaaaaaagtctcacagcactacagcactttgagtgaggaaaaaacatttaaaggaggaaaaattgtgattttagaaggttcagtccatggtcatctggctctgttgtttttgagcctgtggtgagccagaagcatcacggaggaaggggcatgaagaagtaaaactgcttaccctgtggcagccaggaagcaaaaagaataagaaagaggaaggcgccaagatggagacatacatgtgtgtgtgttttcccatgtgccttctcgacttcctcttcacatcctgtgtttgcttaacatgttcttttcagcttactctcttcggataggagatggtactgtgggtaaagcacttgcaaattcaaggactggagttcagattcctcacacccatttcaaagcagatgtggcacagctgtaacccagtgccggggaggcagagatggggttccctggagccagctggttagagctagactagccaagtccgcaagctctaggtctattgagagatcctgcctcagttaacaagatgggaagtaatcaagaaagacacccaacatcaacccctgacctccacatacatactcgcatgcatgtgaacacacatatacgtacatgcacaacacacatatgtacacacacacatgcacacgtgaaaaaaattaacatcataatgctgacatttacaggagatcttccttcttaacagatccttaaatgtaaatatggtggtattttctatatacggaacacagagcagacctccagactcatttatctacccaactgcagcatttatacccactggtgagcaaagagctccca

SEQ ID NO: 25617 - DNA, 1183 bp, Mus musculus
gagagagagagagagagagaaacatttttttttaatctagaaaaaaaatttatggtttcagaggttttggccatcactgagggcagggtgggaaagaacagagcagttcactttgtgaggtacaggagtagagtagtaacagaaactgccaggggcaagatacaacacacatacacacacacacacatacagacagcagtatgtccacacacatgtgagtatgtacacacacacacacaaacacacacagcagtatgtccacacacatgtgaatatgtacacacacacacacacacacacacacacacacggccaccaccacacataggcctctttcctccaacaggcccaaggtgctgccacctcccaacactgtggaatctgactccatctgtgactcagccattcatcgaatcagtgttctcatgatccgtctgcagaaatctcctcccagacacacctggatgtcaggatcttctgcccgtatctaaatcaaatcaatttcaaagggaagaaatgttattccgggaaacagcctgagctggtgtccttaggctaacacctcaagctcggtggaacagacagagtgggggagggacaggcagatagacaaacagatggacagatggacagatggatggatggatgaacagagggaaggggtctactactgaacaggtagtagactgtccaccggctagctctgtacttcttcctgctgctagcttaggcagacttcacttagacttggacacctgcatctgagatagatccaggtagccaggcctctgcaggggctttcgatagatgtttatggtttgtagtctgagggaaactgacattcctgccattagagtgcattccttaaactttctgcatgctctgaggtttgatgggagcatgcacgcacctggcctgactgcacctggccatacagaccgtctgtatgctttagaggaagagggacttccccagagtgcctctccctgtatccataaccccccgccccagaagagagacagaggtggccggctttactcgggaccaagactagacccatcatccagagacacttttaaaaaatctgcgattgacacagctttgtaagaaatagttctgctaaatccactctgcttgtttttatttgatctgatgactgctttaaatggaatttttaaaaaca

SEQ ID NO: 25618 - DNA, 1193 bp, Mus musculus
aagaagccagaactgctgtgtttatctttatactttacaccacctcccccctctgcatggcaactggccaccatacaattatgctaaataaacttgcatacctatttagtccgagatcttgatttgcacccgactctgtttattaccctggcactgtctgcacctctcacatgatacaagagaccgggcactcaattccctgatgcatttcaagcagccccgggcacttacagccctcatctgcgaccttctgggcagagtgcctactggggtctgagcttcctggctgctgtcattgtcctcccactacaggaaacagctgagcagttggctggattgttggatcttgaaataacaccaggtgccactcatttgagctgtcgtttgtgagttgcccaagttccctcctgctttctttgtggccagggaggcagtgtcagtctctaggttttgccaggatactcagggggactagaagtatcacacaaggctttgaatctggcacaggaccagaggccacgtggtgacttcagtctcatgctcttcctgtcacagcgtggagtcacaggtgggccactgttttctagtttcctggtctggagtgtggccgtgctgtgtggtgcatatcactggggctaagcctgtttcttctctggtgcagtgcggctggtctgttgcaccgtggggttggtgcttggagggtattttaggtttatattaccgtaacaaaacatcagagtcaggctcggtttagaaagcaacgaggtttctttacttcatatgtgtagaggtttaaggatgtggtaccatcagcctctagaaagtgtgtgtggtggcagcagggctaccctgggaagtcacaaaaccacacttgagggtcagtctgtggccctctagggacaaggccagaccccagaccaggcaggggggtgagagatgagcagataaaagcatcgagggtgggggtggggatggggtcagttcagatttggggatctgctcaagttatggagcacagtagaacccagcagtgagccaggcaggcagaagggagccaggagggaaggcccagcaggacatgcagaaggggacaggaatatgatccagagacacagacctacccagtaagtcatgaattaggctctcactcccaaaccttggttgacctcaactgtagaatgaaaacagatttt

SEQ ID NO: 25619 - DNA, 1162 bp, Mus musculus
cagaacaagctagcatagccaatcagaccaaccttgccaggtggaggccaagcttttggcactatttgctgtgttcagctggtgccacttcggatgacattaaaacatctcttgcttgtgtggattcaggtgacagggaccccagacctgatttctttttttcattgctcttctctctggcgcatcttcgtaccagtgtctctggttcgaaggagagatagaggcatggaatcgaatgccttgtgtttaggacttcctggagttcgggaagagtccctggagaaggcagttggctggctctcaggagtccaaagtgagctagctgggaacgagctgtggctttcaggtgactgttttcaggtggtctcaatttgaactgctggtcagcaatgaagaaagcctcatttattttgtgagtctgttaagacagagacagacttgtggggtgaatgaaggacacgcccactggccgctccaaactccgccctgtccccagcccccaggcttcctggatgctctttggtgcactttaccttgctatgcataaacctacagtgcattcagacttctggcctagcatccacactgtccactcctgactaagccttggtttcctcgcgcctccgtggttctcttgtctccgacttttgcacaccccaaccccagcaactcagctgtcctgcgacacgctcatggtagtcctttagtttgcaatgtttcattccactcctgtgcaaacccaattcgctctttagaagtcactgtgcctgcttcctactctgagaagtcttcccggattacactcctacatcagtgtggtctgaaaggggagaagagtgcagagcggctgcatgctcggtgctggggagcctttggaaggcctggcaaagaaaggtgtgaggctccagagaagtgtggagattgaggcgggaaaggagaatgggagctctgttgactggcgagagaataacgttcacagagtcaaagagaagcctggaatttcctttcaattatttctggttattggccttgcttccttacagtgacatggagcccctcaatttacctgggctgccagttatgtccccgcagcacatctgtgttcagttatgtccccgcagcacatctgtgtccaggctgtcagcttgcttataaggctatc

SEQ ID NO: 25620 - DNA, 1102 bp, Mus musculus
ctttctatgggttctaggcagacacactccaagatgactgtcatagtttagtgggaacatcttcaagggctctgcagcttgaggccccaatgctaattcttaatgggtcactgtaacctgggtgctggaagagcagatgagctagggaacatggaacagtggcataggaaggccaagcatcttacagtcttctgtggtttgtgacacatgggacatctggtcaacaaggactccctctctggcccctcccccattcctgagaacacccagctgttcaagagttaatagccttttcccccaggtgaccagacagctctgggagggggacctgacagaatcaaccagtcagaacctcccagaaggcagtttacaaaaagggcgtggtgtgggcaagctggggagagggtgccaggccacacctctgtaatggtggctggcccacccccaagtggggatggcattgagtcagactgtgaagtgagtgtttgctgatggagagaggaggcagtgggggtgctccttcctcagacttcatgaccccacccaggccaggtctcatgacccccagaatctgcagctctgtgcttatacttaagggctggtacttcctggctcgagtgtgtgtgtgtgtgtgtgtgtgtgtgtgtgtgtgtgtggtttgagtgatcactgtacagtgtttgatttggttaagttacaatcacgaccctttaaggagaaaacatataattctagtaattttattgggctcaggtttcaggcaaatggaaacaaaattgcctctaaaaataaaacacagacacagagaattgaataaaacaacaataataaaaagcctcccttgcctgaagataagtggtaaggcttttttttttttttttttttgaaatattagagaaaaggaggaggatagggggagggaaaaaataaaacactccaccgcccttgctttcgtttccgttttacctttcctaaagggttgatttgcgtattctaaagaaacgcagggaaagccactggagcaattggtccttgtcccgcgttcaacagtacaggtggacgaaaggggctggctgccaaatacttctggttggagggaggg

SEQ ID NO: 25621 - DNA, 1123 bp, Mus musculus
gtacatctgtatgcatgtttgtgtgtgtgtctgtgtgtgtgtgtttgtgtgactgtgtgattgtgtgtgtatgtatatatgcatgtgtgtgtgcatgtctgtgactgtgtgattgtgtgtgtatgtatacatgcatgcgtgtgtgcaggtccttttcctagaatggtactaggaccggccttttgaaagacacttgtcaagtcttcggctagcaggctaaaggagaccagataattttaggtgaaatgtgttcagaaatagctcttgggggacaccactagtcttttattatattatccttggatgatgaatgatattggtactactgggagaatggagccctgggacctgtcctagtggttgggggaagactgcgggatggagtggcaaacagcttccttatcacggcagctgattcagaggaaccatccagtcatacctgacctctcttcctaccctaccctgcagaagcacttaggtgggaatgccttatgggtttaatgttaggaagcccagtaaatttaccaaccatgaccagtctctcagctgaatcagttactctgaaagctctcctgagctagggcagatgggtaggcaggcatggggctttacgaaggtgttgagaggaagtgacactaagaactggctacgtctaaggccggtatggaagcccacttaaatgctgtatacgagatgggctccttcgggctagctctaggtgtggattgctaaagagagagcctacagggaaggtagagccctggagatgtgtgcctttaatacttctcgttgcacccatagtgtttacttagtaagcacctccttggtggcaggcacagggataaattatgtgaaaggtgagacagcaaatctgatttaattttctttggagaacacagatacctcgtcctaaaaaccatctattcttggcaacagtcctaagcaaaggaaattgttacaaaccccattttactgacgaggcagctgagaaagtgtaaccgggtgttttggggatgcaaaggaaaataaggcctcactgaaggggcttgggcaaaacagaatgctaccggctatggaaagcaatgagccaatcaatccatcaagggccgactcagctaccagg

SEQ ID NO: 25622 - DNA, 1159 bp, Mus musculus
tatgacaagagtcccctggaaggtagaagtttagcacccccagcgttactggggagactgtctctcttgctggagtgggtttcatcgcctccatgtggacatcagcatgttagcttctgtgagacatgtggctgaactaaacaggaaggacaggatcagagaaagataggctaggccttcctggctttcaaatccccacaggtagctccaggaatcccagatcctgcctcacttctgacaggccactgccatatctagacatcccctggaaaggagagtcatcattggctcacccccacactccctcagtgttcaaaccccttttgctaacacttgagggatggatggggctaacagccaccacctgcctggctccccccacccccacccctccaaatgtcacagaacctagtcatccaggcctcagctctttgctccttgagttgaggtttctccaggcctgggcgttgctggtgacacccttctacagggtttaagcccctgatccccctttccatatttgaccacaggtctcccgtggaaggaggtagagtcctttgggttgtgatgggctgtgttgcgagtcacactcgggctggttctgggttgggaactttgctggcccacgctttcttgaatttgtatttggtttctcgagatcccaggaagaagaatccacctgcttgcaaggcctgggcctggagtctcagagccccaagctgtgcgggtccacgagactcagctcttcctagatcaactgccttggcttcttcatgtgcaaacgcaaacgcaaaactgccagagaagacagtagacgctatccctcctgaagctcccaagggagcccctgcctgccagtgccaccagatgacagtccaccagggaggatcttcctcagatctccgtcctcatcagtcacctgctgggcagctgcctcttaaattcctgtctgcagtccagacagtcgccaatatgcacactttaccccagcagccaagcggctgtagctgcaccagactcagaaccaacagagggacccaggggagggcatccggtgtcaggcttctgtttttatttgtaaaggtaatgacttcttataaactcactttttcagatgactggctagttctttttgtcgtttgttattattttttttttc

SEQ ID NO: 25623 - DNA, 1203 bp, Mus musculus
accctcagaaaacaaacggtggggttatcttaacaatgatgaaagatacattgtttaaatctcagatctcagtaaagagatcccatttgcttgtagactcatgacacaatcagtgtatttaaaatgaaattaccagtccttatttgacagtgcagctggtatgctggtgttcgggcactggtgaaaatcataagaaatcaattaccgccaataaagctttccatatacctcatccctaaactacacccagcactgagggttaacttgaaaatctgtctcttcttcatttgggtctccccatgaaattccagagacccgggaagtacctccatgaagtcagagtcccacacctaatgctactctaaaggaaggtagttcaggcctgtcttggcagtgaactaccaagaaatgattttccaagacttcttagaacctctgtatactaaccacctatgtgttcattggctagcttctgagtcttagagtggaccccaggtttcacaaatgctagagatgtaggatcccttgggaaaaggggtgttttttggtttgctattttgggatggaaggtaaggatttgtaccttttttctgtcttgaagtaatttttaaacaaccaaatacgcaacataagaacagatacaaagctttagcgtgttggaaaacgctctgattagtgtacaacttccaaaccagctgttacccttcctctctctggctttaaggttcctggctggttgcagtggtaaacactaagtaactttatgtttctaaggctgtattaaattgtgcccttcacagtgttgtgtcatagggggttggctttggggagctgagaagaaacctgccttgaagggccagtgcctagctggttgcacatttgtccttgcctctgtagggtggtggattattggcttatagaggtagtttacagagactggtttaaatcacgagaataactaaccaacccctggcctctgaaccatgtatgtacatataccgatccagcctatttcttggtaaaatgcagaattcaaattgggcacacattagaccagctttaccttcgacttcatttacgcttttattgactctgacataaggtgtgagtatttgactttctttgttggtggcagtgatctgtaacactcagcactttctaggtgagctaaaccaagaaaatccacagtgactggctaaggct

SEQ ID NO: 25624 - DNA, 1303 bp, Mus musculus
atgtacacagacgttcttttctctgcacgtgtcaagggaaggtgaccagtcccagccatgcctgggacaagggtcccagatatgcaatgctaagtgccaaccaaagtgagtcctaggggtcctgggaggagttgtccccttaggtgtcctcaggacttattctcatactgatgtcatcctagctgataactgtgttgggttatgccatggctgtcaatatttttaggactcaacccctgtattctgtattcattactgtggatgcaacctaagatttacaataaataacacaaagaacaatggagttgagtatggaatgaaaagaggcaacgagctagggatgatctgtgtaggtgtaagtacactttgtgtccttaggagttcttgtaacagaaaccgtgtgaaactatagatgtcttctcctataagggaaaacatggtgtttgatgctttggtctctatttcccagtctgtcctgcttaagaagccagaatgtggtttctatttggtggatgctgtcttaaaattactaaatgtgtcatccggaagcaggtaaaggagtcagtatccctgtggagttctgtcctactctcacggtgcttaccagctaagctgagctcaggagccaagggaaaccctgctcctgctctctggtggtcctcagtggctgatgcagtgcactgtgatggagatactaaaacaagtgtgttatttgtaagtcttctctcagtgattgtcagacaactgtggtgtgtgtgtgtgtgtgtgtgtgtgtgtgtgtgtgtgtgtgagaaacagtgagctgaggctttattatagctgatttccagttaaaattgtgaaatacgtatttcttgtccacaccaaatatttcagtctatttaatgtattaaagaaatagttctgcttaagaaaatgttgcttaaatgttctgtgatttctggtgcatttttatacagatctgtgtgtgtctgtgcattcactttctgcctttgctctctgtgttaactgtcctgttgccctcggaaggtggacactattcgtagcattaaaaagaaatatttgagttatttaccatgtcattatgggatccagtttgttttgatttgggtataaggtggtctttctgagatgattacattttggtatctactgtctaaattatgtgaatgcaaaaagaaaaagggattttgtatatgtgcaggtatattcttaagtctttttttttttttttttttttttgatgtggcacacacggactttgcctatgcctttctcagacataggcataggccctccttac

SEQ ID NO: 25625 - DNA, 1234 bp, Mus musculus
acaataaaaccagagtttctatctatctgatttttttttttttttaattgtagttgcacttgtagatcagattatcagaggcaggagcactcccggattggagcatacttgttttagctaaaataggtaaaggctaggaaagggcacaaaactgctgcctttgtgtcactccatacgacaccctgttacagctcagggatggatttagatataatctgagagtatataacttcctatataaacttaagagtttttttaaagtaacagttacatctagttgacaaattggtatttgggtaatttattttgaactctttggttacctcgtttctgctataaagaaatttgtaggtaactctacggggcaatgccgtgatttcagagagaattctaattctggaaaccagttgtttgggaactgtggtttttacgatattatttattagttgacctgaacagtgagagcagactgcttacatattttcctttgtaggaagtcttgcctgttttacaaggatttgttttataaaaatcagtgtaactgttagttggcaaaatcagcccatacagtcagactagcctgctcccgtgactgtctgttaggaagcctttgccttccttaggttgtgcttccattcctcggcggagtggcatgctgtaggtatgattcttaattctgtctgtaggtaggttgttgattctaagtagctttcgtttgttcgtctgtcttatgtcttagaccagctttgtggtgttcttggctcatctcataatactgttgttcagtttatatcagaagagttaaactgtgcaaatattgtatgaaatgtttcagttaccataatttaaaggggtgggatggcatctttctgtatagaaaacttttataaataaagttgacttttcatattaagcgtctgatttatgcctttatatagacctggcattatgagtttgttgatccctcttttattcttcactgtaaaattgctgagtagaaatttaatgaatgttaatattcataatctatttgtttcttcagtgaattaactgaattgttgacataaatcaagagaatccttgcgtaacttttaagttactgctaactggggcaggtattgaagatctcctggtaatgtctcaattggagagagtgggtctttccttcagtcttcagggctgtcagcggtaccaaaaaagtgtccttgaatccttggcccctcccctgtgagga

SEQ ID NO: 25626 - DNA, 1149 bp, Mus musculus
cccagatacctctgttggttgcagaagagctgagaatagaattggtaccctcgggcggactctggcccgggggctgaaggaaaaagggcaggaggagagagctctgggtggttaccttggggaggagagattctggctagctcaggcggcttgggttggtggtcgtggctggagcacaaggaaattttctggtgggaggttagacacgcagcttgttagatatatctactttgttgctccagcatggcggatcctgataagaggtagtcaatggtttgttttcaggtgtttattgtagaaaggcagagagtagagaagcagagggcggcatggccacgtggagagagaggggaagagagaggtgagagtaagagcaagagaataaaaggtaagagagagagagcgaggaggggacaagcagctccttttatagtggtctgggctaccttgctgttgtcaggtagtagtggggaggtaactaggagtggctacccagacagaataccagggacttggggcattgcctatgtgactgatggccacacacctctctgcagggggctgtggggggctgtagctgtgacaggagccaggggcccaggaggtgtggctgaactcctaatgtcccatgaaggcagaagtcaccacctaccaggtctccggggttccaggcttgtgctctactggagaccaggctgtctgtgcacagttcaccaccccacattttgaggtttcaaacccttggtctctcagcctgtgatcaggatgtagctctcaactattgctccagcactgctgcatgccaccaggctccctgccatgatcatggactgagtgttcaaaagtgtaagcaaggccccactcaaatgccttctcttatagttgttgtcttggctatggtgtctctacagcaatatctcactgaccaagacaggagttggtactgggactgaagtattgctgtgacaggccagaccatgttgctagttggtagagtgtggactttgggaatttagattaggaaagaagttgagctgtttaagtggggcttaatgggccattctagaaggagcatggaagacagtggtggttctaagagcaatatagattatgaccagcccaactcaagaggcttcagaggggaagaat

SEQ ID NO: 25627 - DNA, 1140 bp, Mus musculus
ctcgcatagggcctaccattttctctcctgtttcaggaaagattgattttatggttacatgttgtatcccttatcagtttatacaggtagcataactgacaagggcaattgaaccgtatccatcctaagtgtttagtggagctcctgagatagcctgagcctcactcactacagtaaatttttacctgcagtattaccttaacttttgcacattaaacagatgtatatttcctctcaaaaggagatgtagctttttttggttggtgaaaacctcctaggtgtattagacttttagaaatgtcactggtttaagggaagaattgaccttaatcataaagggtggaagaaaggacatcagtactcaaattgaagtggaaccaggcaggaccttagaagcagtccctttcagatgtctctgttttgttttgtggcaagcttcattttctcatctctaaatcaacttggtttggcctctccttgtgcttggtaaaagatagtattgttggtttccccagtcatatagtaagtgaccagcagagacttaacccgagtttccagaggaaaggtaggaaggcggagttcagcagaattaaactctgttttgcttagggcagacccatgttagcttgtattttaaaaactttatctcagtccacagtgcagaaagtgatggtggtacatactcattttaatatcaccgaatacatgccagactcgcttcacatacttgacatatacattgtattctcctaattctatgaagacaacaaacacacataaactttcacctatattatcctttgagaggagaaatgctaaaattttaaacactagttatctgattttagaatcttgagttcatgtttgatttcattgttcaggtgtcctcggaactaggtgggattcctaatttttctatttatgggataaattaaatgataaataccatccttttgtatcataaaagtggaagaaaaacagagcccctctaaaaaacccaaccccccaaaaaaacaaacaagcaagcaaaccaaaccgaaacaacaaaacccaaaaactataatctgaaagaaagagaaggggaagaaatatccaggacactcagaatgatggtttctggcacagactatattcagatga

SEQ ID NO: 25628 - DNA, 1195 bp, Mus musculus
tgttaagcaatataatgacttggttattttcatttgtatataaagagttaggattatatgttaagttggtgggtagattgtgttgactattttcagttgtcagtttgactatatctggaaatgaactacaatccagaaatcaagggcatacctgatcttgagcttggaagacccacccagggttttgatgaggatcatgaggtgaaattcacaagctttaattcagatcttgaggcttagtaaccatgcttattaaaatctataatgaaaaggaattgaagaaaagctcagacccatgtgtggttgcacacacctttaatcacagcacttaagagacaggcattaagatttctgagttcaaggccagcctgatctatagagcaagttctagaacagtcaagcataggcatcaaaggaaaccatggaaaacacaaagttggtgaagatataattgaacaagaggcccatattccaggctcagcaaacacagaacttggcagtttcggccacgtaattctggctttagagtcaagaagatctttccacagctaaggaaagttgctgagaccagatgtgtggcaggggtgtcccttcatggaggcccagagaagccattgtgtgaagctgagaaagtgaagcctggatcgccttggatacctccagatgttggagatgccagaatcgtggtacacttgtcaaggagagctgctaacaggcagtataaccagcccaagagagagaagtgtattgaaatgaacaaagctgaaaggagatggaaatctgaagagcattttgacatcaggcatggagtttggagtttgcccagctggttttcagtcttactttccttcagtatttgtttaggaatagtaatgttatagcctgtgtcatgatatgttggaagtatgggatctgcttttttatttttattttatagggggttacagttaaaagattgcataaatctccggagatttgaactcttaaaccttgttgagactgtgatagactatgaggactttcaaagttgaactaaatgcattttgcattatgatgtggttacaagcctatggggcctagggagtgaaatgtggtggtttgaatagattcatttgtttgaataaggaatggcaggcactattaggtctggtactgttggaggaagtgtgtcactgtggaggtgggctttgaagtt

SEQ ID NO: 25629 - DNA, 1256 bp, Mus musculus
aaagagataatttccagttgtcaatgaatcatgatattcttggctataagtaggtactttttgtatgttccctctagtaaacatgaagaacttttctgactatgatgtggcaggttcctgacatcatctgaacactttccttttttcttagcagttttgcttttgtttctgtgggtttgatagatcgattctctctctctctctctctctctctctctctctctctctctctctctctctctcacatacacacacacacacacacacacacacacacacacacacacacacacacacactgcctccctctgtctctggttttttcgagatattggctgtcctggaactcatagagatctgctgcctcttccttttgagtgtgccaattcggctggtttgatgtctgctttttttatttagttttaaattgagataatatacatacacaaagtcacactagtatcatcactgtctaattcaggaacagttttcttattccaaaaaaggtcctatattcagtagtcactccgtataattcatctgttccatagcatctactagtctactttctgtctgtgggtttgcctgtcatgagcatttcttatcgatggaatcacacaacactggccttttatgtctgactcattttcatttagcataatgtcctccagattcatttgtgttgtagtgagtaccagtgatctatgcctttgtgttctgttctgtgaatgtattggctggtgttgagttatttctacttattggctagtaccagtgttcatctacatgagcataagttttatttgggcataggttttcagttctcttgagtggacatttaggaatggaattgatacataatcatctatggttaactttatttatttaacagaacatcttatgtttgagctcaggctggtctcaaactctctgtgacgacaaggctagtcatgaactagtcatgagctcctggaactcctgcctctaattcctgagtattgggaaggtccaccacttttgacttttctttcctttcccctcagatatggaattacactcaagcatcacccaacatcacactctgataaatatattgacatggaatttcagttttgtgtaattatcatagggtgttgttttgggtatatctttatcttcctttttaaaagtctgttttatttatgtgtatgtgtgttttacctgcatgtatgtctgaacccatagacagtagaagatggcattggagcctctggaag

SEQ ID NO: 25630 - DNA, 1187 bp, Mus musculus
taacttttacatctttgtcaaatattatttgggcatatttgtataggtctgtttcttttttttttttttttttttttaaagatttatttattacatataagtacactgtagctgtcttcagacactccagaagagggagtcagatcttgttgtagatggttgtgagccaccatgtggttgctgggatttgaactctggacctttggaagagcagtcgggtgctcttacccactgagccatctcaccagccctataggtctgtttctatttctgtggtttctgttatcttccattgaactacctacctgcctgtcacctgatatctgttgtgatataacacaatctttttttttttttttttttttttttttggtttttcgagacagggtttctctgtattgccctggctgtcctggaactcactctgtagaccaggctggccttgaactcagaaatccacctgcctctgcctcccaagtgctgggattaaaggcattcaccaccacgcccggcttgatataacacaatctagaatcttgattattgaagttgtattgtgaagctgggatagattgatttcctctccgtttgtggtttggtgctgagagttgattgaataccttgcccatgcaacgcaaccactctcatcactgagctacatagccctctgttcttttaaaagaaagattaaaacagttcttcgagttcttttgtcttttctatgtacagtttagaagaatatcagcatgagtctacaaaatgtcctgctgagatttagttaactatttaacatctattataatttaggggaagatggttgagaaaaaaaacctacacgaagaatacatttgttcttggatttttttcctctagtttttgtagcttttaacatataaactcagtatgcttattatatttttacatataattttaattttttgagagtgttttatataaagctgtggggtgcttttttgttctggtttgtttgtcactacccttgttcactgttagtttttagagatgcaattttagtatttcatttttagcctattcagccttttattttcttggattactctaccaaatagaactttcaacacatattgagcataatcacttgtcttagttactattctgttgcttgggggaaacatcatgaccaaggcagtttacacaaggaagca

SEQ ID NO: 25631 - DNA, 1205 bp, Mus musculus
acttgtttgtttaattagtgacagttttgtagcatgctgttgtatattagggaagtcttagttttgaaaacattttcattaaagagttggtagtgaagaagcaaatagggatttgtattagcataatctgacagtaaagtggttagtatacgaaccaagactagtttctaaaatgaagaggagagcaaaatttgatttaataacataactgaaatggaagttccaagaggagatagcttctgaatattatagtctatgtgttatggtatgtgtaatattaccatcagaaaaaaatctgattttacaatattttaggtaggatttttaaaaaacatacttgacaataacttatctttttccctctccctttttagaatatggtttctagttttagggtttctgagttacaagtgttactgggctttgctggacggaataaaagtgggcgcaagcatgacctcctgatgagggcgttgcatttattgaagagtggctgcagccctgcggttcagattaaaattcgagaattatatagacgccgatacccacggacacttgaaggactttgtgatctttccacaatcaaatcatcggttttcagcttggatggtagctcatcacccgtagaacctgacttgcctgtggctgggatccactcgttgccttcgacttcaattacacctcattcaccgtcatctcctgttggttctgtactgctgcaagacactaagcccacctttgagatgcagcagccgtctccgcccattcctcctgtccatcctgatgtgcagttaaaaaacctgcctttctatgatgtccttgatgttctcatcaagcccacgagtttaggtgagtattaagagaaattactttttaattaaaaattttttagaagcaaataaaataaccttcaactactactgatttgttattaatatcttaacattgaaagccaggattggcaagatggctcagagggtaataaagatgttttcagctggacgtggtggcgcacgcctttaatcccagcactcgggaaggcagaggcaggtgtatttctgagttcgaggccagcctggtctacaaagtgagttccaggacagccagggctacacagagaaaccctgtctcgaaaaaccaaaaaaaaaaaaaaaaaaaaagaccggggagaacctgttcctggagcagactctgctcttgcacac

SEQ ID NO: 25632 - DNA, 2372 bp, Mus musculus
gtacatagttttgtttcaaacttgatatattggtagccaaggatggctttttactcttaggactgcaggcctatatgatcctgcctagctagcaagtcgggtttataatgatagttgcaaaggtcaagcaataggaattaatcagcctgaattctttaacatcaaccatctttaatgagattttaatgatttgctaatggggtgcctattaggttttcatatttttgtgtatttaactcaatctttttggcatgggagaaatggaataggtatacattaattaggtgttactgtagggatgtgcaatagggaataactagggcatagttcattcaaatcaaaataaaaccattttcattgtcagacatctgagattcctgatttagctctataggccttcacttctccagctctgtcctctacagcacatacaacttgtttcataaactcagacctctccactgcacactgcctgctgtgcttgacagttgttgcatggcgctagcatctccaaaatgctgaacttttccattgcaattgggctgtgccttcaacagcctagctccctttcagtaactccaaccatgccacatggtgcccaacctcagctgctctctgtggcaccttcttgcctccagtactacctgggtagttcaactgcaagcatgagatatagtcttaactctcctggacaaaaagctgatcctgagaaaatattgccagattttcaatcctcggtgatgctggtatcttcttaatcactgttgatttctcagctttagccagccagcatctattgttccaggaaagcaaaggtttcattgcttgggtgcagaactctggccaatcatcactgatttttttttagtccaactgaggcaagatttttaattcctcaaattgaatggccctgattaagtcttttaggtactttgagactttcctctgaaacttcacaagccaggcctgcatcacctatattgcaaatgttcctatcttctgagcttctacacaagcagcagccactgaaactctgagtaggcaatggcttttccagcccagagttcagatgtctccataattcttcagtgacacacggcctggtctgctctgtcacagcaataacacagtaagaaaacaccatgactaaaagtagcttgggaagatagggtttgtttcagcttgcagttctctaatacagtccattgttggaaatcacaacagaaaactcaaggtaggaactgaagcggaatccatggaggagtactgcttactgacttatggtccacgggataagccatgagtaacatcttgctttcttataaaacccaggatcacttgcccagggatggcgttgcccacagtggacttgtccatcccatatcaattgttagtgaagaaaatggccagtgtgatggatgcttgggtgaggttctctcctcccagatcaccctagtttgtgtgaagtggacagaaactaaccagcacaccaggtttatgtattttcataagtatattgtattccctagacatcctaccctggtcagttttcatctaagacgtctgaatcctgaccttatcacctactttttggcattgtcctaagtggcagtacagtcatgcatatatactgaagacaactttgttttctacatttccagtatctcttgttttttataaatgatgtggaatagcagctaggcagtttttagtgtcttcatgtaagggtaaaaactagttttagaaggacccttgagcctaactggattctgattacttaagactttgacattaagtcaagatgatagaaatgtctatttgttaagcaggtatgatagcacgtgttgcagccatggagatgatgtctagatgccctcattaccatcctagttctgccttggcacagtggttcttgggtttctaaggaagttgaactttccctttcctctttttcccttctccatgatcctctcttttgtccctacctccttacccacccctcagccccccttggttcttttgtttgtttggtgaagaattgaccttgaatctttctgatgtctctgcctctcagaccctgctagtgctaggattgcagactttttcaccaagtctagtttggtgtggtgttgcgggttgaagccaaggcctcatccatgccaggcatgctgtctccctgcagtggattgtgcagtcttcatcctcatacttgttgagtttggtgttgattggcaggtgtgggaggccaacttgaatattttgctctctttctgaatctcattacttgttactaagatattcattcccaatataaacagtccataatgttgcttagttccttaaatatgtgaaaatatttatcttacaaagta

SEQ ID NO: 25633 - DNA, 1136 bp, Mus musculus
attttaatttaatacatttcccttctgctttctggaagttgattttgatctgcagtttatttctattcttgctcttcttaagattgtaagcacaatgcttatgctttggataaaatccatacttttaaaagtaagtggtagttatattacccatgcctatggagtcttgcctcttgaatttagttttatttgaataaaatgtagtggaaaagagtagactaaaaataatataccctgaaaatatcttaacacacacagagggacatttaagactagcatatgtttgttttatgtataatttgtgattttgtattttcatcttcttcgtgaaactagctaaccccagtgagaacacattgatcacatagtcattgtgtgcaaggactctactaaggatagcagtgagggctcactgttcaggacaaaattctcagcagccatctgttgttgtaacctttgctaagttgttgggtaaatgaccatcatcttcatgtgtgttagaaacagatatttctaaaggattgacttaagactctcaattaaaaggcttggaaaaaagttagtgaatatttctttttactaaagtaactatttagcagtaattcagaaaaaaactatgaatcactaatcctactaagttttcaaattatgagaatttgaatgcttttttaatgtgggagaatgtatattctgattttgagtataaatgaaagatttttttactttgtattgttttgttttttgtgtgttgtgtgtcttaaatgtgcctgaacattttataaaattaactttaacttatagagatcgtacttatatttaaggctgataaatggccaatataaaccaatattctggtttttaaatattgaaaaacttttagcagttgataaatagagcagagacagttactctcagaaaaattctaaatattaaaagttttgtagcaattagatacctaagcagtttagattttacttctgttttactgtaatgcactttttggtaattagtggttaggtatatagtttttatgtaagtagtcataatgtgcagttttggtattgatgatttaataattttatagtaatactaaagtagaacaccaagaatggagagaagacagttttcatagattc

SEQ ID NO: 25634 - DNA, 1106 bp, Mus musculus
atccacaacggtggcttgtgggacagttgatttcagtttctacgttactggatggattctacacaccagttaatcttttgttacaataaacagcaataaagttatgtaaatagttaacttttctaattaaagatgtaatcactgatatagactaacaacaacttctgtttaatccagtatgaaggaaaaatagaagaagtcttatttcctgaatgaatactttctatggagatttgttctattttgttgaagtaatgaagtgtcaataactggccagaatttgggttctacttttcttctttaggttttctgttcttcatgatcccatcaaagcaaataatctttgtactgtgcatttttctcttgtcgtttacgctttgatgttgtttgctgatatgtgcagagtaaagtgctgggacttggttgctctttataattatgtttaagaatactacacagatgttctgatataaagtgttattttattttgggttactatacattcttgtagaattttctgcagacttgagactttttttttcccccagaaagtcacatcctttgagtgaaatatgcttgagttaagttgtggctagaatactggtaggattttcttcacagtgttcaaaaatatttaatgttggaaaacatcagaacatacttagaggtggaaataactgaattcttcctaagaatttaattgatttcatatattttacaggataatgtagtatactatcttggttggaattcttcccattttaatggcactaatacataaattatatttaagatctctgatcataattctcatcaatataatttcagcagtgactttcaagtttaaagaaaagtcagtggtaaatgacagagggtggtactaaatctcattttcctaattttttttttaaaagaaatcttttgtgagcacacacacacaccaaatatttgaaatgaattgagcaaaagtgcccaaagtcccactttaaaacacacctctcacgtggcagtgctgggcgtatttaccacttgcttcatttaggttccttaatttttagtttcctaaatttattattttcctgatgcctagtgatctctacttttgc

SEQ ID NO: 25635 - DNA, 1164 bp, Mus musculus
gctttcagttgctcgtgtttgatgatcttcccttttgatagggctttcgagccatcaaagatatggaaagcaaagcaaacccctgcgatcacagtggttactgcattgtggcccctggcttgcttgaccttagccagcccaggtaaaggtttcttcccctaggatgttctgctattgctgctttacatacagagccagtttctgttacccacgtaaccaggaaaaataacctggcttctgtagtgtggtgtgttataaagaagtgatgcagttgccatcattctgtttacccaggagagtctcgaggactcctcactaggggtcactgaagtcccatgagtactgaaggttgcagtgcttccttagctctcgtaacatgcctctgcttttgtcgttgtcctgcatctgtcactttgcatgtcaacagttcatgaaattacaaacgaagtcactttagttgactagcatattaaagttgggattgctttgcagctgtctctgaaggcataccaagtattttctttctgcacttggctctgtatttacatggttgttgcaaagctcttctttccttaatgtcacgttttatgaagatcctgataagcagagtctctgtaatgcagatttctgtttaactagatagactagaattaagagatcttccacctcgccattatctgagatatctacacccaaggagtggtggctaatgctgtagtcacttggccaacctgcattttcatccccaccccacctcctttttaaaaaaatacacatagacctatgaacgggctttcttgctttacttaacgttaggcagtatagctgctgcacagctctcactagctagcttaatacttgatatctgttctgagacaattgtaaaggcaaatgaaataggtcagataagtttagtttgttctagaacactaatgaaaacatgatcataggtaagggatagtgattgtaatccgttggtcctaaccttttacatcacacaagcttccattagaggagtagtagtgaatttgaagggaaggtgttgaatttaaacagtcatgttgaatgaagttaagtcaatagacttaaaatattgacctaatgtgtcttcaatcagtcctggacactcacctttgacttttgcgaataaagatattcattagt

SEQ ID NO: 25636 - DNA, 1163 bp, Mus musculus
caagttggtgaaattccaggtgagaaacaaaaagccttagccttttgtccactgatacagttgtgtcaatatttgaagggttttttgttttggggggttttttgggtttttttttcttctttagctggactctagcctggaagtaccaaagtctaatggcctgcagtcagtgatgaggctgggctcaagtaaggactcagacatctatctgaccggctgggtctgtgacaccatggaaagctgcaggaccattgagctgtatccctgtatccctgtatccctgtatccctgtatccctgtatccctgtatccctgtatccctgtatccctgtatccctgtatccctgtatccctgtatccctgtatccctgtatccctgtatccctgtatccctgtatccctgtatccctgtatccctgtatccctgtatccctgtatccctgtatccctgtatccctggacccctggatccctgtacccctgtatccctgtatccctgtacccctgtacccctgtatccctgtacccctgtatcccaatacccccgtacccctatagccctgtatccctatatccctgtacccctgcatccctgcatccctgtatccctgtatccctgtatccctgcatccctgcatccctgcatccctgcatccctgcatccctgcatccctgcatccctgcatccctgcatccctgcatccctgcatccctgcatccctgtacctgtgcttccttagtcagggtctcccaaaagcttttctcccaacagtgccgctgccctggacttctgtgtagccaaagcaggaattaagatgcagagctggaagtagagaagtgtcaaggacaggagaaagagagaaggaagagatggcagcttgttacagattgaccctgacagactctgtcagcaactcaggatgcatacagtgtgaggagaatctgtgaatttaccccagaggaaaagacagggcagagagcaatgagcagacaattcccatatgtgtacacacacacacacacacacacacacatacacacacaccagagagagagagagaacattctactatcataacatttctcataactttatgtaagcctcaagtacatataatagaatttggcaaagaccaaaatgaaaacttgtcactaaacatgaa

SEQ ID NO: 25637 - DNA, 1199 bp, Mus musculus
tgtgggcacaacatgaggcctcccagatctatcccaagggaaggataacggtaagattttgtggcagtgaataaagaccttgaacggagacacctaaaatgtaaaacaccaggtctggtgaaatggaggggtagatgggtagcaaggaaacttctagcagagaggagagcctagaaaaggcacaggcaggatgacaggttgtgaggcattgctggagagcaacactctgggcttggaactgtaactgattttcccaagttagaggtggtccacatctcaggaacctagggaatgggtgggtgggattgttaggaggggccttgtggataaaagtacgcccagatcaacagaagtatcaacagtttaattgagagagtttggtaatggtttcattaggtcttgacaggtcctctaagcaatgcaaagcaagcagggcagactgaagatggcaagaaattcggctatgtgtggtacatggtggagccgggcttgccctatcccaagagcagcacaccaacacttatgaaatacaccaataccagcgtggaagcacgagaccccctactgccatagagatagtagagcacttgtcagagggaggtggcagagagggatgtggtgtggactctgagctgaggatcctctccacgttgtgatggggtaggaggggccgagagaaaagagcagcaggacaggcagacagatagacagacagacagacagacagacagacagacagacagacagacagacagactggggtgggggaaccaaggtgtgaggatctgagagctcctagtctcttggtgtctgtaaagtggtggaaagaattatctactttccacagggtcaaggtcctccaatacttcttcctgatgtttttctgcacttgaccctggatttttttggaactggggggaaaaaaaaacaacccaaaccatacatgttttagcacataggtgctcggatgagttctctgaggggtgtggttcgtaataatttaattagcccagcttttttcggaaaaaaagtgttaattagtttttgcttaaaatataccatcttgataacctctccttctccacttgtttcccctgagtgaagccccaattttccatccacaccctgcagcaagtcccaacctgggtaccactgttattattacaaggaaagaaagttaaaaaaatagcttgtacagt

SEQ ID NO: 25638 - DNA, 1772 bp, Mus musculus
tctctcctctctcctctctctctcctctctctctctctctctctctctctctctctctctctctctcgggagagatgaaaagggaaagggtgaaaggaagacaaggagaggaatggggaacatggggaacagagagagtcagttaggaatcaccttagaggtctgctcatagcagcggcccacagagtcctctctatacaacatcctgcagatgcaaagactagctagatatgtccttgggtttgcaacatggactctctcaaggttaggtggtcagtcctagagaaggagcggatggcatagaagacccagaccatggtgtggggatttctcccacccctaatcttgtctggagcctttgtggttaggataccagtcattgacaagaacttggggagcagcagaattatatcctgctttctccccagcaccccctcccctttgcctatgtttcacggaggctgcagacagagagggcctgctgtggacttagagggctctgagtccagtttcattagctgtgtgagcaacggcaagggaccttaaggaagtggaccctggattaagcccggaacactggcatgctgaccttcctctctccttctcctcctaactcagccctcctcctcctcctaactcaaccctcctccttctcggctcttgacatcactgcctttgcctggtgggtagctccaccttccacgggaagccccatgggtttgcatagctctggcacggaggagagaaacccaagagctggggttgccacaccacctacccgtgtggctagaccacgtgtgacccctcagctccatccccgggacggggtgtcttgcttgctgctgcccagcttctcttctgcctctaccctggagccttgcttttcttggagatggcctgtggagtcacccaccacgccggtggagcacaattaccacactgccaggcctggcagacactgcctcccgcagagctcctcgcgggctcgctgtgctgttgtgtggggccagagtaggacaggccctatgctccggctggcaatgccccgctcctgagcctccccaccctgtggggtgagctttattcccctcagctgtggtgagggctgcaccaggtcctccgagggggctgtttgttgcccctggtaagtgaaaggattaccttcagtgttgattgtcctttttttgtaatcctcctgccgttctgttctgttgtgtgctgtgcaacattttgctacatagactattttatagcagaaagctagaaaaatatttattatgactactaaagcaatagtgtatcaatgaatgggcggagacattaggaattgtgtaaatgcttagattcactttgggtggatttttttgtactttatttataactaataaaaatgatctgcattgctaactacacctcaggagtgcagagtgtttgtttctgtgcctgcccgaggcagggcgaagaagtttctaaagaacctcagttggccaatgtatttccccaaaggctcgtaggttgcttggtccccggctaggcgcttcctgagaaggcagcctttatgggggggggggggagctagagggaggatgttagttactgtggttggccccccagtcgtaccatgggaacttaacctcctctttactcgcaagctaccatgtggtaaccttctctgtcactcactctcttctgccatagttttccgctcctctgactgggcccaaagcaacaggttgacaattgtggaccaagacgtccaaaaccgtgagccc

SEQ ID NO: 25639 - DNA, 1094 bp, Mus musculus
gtgggacaaacattccccgcgtggggctgtagcaacgtctgtcaggtcccccttgtgtttcatctcctgcgcgcgcgtagagcaaatgctagagcgatttcagctgatagaaaaacaaaaaagaaaaaaaaaacacaaaaaaattaaaaaaaaacatggcacgttgctagtttacagggttttgtgagtttaaatgccttatatttaacaatcataatttatgactaacttgtagatatcgtgggttcttatttaattatttttatagttgttttgcatttttaattataatttatttatttagaaaggatactaatgttttttattgctcctattacctcattttggcgtcgtttctgggagtggaatgctttgcatgcgttggtacgatgacaactgcgaaacaaacaaacaaacaaacaaaccattttaaataaaagtctgcgaactttattttgtccaaactatcagggtgtgtgattgcaagctgtcctactgtggtgctggcctctttggatacattccatacgaaatgcaaacctttgattctgtatgctgtgatctagtgacaagctccaatatagtgagtgtatttagcacatatataaatattatttgcactcgtcagcagactggggtaatcctttcacttgtcactcgtgccccctcccccaggcctctttccccacctcaagtctgctctctgtcttccctcccctccctacattcctaagccctctcatccctctatcccgaggacagttactaagctatacttgggatcccactcagaaggtttcagaactggggtccttcagacacaatgaatatgctcatctgaaagagaggctgttttattaggtggggcccagaaggcccgctctgatcaagggtaagtcagtccctggaccccctgagtcagtcctcagctccgagagagggagtctagaagggtgatctcttggttcaccctgattaagaaagaatatgtcaccgtcccaggtgagaccacacaggtgggtctctctctctctctctctcttctctctctctctcctctctctctctctcctctctctctcctctctctctct

SEQ ID NO: 25640 - DNA, 1551 bp, Mus musculus
tgggaaattccttttctttctctgtgcctcagtttccgtctccttccagtggggagaaagaaccgtgtgtccccatgccccccccccccgccccacatcacctagatctgagagttaacaccctccagccctgatgtgctttcggttctctcaggggagtctctgagggtttagtgagaaaggagacggaaagtcccaagtgacacagtattagtgtatgctttctgtaccgctccgagagatgggaggacagagttctggaggtgggggaaatctgccaaattctaactcgagtgtagctcttagttgtgtgcagaaaataccaggtctcctggcattctttaactgtcctttgccccttactcttctcaacccacctcctctcttccctcctccccctcccctcctccctccacttcttctcccccacctcatttgcactgctctcggaaacctcaacccgtagccagtcttagtgtcctcgtatgctcagagcaggaaatggtatgctgatcagataaaaggagaaattccacgaagttaaacaagcccaggataagttttggagtcgtgaccaaaaaaaatgacagtggccaattggacttgagagagatccttccaggacaaccatcgtgaaggaatggctgcctgcctcatcccaggccccgtcttctggtgtgtccttcaatctctgtggactgcctattggggtaggggggcagcaggtgttgaggaaggtgatcactcaggcgatgtctcggcctggcggaactctgaggagtggaggaacagcacacagtgcttatggtgaaggtcaggcgtgctgagtgtggcctcagtcaactctggtcgccatcgagaacacggtctccagtacaaaggctggcccaggaaagaaagtcagggtgttagaaagctgccgaccaaaagccacaagaacttgtgacttctttcctgctgctcctctgatggctgtgtccaagccgtgatgtcctctgaagatggctgtggctcagaggtcattgggggtggtctaggtgggtcactcctctctgaggccactctgttctttcctttgaggctctcctgaaaggctggtaggaaaagagattggcagggacccaggagggaactggaaccagtgtcccagattctagtcctggctcttcactggcaaactgggagatgctggaaatccccaaccccatcccaatggcttgctgggcctcagcgtcctcagctgtgacacagggaagttgattggatgctccctaaatttctcccaaaacacatccagtgattcttcctaacatcaacacatccttcacctctgtagagttgccctcagccagccttgccgctgagaggtctcctgtgcgcacatacatacacctgcttccgaggccctggcacacaggccgagtgagagggcagggcgggttcggcttgcttcctttttgttcaggctctttgaacgctccaggctaacattaggacctgggcagggtaggggttgatccttcacccccctcccctttccacgtacttgga

SEQ ID NO: 25641 - DNA, 1208 bp, Mus musculus
tgctgctagtcacgtgactcttttttttttttttccagacgcctaccttgtatgcatctcttccaccaactgtgtgtggaccagtggctcgccatgagcaagaaatgccccatctgccgagtggacattgagacacagctaggagccgacagctgagggaggagctagccagtggacaccccgtttccttcaccaggtcccccccccacggccatagcccttgcagccaaactttgccttctgagccatttgacgtagagaagaagcctgcaagcacattttttttttctttttggtggaaagaggagttggtagcggtgtctgagggagaggaggggtagggtgggaagacccacccatcaggaatggtgactgcctcatcgccttgctgtgcagctgggagggagctggccgtgcctagagcaggggcgggaagggggcgccccagctgctgaggactggatgttatctcgagggtactagctggtgatcggcccctcaatcctgacctttgagggattgtgtatatacctcttgaccacgtagaaaccatgtaggggtctctagctattctgtggatggcagccagagcatgttagcttaagaaaaatgtcgtgtgtggtgctctcgtcatctgtggtggacatgtcgctattactgaactcgcaccaaatatttctcattgagtttcttgttttggtgcctgaccgaaccaaccaaccaaccaaccaaccaaccaaccaacgacagccccaatcttcccatctttatgagcgaaaagaaaaaaaaagaaaaaggaaaaaaaaaaaaagaaaaatcaaaggtgaaaaacaaacaaacaaacaaacaagccaaattctgtttacggtgaaaaaagttgataatttttcacccaggttgggaggggggaatcctcgtttgttgttttgtttttttttcccccttgggctttgtttttctcatgtttacagtgcacggagtgtaagaggggatgggcttaaaaggagcagactgggtctcactgggtttctgaggctttcaggcaaggtgaggagggcagaaccccagccagtgagggggttccccaccttgcagtgggctcctcagtcctcaggcccatggcttagccccagtagctttcctaggttccacactgaaccagggaggacaatgcctccagctacagcctaccctctagccccacccca

SEQ ID NO: 25642 - DNA, 1115 bp, Mus musculus
aagtgctgctcagaaaaggcattgagttatgaacgctaacttctgccagggagcccgtcaaactgatgtttcttgaccgctacccatcatatgcaggtagagagtattccctacccttctgctgggcccacggacaccccagatctcaggtgagaaggttagtggaccagaccccatctgacccactaggagttctctctaagaagcaggttgccatatagaagctcgtggcagaaggagacattggaaactcatatagcatcctccttttcctcaggcatttaaaaatgccattggggggctcccttctctgtctttcacagcctcagtcccggtttaggacgtgatacctgcctgctctccatctagcaagaccccagcttgtcgtcacactgtgtgacccctgtcacctactctacaatgcctcttgaccttgacgagttctccaggtttcacacatttacctgggatgctgtccccgtgtcctggagcactggctgctctgcagggctcagtggggagatggcctataagtagaggagggactagcagtcatgagcactgctatggtcccccctaagacagactggaatctgaaaggccaaatgcaaatcccgtccctgcatctcagtagccccggggctctgtagctcttctggatccagtcaatgatcttactttcttctcccgtttctgtgataaaatactttgaccaagaccaaagcatcttaagggaacaagtgtctcagctcacagctcacagcatactctatcagggtgggaaagtcgagggaaccggaagttgaagtggctgcagcagtcagcagagggctatgaatacaccgtgcttctagctcccttcctccatttctatgtaacccagcatctcccaccaagaaaacagtcctcccacaattaaggtgggtcttaattagtttaaccaagcttaatccctctaggtatgccctgaggcccatctcccagatggctctagaccttgtcaagttgacagtttacactaaccatcatgtgtacctaacaagataagatgcctaatgtctgtcccggacacgggaggccctaatggaagccttcactgtcttgtcttcagcaac

SEQ ID NO: 25643 - DNA, 1107 bp, Mus musculus
cagctcctaactgattttgttcatgccccagagactcccttccctccatttgtcagtttgtatccagaaacaaatttgtggacttggtgttcaaagcaaaataaagatgaggaaagtgaggaatataactgagtagctgggtggaggggggtgttacaggatatttgaatctgtttctaattagggtggggctcagcagacatctttaatctctccggcttgaatacaaacaaacttttatacgcatctttaatcccaaacgacgaaggtaaagtttgtggaaagaagcactcacgtgtgaaagtgatgtctaaatgagtcgcagacaaagtgatgaaccagagacagggtttctctgtgtagcccaggctgtcctggcacccactttgtagaccaggctggcctcgaactcagaaatctgactgcctctgcctcccaagtgctggaactaaagatgtgtgccatcacgcttttgacagaaaagggtatgcccaactctcaggagaagagagaggaaagggaagctacgtaagggagagacagtacaggagaagagagaacagttcgggaatatggtagagtttgtggagagcagcagctcagcagagttgagagagagagagagagagtggagcagcacagagagggagaaataggcagttttacctggagaattgtacagagacacatggaagagagaacaaactagacacaggtgaagatggaacgaacaacagaacaagaagcagccagaagattggaacagattgctagagttagaggccaggcagagcaattcagaggcccagagaaaagccagactgaatgagtcagctgggagaggcgtctgagccagaacagctgagttgaaccagccagccagagttcagaaagaacaagaaagggagagcttcctcagcagccagtctcagaggctgaaaaccattctaggccgagattagattgtcctgagacttagcttctaggactaggcctaggttagtagaaggaggcagtaagccttggtgaggacaattacattgggccaataaaagttacttttacagatcaggtcagtgtagggctaacagccaggctctaagatgt

SEQ ID NO: 25644 - DNA, 1103 bp, Mus musculus
gatgatgctagatcatgcccgtatgacttggataggataggaatgtctttggaggcctcagttggttttggtgcaagttcaagttcagcaagcaccagctagggtcactaagtggaaaccagcccagccctggggcgcctgcaggctactgggagcaggcagccatcattgctccttgattcaggaagattctgctggctgtttcgtctgaaccccaaggcaacatgtcctgactatggattttttttcctagagcttaagaaggtagaagatacgtcatacttaaatgtataatgtcagagctgggcacgaaggtgcctgtgtgagtcccgcactccagcactgtggatatctaggcagcgaatcatgacaagctcctctttcaaaaaaactaaagaaacaactgaacacactaaccagccaaccgaaaagtgtcaatacatagagtttaagggacagaataaaatgtttcataaacctaagagaagaaattggaaacagtattaaaatgtgctggactgctcggtcctttggaatccattatgcctcaggcattgtgctggacacaataaatgtgtgatttcagtgaggtggctaaggcaggacaaacaagacagtgtcaacatagttgcggtatgtcttgaccagctagagacctttgctacgaggtaatagacagactgtgaagtttgccaggtgagagtgggggagggtggatacgaaaccaaaacaggcctggggagaggcgaggtctgggaaaaggatgcatttgtagatgaggtcagagacgggagtaaccagttttgcccaagggcagaggtgtggaagataggcttttcctagagttgttatttggaacattgtgggatagatagggctcactaagcaaagtttgagaacatttcagacagaggaagtggtatgaacccatcactgcatggcacatttagacagtgatacagatgttggtccaggtgggtggggcttgccatgagcaagcatcagaggtgggttggtggcaggagggttgctatgggtgctgtgaggctgcggaggaggaggtgtggactgaagtgggtgtgctgacaactgagtgttggtgt

SEQ ID NO: 25645 - DNA, 1148 bp, Mus musculus
ctagcatgcgcttgtcagcacagttccaaagcatgacctgcctggtttgctagttcagtcatttgttcacctactgttagcaaattagcaccacaaggaatttaagacagatgttgcctgcttcttttgtactgtgtcacgggcttgcaaaagcctggggcacaatttagtcttagttttgactttttttttttttttttttttttttttttgttaaaggcaaagagccgagccccaattcctgtttccctgtatgtgtgtgatgtgacttccatgtgtatataaaactattgcaccctaaccaaacttcctcagactgtgcactgtttgttgaaaataatcacgtattttagttcaatgctgttgtattttttctttttatttaaaacactacttattctctaacaaatttcaaagggtagtgatctaaaaaaatcactggaaactaggaaatgtttctgttgttgctttgttctttaaagagtgcaaaggtcacggaatcttttgctcttcttaccttgaacatgaattgtcagccattgtgtggctaggaaccagtgcacttggcgttcacagatctgctgttgctgggactgagcgtggacttgatgcagtgacaacaaatcactgcgtagacggaatgttttccaaatgtgcaactcaagtttgtaaaatgaatttggttctttacatcattatttaggttttgtttccatttagtatttaatggtctttggagaaaaaaaaaacagagtgttatatatatattttttggtgcaagataagattttgttttttgaaataagtctgtagcataaaggttaaactattttaagataaaataaaaatagagtgtatttaaacagtgactctttctgagaatgttttcttcctgtctcagttaataaggtggagtctgggaggaacctttcccaagctatcctttggagatgaaaacgtgttacattttgttaacagaccactcattataagaagcctagttttctaatcaatatctgtatcctgtctttaagatatgttactaaggcatgtcagatcaaggggaaagcagtttaatgggattaggggttggctcagttggtaaagtacttgccagacctgaggacctgggtttgatctcctgcacc

SEQ ID NO: 25646 - DNA, 1212 bp, Mus musculus
tgtttgagtagttttcttctctgccttctaaaaatatgtatacaagagaaatcaaaatataccataagaaatcagatgcaaagcacattgatagtactgtcttaacagtatttaaaacaattagtaaagggtcatagaaacttcagggactttaggaaatgccagcagaggaattttgtggcatcacttactaccttttttcctataatgttgtagttactagtgaagtacttttaaaaagcaatacctagaattagaacactatgtgttgtgcagagggggagtgaagtaatattggctcagaagacatcacatgtttctggttttgttttcatgcggtgttgctatgttctttgccttccctcctcaaataccttggtgacatcctcattacaggatgagacccaccacttttattcagtgcacacacattgaccaaggacctactctgtacaaagcactgtgcagggtggatgtttggaggccctgagaagaatgagacacagcctgcctgcatgctcctgcatgggtctgcctggctccatctgcctggcctttctgttttcttacatgaagacaggtttattcattattctcctggttgttcagttcttgtgtagactccttctgtagggatgcatttgagcatgtgctcgatgatgttgtctggcgtaatctcatttgacctgccctctgctcaccaccttctcatcttttcttcagtctactactgtcctgctaaccaggctgtaaagccatgatctccagtgtcagtgcatcattgctcactctcctagatagaaaccaaagacccagaggccagagcaaaacagagcttctggaaactcactgctgggttatctttgcactttcacatcttgctttaggattaatttattgagttttactgttacacattttttttttttacttgaattaaaatactcaacaaagcagaaacataatttctggtctgtgttttccagaaaatcattggtaagagaatacagtggagggtatgacttgaagtttttgcagcttatatctatctccccgaatggcacagccccattttaaagaatgttttcgcattacttattttcatgttaaaaatgttctgttcaagtctacacaacagatagtttccctgacattttctttagtctttttagccatcccctttctttgggtgtgctgcggactgggttagag

SEQ ID NO: 25647 - DNA, 1177 bp, Mus musculus
agcaaagttgggtttattgtgggaagaacagtgtacactcatggggtagattaggctcctcagtctctctaaaatgccatgtatgtatggatgtatgtgtgattctgaaattacattttaaaaaggataatgtgttttggtgctaggcatgggtgcacatgtcttaatttcagcacttgagaggcagagataggcagatctttctaagtttgaggctaccctgatctacatagcaaattccaggccagccaagtctatatagttgttttgttttgttttgttttgttttttaaagcagcttatggggtgccttatacaggtttatagaaagaattagttctggcaaaattaaaacaagtcaaaaagagaggggatgatggggctggtgtgatggctcagtgggtaagagcacccgactgctcttccgaaggtccaaagttcaaatcccagcaaccacatggtggctcacaaccatccgtaatgagatttgagtccctcttctggagtgtctgaagacagctacagtgtacttatatataataaaaataagtaaataaataagtatataatgtcaaaaaaagagagagagagagagagagaggggatgatgagatggccctggttaagaacactgctgcttttccagaggacgtgggtccaaagttccagacccacatggtggatcagaaatgtctgtaactccatttccaaggaatctgaccctcttctgatctttgtgggcattgcacacacacactacatagacatacatgtaggtaaatacattaaataaggtttaaaatagacaagaggaattaaaatttctttttttttaaagatttatttatttattatatgtaagtacactgtagctgtcttcagacactttttcttctcacccagaagagggcatcaaatctcattttggatggttgtgagtcattatgtggttgctgagatttgaactcatgaccagagaaaccagcagtcggcagagcagtcagcactcttaaccgctgagccatttctccagcttgaattaaatgttttttaaagctatatataagtcaccaggaggtcaagacattttatggttgtaaacatgattcatcaccacgtatgtgaggttttttttttttttttttttttttttttttttttttttaggcaaaaccag

SEQ ID NO: 25648 - DNA, 1211 bp, Mus musculus
acccccgatactaagacttctaagctgtgttgagtgatgaggtccaactgcttgggagtacagtgtacacactgtctcaaaaaacaacgaacaaacaaacaaaaaaagtaagacaaaacaataagaacaaacaaacaaaaaacctcagtaggccaaggcaggatgggtgcaggtctgaggctagctaaagctgcatatggagattcttacaaactacacataaacaaaactacacacatgaacatacgcacaaggaccggcagtgcagctcagtggtagagagggcttgcctggcatataagttcctcagacacacatgtccacgtacatgtgcatacagtcaacaccaagggatggtgatagagttcagtagccaaaggcttgactagcgtaaatgagttccccagtttggttcctggtaccacaaaaaagaaacaaataaataaaaggtttgccttaatgctttctttctctacttctcttatttaattttcagtagaggttgatgccgtctcttccatgtctttatttctggcttgttttcttcctctaggacgccatagaggctgaacttaccaagaaagtagacatgatgggcctgtgaggacagccatgtagacgtggtcaggggaaggaggtgactgttcttagagatgatgatgtctctattagtaaaacaacagggttcgcttctgcctttaaactttgtggcctgaatacagtttgcatatgaaaaggcatttcttgttatctgttgctcacggtacacctcaagggttacctgctacttactgaacacctcacagttaagaatctttccataagtgggtaggggggctggtgagatggctcagtgggtaagagcacccgactgctcttccgaaggtccagagttcaaatcccagcaaccacatggtggctcacaaccatccccaacaagatctgactccctcttctggtgtgtctgaagacagcttcagtgtacttacatataataataaataaatctttaaaaaaaaaaaaaaaaaaaaataagtgggtaggggctggggaaatggctatgagttttagagtgctttttgctcttgctgaagacccgggttctattctcagtgcccatatggtggcttgaaagcatccctgactccttccagggaatctgacaccctcttctaccatctgcaagcaccaggcacacatgtggtacacag

SEQ ID NO: 25649 - DNA, 2294 bp, Mus musculus
gtctacaaagtgagttccaggacagccagggctatacagagagaccctgtttcgaaaaaccaaaaaaatatatatatttgtttttacttatgcatatgagtgaatgttctgcctgcttgtctggtacccatggtgggtctcagatccctggaactgaagttcatcagttgtgagctgtcatgtgcgtgatgggaaccggatccagaccctccgcaggggcagtggctgcggtggcgcacactcacactcacacttttaaccagtgaaccatctctccagcaccaagatatctaccaaaacaactcattttatgttttaggatgattttgattattttcatgaaactgcttgttggggacctgattgtttaaattgcgttgtcctctcaggcacagctgagatgtcctccattctcgaggagaggattctgggagctgacacgtctgttgacctggaggagactgggcgtgtgttaagcattggtgatggtattgcgcgagtgcacgggctgaggaatgttcaagcagaggagatggtggaattctcttcaggcttaaaggtaaattataaagtgggaggtttgctatttcaggatctgtagctttgctctctcatttagtaattcagagcttgtcaagagttaaagcatttaagtctcattttgcctcatttcttctctattataggttgtaaagagagtaagctagaaagagtttgactaagccaagttccattgtctctcttcccctcatgtgctgataaataagttgtagcccgaggcaccaaaattgaaagtttagcaaacatttgcataaatttcagcgagtccctatcagttcctttgtagctgtggagacttggcaaaagtgtttgtgtacatgaactaagttcttttcccagtacaaataacctgcctcatcctgttgagacttgatgctctagagaagggggaggtgggagcatcctctcaggcaaatgggggaatggggcgaagagcttctggagggggggctggggaggggagcagcatttggaatgtaaataaataaaacaacctgaagaaagaacagatccatcactgacagggaggcagtgtgtagctgtgagttccgcagatgcttggggaggttgggggctgcgctccagtgtgcagtgtggcggtcaggacagcctggagggtctcctgcctctggtcatctcgggtcaggcacccactcttagctagtccatgaagtcttaaccagaggagcagagcagggagaaggcaacagtgtggtgtgctgccgtgtgatattgtcccaccggtctcattgtcctttatcctttgtgcagggtatgtccctgaacttggaacccgacaatgttggagttgtcgtgtttgggaatgacaagctaattaaagaaggagacgttgtgaagaggacaggcgccatcgtggatgtccccgttggcgaggagctgttgggccgtgtggttgacgccctcggtaatgctattgatggaaaggtgggttactgcttatgggtgctctcgtggccgacatcacagctaatcgctctgagggttcctttgattcatttttaattcttgatatttttatagggtccaattggttccaagacccgcagacgagtgggcctgaaagcccctggaattatcccccgaatctctgtgcgggagccgatgcagaccggcatcaaggctgtggatagcctggtgcccattggccggggtcagcgtgagctgattattggtgacagacagactgggtaatgactcaaaatctgttaaaagttctaactaacatggattgctagtaaataattatgcatcttgggatggtgaatgctgtggttgtaatgaggcagaagcaggtgaaaattaacagtggtatagcacaactgtgcttggggatcctgcatttagtgacatttttgcctctcttaaaggaaaacatcgattgccattgacacaatcatcaaccagaaacgtttcaacgatgggaccgacgagaagaagaagctgtactgcatctacgtcgcgattggtcagaagcggtccactgtggctcagctggtgaagagactgacggatgcgggtactagagagctctggtcccctggcctctatagataatcttggaacagcctctgcctaaccaaggccgatgctcttcaatcagctggcccctggatttgtttttttaagatgaggtctcaagcagctctggctgaccttaaacaatctcttgcttctacttcctggttggggaactagaagtgtgtgcgaccatg

SEQ ID NO: 25650 - DNA, 1147 bp, Mus musculus
cgaagccccctctctcaattcatgaatagaatgagggtggtggacaattttgtgtcgtaacctttagtttaaaatctgtctaggtacctttgtgactgtaactttttctcctcagatgccatgaagtacaccatcgtggtgtcagccactgcctctgacgctgccccgcttcagtacttggctccctactccggctgctccatgggagagtactttagagacaacggcaagcacgctttgatcatctatgacgatctatccaagcaggtcaaaggatgtcttttataacctgtgtacttgcatcttagtggaaattaacagacgcaccttgtttaacaggtggattttatcacattctgtaccacaggctgtcgcttaccgccagatgtctctgttgctccgccgaccccctggtcgtgaggcctatcctggtgatgtgttctacctacactcccgcctgctggagagagcagccaagatgaacgattcctttggtggtggctctttgactgccttaccagtcattgaaacacaggctggtgatgtgtccgcttacattccaacaaatgttatttccatcactgacggacaggtattagattgactaaaattagtgtaaaaatgattgattattctaaggcactagttgagactaacaagcatgaacttatttgtaaattgcctttacgttcttatggaacacgataaacctagaactgaagagaatagggtctatagagacgcctcggtggctgagagcacttgctgctctgtggaggaccagggtttggatcccagcacccatttgactgctcataaccatctgtaactccaggtctggggtgatgggctagtcttactatccatgtagctgagcatggcttagaccgtccagctttgttgtgtccgcctcctaagggttaagattaaagcatgtgtcctctgcacccgccggggcatcttttggtttatatacactcattattttctagccctaggtaactttaaagcatatttgagaagttatattactaccttgttgtagtttgttgagattgggacttggtgtagtctagactggccagggattgcatgtagctgagactagctttgaatttgcagtggtcctcctgcctctgagtgctga

SEQ ID NO: 25651 - DNA, 1439 bp, Mus musculus
tccctcttgggcaatatcaggtataaatggagttggtggcctttattgtgactagtgcatttttatcgtagtcttgctttccctggaggtgggggttgggttggaatctggtcttgctgcatactagccctgcctggtcttggcattcactatgtagcctgagtgttctcagtatttggcagtcctgtctcagcctcccaagtgctaggatcacaggtgtaaactacctaccatgtttaggaaagtttaacagttccctgtaggttagccttgtcattgaatctttactcgggtcatttgcacgagtcatttactcttttgtttctatttccaaacgagtcatttactcttttgtttctatttccaaacaggtctgatgggaaaatctcagaacagtcagacgcaaagctcaaagagattgtaacaaacttcttggctgggtttgaaccataaagccctgtcactgtcaccagatactgctttggttttgtcatttattctggtaaaatcagcaccatttgtaaagggttactcttgtattcctgatgtacagaaatcacatgaataaaagttccatactgtgtgctagtttgtgtgggggtgggctcaggtgtgtaccaggatttgtgtggtggtcagaggacagccagcctgtatgacagtaccctccttccaccgggaatttaatgcaggtttttatttaaagcacgacttcatgttgagttccataagttagttttgtaagacagagcttactgtgtgacctcagcaatggctagcctaggctattcttgtagcagtctgtctgccatagctggcaaattgctctcttaccctgttcttgctggtgcagtcagcatggatagataattcaaagctgtccactatgaaattcggaagtactttgtgattgattaaaaagagaactctgctccggaaatgtgtcttggttgatgagtccctggcgcccatgaagctctagtcttgatccccagagtcacatcagctttcgagggatgcacactaggattcctcatctctttgagaaccaaggaaggaggatcaggcagtcaaggttgttaccaaccacatagaaaatgtaaggccagcctgagataaatgagaccatgtctaaaatctgttatgacccacatttttctaatgttgttacatggtattggagactacattggcctcatggttgtgcgagggcttttatttttgagactgggtttcataacccagcctggctaaaacttagaatgctgaagctgcaggtgaccttgaactctttgatcctcccaccaaagctctcagtaatgagctggggaggggtttatactttcaagtactccttaagaaaagagagacacttaggagtgctctgtgtacatgtacatctgcatgccacaagagggcatgagattccttaatggttg

SEQ ID NO: 25652 - DNA, 1197 bp, Mus musculus
aggccagcatgtgtgtaggtactgtgtaggccagcatgtttgatcccctggagcatgggctacagcctggccatggctgttgggaactgtctttttggaagagaaatacaagttcttaaccactccagcctttattctgttccacactttgtttttctttttagaggttccaattatagacactctaaaatacatatatataattctgtgtttttattgttagtgttgtaaatgctccttacatggtagcctttgcactattaacttttattttttggagactttttttcttcttagagtaaaagcagtataggaaagttcagaataaagaaagcggggaaaatccactgcttccactgcgcctgcactcggagcattgagatgagagccatgtctgagttgttcttcttcatctaatttatctttcctgtttgatataactgggaaaatacagtgttatgttctcatccagtgtaaccgtagaactgtttttttatgttgctcttgactttcatgctcattattattattttggtttagattgttaggagacggtcttactatgtgtagtcttggctgcctggaactctgtttagagcagcctggctttgaactcataggaatccacctgtgcctgcctcctgtgtgaccacacctggctggctgtattatttgaaaatgatgctataagattcctattgaatatatttcccctaatttactcaagtcttctgcaacagtattttgcagttgtaagaatgagaagttctatctttatatatgtcaacttctatttccccctatatttattcaaatgattacatttcaaattcaaaataaaaagaaatcttttaagtcagataaactaaaaaaagtcagtaaaatgagaaaatgcaaaatacggttcaaatatattagaaaataatacatgtacctctacaaaccgaaacaaaacaaaaaacagccaaccaaagaaacaaaataccattgtttattgttatttagtactattggtaataaatgatctcaaaggaaaagaagatgtatgtgacactgctgtctgggctgccaggctgagctcactccatggccttccctttgctgctgtgatatctaggatccttaagcaggacccctttgctcctcttcttgttcctggacatcttgtaaacctgggcgcagtgctttcaacactct

SEQ ID NO: 25653 - DNA, 1102 bp, Mus musculus
gggggtcattgaattcaaaccatcttctcacttcaccccgttttctgcaggctgtgtctttaacgaccctgtttcttgatgaactcttgtgttaacggcatactcagttttttccttggggaaaactgccttctcatgctttgctcattccaatgaagtgagcatctaagatgtaagtattgacctcccaagttctttggcatcaaattcatcttggagacataaagagatgaaaaaggccaacacggaaaactgatgaactagaatcaaagtgttccccacgaggaaaagagacccagaggtgcgctcgtgatttgattcagttcactgaccgtgtacatgatacttgcacgtgtttttagggaggaggttgcagttttttgagagcttccagtatccttgcttcagaaccagactgttgcacaggccagaacattttatctctattttaaatggacacacctgagctgcatttttggatacaagaaatgcatatgcatataaaatacatatctgtgagagtcgatgattttgaactgaatcaggatacatatgagacaatactttggttggcttcagaagggatgaactgggtggctaaggaacagcgttggcaataattttttactatacagtactagattcaaaactccctgcaaaggtaagaactggtatatgttcatctactatggggcatggttttctctgtgtgtttctataacatttatcacacaaatttggtatctgcatgagcttattcttcttttctagaatggggatcacaggcttcatgcttggatattgagccaaattcaaattattatcaaaaaaatcactaattccttcttaattctgtattcctattgcacaacaggtaacagttcgtggacaaacaccgcacctttctattactttagatatactgactactcaaagaatttttctatgttaacagagactttcacaagataaccttgcccagagtaaggaaaagcatgctgatctccagtcccttagctttctaggttcaactctcagcagaactgagatttctcaaggatgcctttacctctttccctgtctatgacaaatgagctctcaa

SEQ ID NO: 25654 - DNA, 1182 bp, Mus musculus
ttaggagtcatagcatggcctgactgtcttcccccttctctgttggttcagcttcttataggccacagggttatagacgtcatctctttttatcattgtggacctacaatgtatgataaatattaataaaaaccattctttctggggccaaagcaagaggttagtagaactggtttgcagtattgaccacatccctaatttctagagctactgtggctgacatgttttggagaattcctttctcaggttaaggatggttccactccctcgtggtgggactcaagttagtcatcctaagggctttagcctgggagagctggccccaccacttatctgccatatgatggcatgggtgaggagagatgttgtcctcttgccctttaccacctgtggcaggcaggtgagctgggcgcaaggtcataagagcaggagagctgtccctgcccctcactagctgcagcactagagagagcttgccctgctggcatgggcacacgtgagcttgatttgacggcatgagagcaggagagttggctctgccccttgctagctgcagtagcggatgatctagacagggaagtattggagacctcaccctggtggtgtggctgctggagacctgtcaggcgggtggaccagctcagatatcacccgggccctgatccaggacaccgactctgtctattccaatatctatcatatctataaactgctagagcccctgaagctgcagggtccaaagctgcaagatcttcatgacacaggacaacaaaaggattccaagaggagtcctggtgaggaaccagtatttatagtggagcagaagccagagtcctggaaccagaccaatgactcattgcaatgaacatttccaagatatatgaacaaaacagtatgctgtgtgacacactgtgacacactacagctcccaagataagaattttcttttcttttggttaagaggttgaaagggtagagggtggatacaaggggatggggagatgagagggcctggggctcatgatgcaaaattcacaaaggacaaataagaaattaaagaaaaaggaatggggtcactaacatagagcagtaccaacagaaggcataatagagctaaaagttacctctctccctgcatactcttaggttttcctttatagagagggttgggtctgcatctat

SEQ ID NO: 25655 - DNA, 1104 bp, Mus musculus
tgggccagctttacttctgccacccaacattctagacttaactactggttaaagacaaaaacaaagaaaaggaggcaggctttggaggctcccttgacattgtgacagtcacagggcaccccaagacacttgtcatatctatgacattgtttgaaagtcactagatcctcacctggaagagactttataaacttccaagatcattggacttagggtaagagtacctacatttccaggatttagactcattgcgtctccacaggaggcctctgttttctttcatgcaagttagcttgccttaaccctgttctgacgcttaccgagttattaaaatgctgaaatgaaagcattggctggaagctgctctgcaaacccagtgaacgttgctgtacgtgaagaagcctcttgtattttgtgtgatcagacagtgttctaaaaacgctggggagggagggagtgatcatcgtagctgaatgtttgcagacttgccccaggtgccatagtttgtccttagcagagtcattctcctggatctttacctagagagtcatgtttcttgtgtaatgtggagtggcttcttccactgtgggaagaaagggatggcagtcagaaacagaataaagaatcttcatatgtgcgtagagttccttagatgtgattctttttacttacgaaatagaaagatgccccctaagacctatctcatataatgataatcaagatgtggtcagatatggggaggcacacatgacaaggggtgatgcttgccttgttctttatagttccttcagacattagtgcatagtgtgtagtcttcccagcaattggatgacatacggagagaagacatttttcttggcttacactgtaacaggaagaacactatgtctggagaacttagttaacttatcccaggtcacagaacttgaatgactcgagtttagaatcagacctagatgttgagactttaattcctatctctacagagatagggatctctcttgctgattcttcccatttgactttgaaaaaatggttcctctcattcaagttgccagcttgttctagggtaatgagtcatttgcagaaaacaactgagaacct

SEQ ID NO: 25656 - DNA, 1185 bp, Mus musculus
tataatgggatacttgtgcagccaattatcacctagaatgagggattcttactaaatgacttctctcttttctatagcaagttatgtatgaagagacattttgtcctcacagttatgaagagacagagtctgtcatgtagctccccagggtgagggaggtggcggatgatggtgcgcacgcactgcccagctgcgcactcttgctcctgacatcttacaatgcacctattctcagctctcccggctaacatgggctgtacctgcaggaggtgggtcgctctttggaatttggcttttacaggggctgtaggtctcagagctgtgagttagggggagctggaaggggcagaagagaagttgatttctgaacagaagcaaaagaaggacgcagaggggcccacagagctcagcctcctgggccctggatgccaatgctggtgctaattatctcactttaactacactcttcctcagcatcatgaggccactcgttaatttattcatccatctaatcaaaaggattttcttcaatcactatttgttgcacaccaggcaatattgtagagaagaaactggctcttgttccttaaatatcccgttggggaaatgtttccggtctgactcgtaagctatgtcaaagtaggaataagacagaaaggcttctccgtagcaactcatctgggaaggaaggtgtcaacaattctcaaaagatgccttgggactcactggtcaatttcactgagtgatagggccaatctgtctaattgaaaccaaagataagaggcactgttgagcagagcaagatgagatgtgagtgagagacatctattctggggtctggaagacacgtgtgcttggtggtattgatatatttaacctgggggtgggggagatgtcctagggatgtcagtgtagagaaagaaagagaagacatcactgtagacgagaaagtacagaatccaggggaaaaaaagaagaaagaatagaggctcttataaaagcaaaactgagaaactaagatggcaaaaataccgtagaggccagaaaaagcatcaaaccaggtctgagtgtgatgctgagcctactgcaagtggaggaaggaaatgactgcatctaagagcatacacacatggatgagtgcctgcttcagtgtagtgacagtgtttctggggctgcatgagaggg

SEQ ID NO: 25657 - DNA, 1453 bp, Mus musculus
ctttttaaaaacagtaaaattcatgtttttaaccagttcatgtaaaactatcttgtgatgcccgagtgttccactgaccccgtgtggctgtgacagagcaatggctgggctccatcacagagagtctgtttccacactgtttacaaccagctcagaaagccctctgaactatactcaagacccgctgggattacaacgccctgcatctgcggagctgccccagccgtgacagtcaggcggtcactgctgtcggcggctccagtggatttaggagcccagcaactctgctggctagaaggtgaggccagtggtagcacgtgggattaaaagccaactgttccatccgtgtttcctctgggttggctgactagggcggttttaaggcatcttcagtagaaatgagtctcgtacctctgaaggcccgcagccgtgggtgaatgtgcatgttagctagttatttttataagaggagattcgagcatgtcagtgcctgttcctagaatagcgatccgtggcaggaatcatcttaactacaagtcaccgtggaacttaaatagttttgacagatcacttttctttctccttagaggtggtgtatcaatgtctgacccagttaaattttatatgaattgcgccttctgtttggatacagtgttgggagagaatatccaattgattaactgaggacaaactgaccaagtgactccttcatgtaaataaaggttttaaagcatcttcgtcttccaggtcgagtgccccagctgctgcccttatggtctagtgccacctgctggtaagacgcagaactgtcctgacttcatgaatgccagatggagaatgcatctcagcattggcctttgtccagaactcatactgtcaaatagtgttgttccttcctttggggaactgtttcctgggcagaggtggccttggttaaggatcgtttccttgccctgtgcctgtttctccgttatgtgcggagtgtccacacaaggagagcaagatactccccgggcctcggtgaggatccaggcacccagactcatggcttctaaactgctaaaagcaactgttttgtttccatgttgctgcagtgatctggaatgtgctttactaagacaaatattacagaaccaaaaaaaaaaaaaaaaggatgctaagttcctataagacttgttctcggctatactgtcacttggtgtatcagtttattcaaaagaaaaaaaatttaagtgaagaggtcagacctttgtgagctattgcctgtgaggaattacatgtgtttagcagatgcctgagagtatttttctaaacagaactcctaccattttatttcttctttcaaaaaaaaatctgtcattatatattaaattttttgttttatatatcagaataaaacctttttcttttgagttaccgtgtgttattgatatagcactacttctctgttact

SEQ ID NO: 25658 - DNA, 1932 bp, Mus musculus
aatggggacgtgatccctgagtccacctttcctgtaaagagaaagctgcctgaaggccatttagggccggaagaccagagggatggggaggagccccagctcaccctagatgctgatgcaagttcgggttcagagaaaggtctgggcgctgtgcctttgaagagacagaagagtgaaatcaggacggaggggtcggggcccagtgaagactcactgcaggcgctagccttggaccccagcaagtacgaagggcgttcctacgaggaaaagaaacagttccttagagattattttcacaggagaccatatcctagtagaaaagaagtggagctgctgtcttcactcttgtgggtgtggaaaattgacgtggcttcattctttgggaagagaaggtatatttgcatgaaagcaataaaaactcacaagccttctgtacttctaggttttgatatgtctgaacttaaaaatgtcaaacacagactgaactttggtgagtgtgaatcacaaaagctgtagaagagaaagtctgaagtccggctgactttggacatcccattcccacctctcactcttgttctaagtgtctgaggcccttcaaggcgttccaggtgctcagaaagcctgaaaaggaagcacacacttccacagatgagctgttctctgcagttcgctttgcggctgtttcagtttttccttctgtcatgtaaattaaatctttggtattccatgcacgccttgtttccccacgagtgtcagtgtcagtagcaacagcctgcaatctacaaatacttggtttttcattttaggggatttctgcttgtttgagaatacttgattaatagaaaattaaagcatcgctccctcctagtttacagacatcggctagtgacagtacgtgtctagagaagccagtgctctggatgtgtgtggcccctaaggacacacttgaaagcattagcttttcattctctgagtgctgtttgtttaagacacagatttgatttacaccttttcaagtgttccctgacagctatatttttaatatcataattcattaaaaaaaaacaaacctcaaatgttttccatttattaaactatcctgaatctgagatctggtgtgtagtaataatcaagtgttgctttgcaaataaagtctctgtaggaacagaaatgctttatggtgcaaactgtcttttgctgtgatgacaagtcatttctctattcagaggtaagacagacttttagtgcctttagagtaaacggaaaccacgcaggtgcttccttcctcagggtcgcttgtagcctagcaggaaggaggaacccgggacagacatgtgggtcctgctcttgactgagacacaacttgagatggaattcgggtttcaggcataaggtgtcaagcagaccagaagctcttcctgtggttagagtagctcggggtagatgtgttagagttaggtgttcaggtgaaggggatggtgagtcagtgaattttcacagtcctgtggatgccaaatcttgtttgtttgtttttccttctgtgataagaactaatgtacagcaccagaattgataatgaggaccagccagctctggtccaaaccatccctcggtgatgcgcagcaagcagggggtttggcccaccttcagaatatgagggcttgatggcctctgagaagcactgcagtgttgctatatagcatttttaaatataatacttgcatgtgattactaaaatggattttgaggcaattatttgtgacttggtatactctgttgtaaattcagagcttgttggactttattttttttttttttaattttcagagtgtctatttttgaattaaaatttgttaaaccactgaaaataaaactgttcaattcttgtaacgctaagacattactcttaagtcaagcagggtggtgtatact

SEQ ID NO: 25659 - DNA, 1170 bp, Mus musculus
cttaatggcagaaaattcactaagtttatttctgttgatgtgttttatttaaaggacaggatggagtacagattgaacttctgagagaagtgggtttaggtgattgcttagagtcagcaagtgaggagtttggactaaatccattgtttctatagcccttaagttaataggagttgatgagttagcagggcactgcaacatggccttccagtcggaagcgtcagctgggagagcgcactgtcctccgagctgggatcttggcagtgaagcacacagatggagagtttaagggaggcctggtgacttgttcctctgtctaagactctcttctcttttggcagagataccggacaaaaccatactgctgtagtctctgtaggtactcaacaaaggtgctcacttccctcaaaaatcacctgcatcgatatcatgaagatgaggctgaccaggagctgatgatcccctgccccaactgcccgttctcctcccagcccagggtggtgggcaagcacttcagaatgttccacgcgcctgcacgcaaagtccagagctacacagtgaacattctgggtgagacgaagacatccaggagtgacgtgataagcttcacgtgtctaaagtgtaacttttccaacactctgtactacagcatgaagaagcacgtgctggtggcccatttcaattacttaattaactcctactttggtttgcgaactgaggaaacaggagagcaaccaaaagcaagcgatcctgtttctgtggataaaatcctgccatttgacaagtactactgtaaaaaatgcagtgccatcgccagtagtcaggacgccctgatgtatcacattttgacatcagatgcacatagggacttggagaataagctgaggtctgtgatctcagaacacatcaagaggactgggtttctgaagcagatgcatattgctccaaaaccagtgacccacttggctttaccgcccaacagcagtgctccgagcattgcggcccctccaccctgcttccagcttgctttgccacagaacagtcaaagctctggcactgtgcagtcagtgactgtgaccccaggcacttctgggagccttacacactccccacctaccactgcccagtctcacgtagctttggtctccagctctttgcctgtgtgccaga

SEQ ID NO: 25660 - DNA, 1175 bp, Mus musculus
attatgtgtgtgcagaatagacagcttccatatgagttctgagaactgaacctgcaagagcaacaagtgctctgaactgctgagccatctctccagtcctgttcagttatgagttctttattctggatatatcagaaatgtaatttaaaaaaattcccctctttttgtggaatttttgcttttttgatggtgcccctggaggcattaactttgttgaagtctgcctagtagactttttcttttgttttgtgtactttttggtgccatagtgaggctctgttggcagatccaaagccatcaaaatgtattcctaggttttcatctaagagtctgcagtttagcttctgttttaatgctaagttctgatgctggagggaagagtcatgcttctgtcttgcatggttgtagtttcctcagcaccacctgctacaaatgatgctgtaatgtgttaactagctctgctgaaaccatatttgtatgtgtgcatgttagttacagttctttcttcttttttaaggaaaatctccaaaatgtttcaaattcctgtgcagaatcttgacaacatcaggaaggtgcggaagagggtgaaaggcatccttgtggatattggccttgacagctgcaaggagctgatgaaggtgagtgacaggggacagcgaggccagagagtggccaggtaatgaggagtccagtgttagaagtcacagagcaggcctttggagtggagattggagagttgagaatggataaaattcctcaaaaaaatgggatttcctaaagctttgaaagacagtaggatgaaatctaagagatgtaaggtaatgacagatcactaaggtaccggcatcccacggggctctctgagaagggatagaaactatcgggggctcttcaacaatatttatacttacctacttattgttaagaatcctggtaacttagttgttcactactagatttcagttacaaataaagcctaattcaaagcctgaaatattcttaataagattaagaaactggccaggaattccagctcagaggcagaacacttatttagtttgcatagttctctgaaccaaattttctacaaaatgtaaaaattcaaatggataccttctgggtttccacagccagggatgaagtaagcacagagtgacccgtggtcatgagtagac

SEQ ID NO: 25661 - DNA, 1152 bp, Mus musculus
gatgttttagccacagcggctgctctactagtctgtgcttctgctagcacacatggcccccttggtgcctgcccctggacccagcacaggtctgtatgttctgggtggctgtctatataccaccacgctcaggtgcacacactggtcccccgagccactgtccaggatcaccttgctacatccctgtcaccctcagatacggtcagagatgggaagatgtagcacgggtcctatgcagatggtttgctccttacacagtgctttggagtgtggtttgggctctgtgtgaaggcttgcttctcttctctcacaggaacgccgatgcccaggtaccacatgactccccagaaccagccgcacacccaaatctgtgtgggattgaccacgaggcgctgaataagcaaataatggagtacaaacgcaagaaggagcgagggcttcagtgtcagagtctggcgccaccatcagggcgggagcaggcacctgaaccgacccgtctgctccggaagagagagaaggtgcgatcccggtggcagcaccgggacgcttcccccagaagcttccttttgggcgaggaggacgaggacgaggacagcagcacagagtgggaatgccacgcccacgaggcagaggatgatgatgatcatcaggaagaggagctcggagctgacagaggcgcacagcggggcctctgtggcaagagagagcaggggtagggctggggcctccgagctgccgcccctgcctgtgggtcagactgcaggacagagcctctggtgtaccttctgtcgtagtcactcacggaggcggcctgacctcagcggcaggagaactgcacccatcggactgcacctgcagacctccgcagccagtcctcagcgattggtacctacctggtcccggataaataaacgattttgtatttactctgagaattttgtgtatacgcacaatgtattttaaacatatctgcctctcttgtctcccttctaacgtaggactcctgttccctgagtctccctcccagctttgtgcctcactgaagctaattggtgctaccctatgtaacatgggaattgggccgtcattggagcacaggcaaccatgagggttacacccatgctgtccttaaagctaactcttccttccccg

SEQ ID NO: 25662 - DNA, 1130 bp, Mus musculus
tctgttggccgttctcagtcacttcttataattgtaaagggtcctgagaccccaacttttgagaattggtgagctgcttggatatagtgaagctattcagtgtcttagttcttaggtttctgtcgctgtgatgaaattccgtggccaacaaaccgatttgggaggaaagggtttgtttgacttacacttctgtgtcattgttcatccctgcatcaggacaggaacgcagacggtaggaacctgggggcgggagccgatgcagaggccatggaggctgctgcttattggcttgctcctcaggggtttctcagcctgctttcttacagacctcctgctcctctctatagctcttgccctcccttcatatattactccatttcaggaagaagactgtgctgggaacccacgggtggggctcatccagcatatctgtttgtctgtctgtgtactgtctcatgttctgtatgagggtcactgggcatcccttccatagagagtgtctgcagccatcaaggaaggatcagaagcacgttagcagagtggaacacatctttgagactgttgtgattgcctgaagtttcaagggattgcagggcctagacctcattagtctggtctgtatcacattactgagctgtaccaaaatctttcgggtctagcagggatgtcaggtcggagtccttccagggagtgcccactgagtataggatgctgtgagtccaattcaaacaacttgttaattaggcctcggtcccttggaagagtgaagaccggagatggtatggtgcatcctatatgatgaggcagtatagaaaaggactcaccaaagctctgcttcccctctcccccccaccccccgccccgccccatcaatgacccgttgtcagtagctctctcagacgccccttctgcctccatagtgagcaagtcttcttatctcctggtaaatttgtgagtttcgtgtagtttatgtttggttcctctccactaagtgtcacgtgctctctcctcaggcatcttctgatatctcagcaaaccctgagaaatgttccacccatagtgtttgttcaagacaaaagagacttggtcctggctgaggtgagcttttaccgtgattagccttttttttt

SEQ ID NO: 25663 - DNA, 1158 bp, Mus musculus
ccctcccaacccaatcttgttttcttgatctaggaagaagttttggtatgaaggtccctccctggggtctcacttgacccccaggccatccaagcatgagttcctcacgaagaccacctcaaagaagactaggaaggaagacagcatccgcctgagggtcctgaacggccttctctacaaatcattgacggaactgctgtgcactcctcaagtgagccaggaggtctacgacctgaatgtggagctgtccaaggtgagcgagcagaggccggggttggggcttaggactgtggtgaggtttataaagagagcgtggggcccaccatcttcctagaaggggctgtgagcagtgcggtggggcccacggggttgagctgagagaagggaggttagcgtgggtgtctgtgacccgacttcccctgggtgaatgctctctggctgccatcaccagaataactggcaagaggcaggagaagctgtagcgcctatctccagcacgctgtgcgaactgtgcagactgaacgtaaagtgacaagcgttggggggcctttcaggtctctgtgacttcagacttctcagcctgccgagtgtactggaagacgggggtctctgcggagcagaacaagcacacggagtcggtgctgcagaggagcgctgcctacatgaggtgatggggtttgcttcctacgagtaacgccttctaactgaaccttaagtgccttggccgcttgtctgtaggtaaactttacaatttcgtttgcattgaggatttttgcctttcaggaaaatcttagaagcgtctccttgattcctagagtataaattgcattttcctgtgagacctaacctaatcagatttctcaaaagtctcgtggggctccacaggtccttccagggtgctgtgaggcaagaactattttgactgcattaaagttggctcttgattccactgctgcccaagcttgctgagacacacggtgcctgatttacctaaaagcatcctggataaacaaggaaaagagtaaaaagagcaccattgtaaatgttggtccttggcgggaagcacaggcaggtctctaatgtctgctgaggcaccgtcctccctaaggtcctccctaggtgagaattcctgctggagtgaaccactgaagagcagac

SEQ ID NO: 25664 - DNA, 1241 bp, Mus musculus
tatgtggttctgggctccaaggagaatcagggtagcacacttcctggttctgaagaggccagtcagcaggagaacctggccggaggtgacagtggtagtgatggcaaagacagcactgatgtccaagacagcttgcagaccctagggtccgcctcctagagcctgcctgcctgagcactgcaggtccttgtattttagccacattgttcttgggaaccttgctctgtggtccctgaatgggacctgaatggctctcctttcaaagctttagcagcaaccttctgcataacctgtgtgatcatggaggcacacctagacacagaacctgctgtgcgggagtcaaggaagccagcccgaggactgccgtgcagccctttcttggcttctccacgctgccgtcacatgctgctcagtactgttctgactgtgtcctgcagctttctgcttggaatgccaaacaggaagtggggacaactcgaggtccccagcttccagcctttgcattatttatctgtttgtttgttttccttggagtagaatcatcaagtactgcccttgctttctgtggaaactgccctgcccggccctccctctttttgaagaagaatggtccctttcctgagggagaaggtgataggtgttagactagtacacaagcagaatttgtagctctaaggaaagaacacgcagaaattaaattgcattctctaacctgaaaaaataaaaatataaaaaggagtacacgtttgttgtgggaattcattggtcagtccttacctggtgctttgggtttagtctccagggcacctctgccgaggaaacattccacctggtggggtgttgggttttgctgaagagttataaaactaccgaggctttcatttttgagaggacattgctcttcccagtttctgtctatagggactggggagtcgagttggctgtaaataatcacaataatccccattttgacctttattggattggtagttaaatctgtagaaggcaggttcgtctttccattattaataacttaactttgttgtattgcatatgaaatgagtatttctactttatgacacttaagatgttggcaagccattaaaaatggacagactaagccagtggtgaggaacccctttgatcccagctctccatctagaggcaggcagacctcgagttctaagctagtctgatctacacagcaagtcctgggcctgctgggactacaagttaagagc

SEQ ID NO: 25665 - DNA, 1202 bp, Mus musculus
ccagtccactccctccccctccagatgtagccaggtgcacagtgtgccctcatcacatgccctcctgaggcagtgaccatgacattggttttgtgctgagatgactaagggcctgcatgcttgccagagtctcatggtggccctgcttctcttctctcttcagaggccacaagaggaaactaaatgaggaagacgctgccagcgagtccagcggggagtccagcaacgatgatgaggagggcagcagttcagaagcagatgagatggccgctgctctggaggcggagcttaatgacctcatgtgacttggacccgccccataccagcccttggcttgggtcctttttctccagaaaaacatatattttgcagagctccacatacagaaacacattattttgcagaaataagtgtttgtaagaagttttactataggaaagtctacttttttaagcagcaaagtgttctgaggagttggtgtgtgatgccaaagagctcaacggggcctctcatggtgagcgtggatagatacgtgatgtctggtcatgtagtgagggccttgggggcttgcctttgaatgctatagcatatttagtgtgaggactggggacccagtaagatttagagagcaatatagcaaaacctgtcatcttggacctttttcacagctgatgctatcataattttgaaggatttttaagtaaaacagcagtgtacatatgtgtgtacaggacaccaagactcgcaggcaggcctgagagccccagccactcttccggccctcggcggacctgcagatgacctggagttcctgattcaggtccctgtctgcagcccgggctgcctgggccacagcctgccagtgtgggcagtgtgacgaaaggcggcctgtactgccctaagaaatctgatgtaaagtttttgtatatttcatattccacccaccagattctgcttccatttaataaaaccctttttgtaagctgtgtgttctctggtgtgtcacagcagtgtgcggtcctctcttcaaattccctctcagcagcccaatgccatgttgggttagggtgaccatgcctgagcttgtcagagtttgtagaacagcacagtggcccctgtcttcaaagctgtctgaacagaagggccatagtcattctcttcccagcttgttctgctaagctgtggtaatggaagaagtctag

SEQ ID NO: 25666 - DNA, 1522 bp, Mus musculus
ttcatcacaaccgtgaccttcttgtggaaagtgtcagccatcactgtggtcagctgcctcccactctacgtgctcaagtacttgaagagaaagctgtcccctcccagctactccaagctgtcctcctgagtggggcatgaggccaggtagagactcatgcgctgggcagcatgagggactggcactgctggcgggctgagggcgagctcacccagcattgcactgcgtgaacagctactgagaggaagtgacagcctcggcacagctgggcaggcttcgctcctgagcgccagaagtgtaatttctgcggtggtgaactgcagaaagccattcctgatcagactgcaggggccatgcctgcacatgccattgcacctcaggagacagtgggtaactcgtcctcttcagatgcagttttgcttttcagcggacaccacacacacaagcccaggtggccaagcggtgacactgctgtcctaattccgttgcagctatgaatgtaaaccattcctcaaggcactgctgttagctgatgcattttatatctgtaaaaccatactcagaactgtttacgtagaactcagctgtcctgtgctgccacagcaccaaccacaatgctttgctccctgagtaggagtcctcgtccgtgtgcttatacccggcactcgtctgagcctgtgatggcagagcctctgtcgaaggctgcactgagggctcatgggagctctttagaggaattctggccttagagttagccccaggagttgtgcgtgcagctctgcactgtacagcgtgttcctgtcacacagtggacctcttggcctcggctcttcacgctcgggagcaggctgtgggagtctcctttgcactagtactttgtatatgcctgtgctcttcagcttgacctcccctcagacgtggccactgagaccctgacttccttggggaaggaagcgcacgctgtgagaggagccttggggagagccttaaccggccgtgagtgtgtgcaggccctccacccgctcctccctgtgagcaaataaagctgctcagccatccatcccagatgcctttgacctgagcgcctttgttcttagcaacctgtgagcatattcccctgacagacgaaactgcaaccagaaaagctgtttctcccattctccacacggtgtcactgtttgctgacagttcacgggctggtttcctccctgctctaagagggagcccagaccagcttgtctgacctcagcttatctgacctgacttcgagatgcccccatgccctcattgatacagcgtgaattaagaaagtgccagaaggctatgagccaaggccacagtgccagggtcagggtgtagactgagtgctggtcactcactcctcctgtatgctgggtagaaaggaacacacaggaagctaacagcatgcttgtcaagagttatagaaagcctcacaagaccatgaacctctgcggttcagctgctttgatgcagagcagaccttcccacagtggtgaatatg

SEQ ID NO: 25667 - DNA, 1163 bp, Mus musculus
tccaaaaggggattatactaaggagcctcaggtaggactgtagagagagagaggctgttcacaagtgctggccacagagcacaagtcacaggcatgcagaagaagctacagtgaatatgcccctgcgggatgaccagaacctatcgtggtgacactgccaaagaagtgacagattatctgcacaaaaatggagacaaactgagcagagtggtgcatgtctataaataatcccagcacgtactaggctgaatcaggacaaattgaggccagcttgggctatatagtaagtttcagtctaatcttggttacaaagtaagaccctatatcaaaaaggaagggagggtagtagatgtttataccaatttatttaaataaccccaagttgggaataaccaagatatatttacacaaatgaaaaattggttcagcaagtatggcttatccaccgtgagataccattcagttgtaaggaaggcactgtgcacacccacagcacagatctccagggcatgacatggaatctgggaagccatccataaaatggactttctacctaagtctccacagtagccctacaatgaaagagagagacagagagagagagacagagagagaatgaatatgagagaatatagagagaatatgagaaagaatatgagagaatagagagagaatatagagagaatatgagagaatatagagagaatatgagagattatagagagaatatgagagaatatagagagaatatgagagaatatagagagaatatgagagaatatagagagaatatgagagaatatagagagaatatgagagattatagagagaatatgagagattatagagagaatatgagagcgaatgagaatatgaatgagttaggtgccatgcttgatggctgagtgtggacacatttgggtactagtgtgaagaaagttagggtttctctgtattagatggttgcatgtgagtctgacatcatccaaaatttaacaagaacactggacatggtggtacaacaccacgtaatcccaccactaaggaggctgaagcaggaggatcacaggttcaaggcctgactgggctttctaggaagtttctctttgtccttggctgtaagaactgtttcaaaaagcaaaggttaataagaaaactctgat

SEQ ID NO: 25668 - DNA, 1176 bp, Mus musculus
ctgcattgtaccccaaatcctctttctttaccttagccccagctaaaacttttccacttttagtaggggtaaacagtattttattgtaatggtattatgggacgataaatgggttggcatattttattttattttccaattttttttattagatattcatttacatttcaaatggtatttcaaaagtcccctataccctccccctgccctgctcccctacccatcccctcccacttcttggccctggcatccccctgtactggggcttataaagtttgcaagaccatattttcacgtacctattgaatgtatttccatttcccatttactatataaataggataataactcatctaaggcctcctccttccttgtccaattaagacctgagccccagccctggagtgtcgaggggattaccctgtgtgatcaaccctgtgcatgtgtgtgctgctgtacttctgccagacactggcctgtgactttatacagtggactaatattacagccctgttgaagcaatttctgtgatgaaactgaagcagtcggatgctttgcccaggagcacaggctgctgtggttgtcaagcccacccatcttagatctcggtctggtctcttcctcgcccctcagtggcacacttagagtggccctcctgtgggctgggacactgtggtagggacaacttgaagacacattctgcatgtttcctctagcttcccttgaagtggccctgcttccttgtagtggcctacagggaagtggggaccagactgcaacactgcctgcgattgttgtgggggtctccaggcttcaatgcatcagtctaggttctctgggaaccacaaacaagagccatttccttacagtgtggaaacatggcacgagagggcctgcgaacccttgtggtagccaagaggactctgacagaagagcaataccaggattttgaggtgagctgcatcagtccttgtcactcaaggctcttcctccttatgaaaactttgttttctccatgaaggccaatcttcctgtgcaagtataaggccagtgtttctgaagtttgggggcatggactatcttcctccttcctcttaattggggggcggggaatgagtgtcataaaggcaggtaattccatctcctcagcagaagctgagagtctcatccctcact

SEQ ID NO: 25669 - DNA, 1099 bp, Mus musculus
tctatgtccaacactgtgtcctgctttaatcaaccattcttagccaggctggctcctggcagtatagggagagttaaacttcaggagtattacctttctaccaataatgattacttttcagaagtaggtcataaggctactaaaccatgctaacgtggggctgggtagcgtcattctccagcccagtgctgtgaccgagtcaatgatgacttagcttcctagtttatgccttacttagaggagcagaagttgctattacaccaactcacggatgtgaaccaggcacagagactcagattttcttttttctagagccccttccattggtttagactattaacacgacatgcttagagaaaaactcctaagcctccctgtcagagtgaccattctgtggagactttgcatctcctaacagatgtcccagggcacagtcagtgtgtgaccagccctccttgtggagctgcagcgctttctcaccctgcctgtgctcactgctaatcttcctacacagggacgctcactcagaatgaaatggtatttaagcggctccatctgggcactgtctcctacggaacggacactatggacgaaatccaaagtcacgtcctgaattcctacctgcaggtatgtgagtgtatttctgaatgccatcttctctcagtgcacccaccgtggtgagctaatatgctgattggattattttactttttatcattaccctcctatcagctctagtatctcaaccaagaaactatgactagcatatctgtatcagcagattcgtgggaaatatgatgagctttaatcatttatttgttttttaatgaattctttctaaaaatagtttagtaaacagtattttaaagggtaattaatagaatactggctttgctgtttcctaataatccctttgtctttatttatacttaaaaccttctcacattaaaaaacaaatacgttctgttttttatcttttcagtgactaaggtaggtacctcagcaccatgctcccttggcagctcacaaagtactttctgaactcactatggaagctacactgcaggaaggaagctatccaactcaaaattttggagtc

SEQ ID NO: 25670 - DNA, 1137 bp, Mus musculus
cttagacaatctcagtgaactccaggcagtggctgtactcacagtaaaacagcagaaatggtgaaagttaggaacacagtggaggtagccaatagaatcatcagaaatagtaaaaagttagaggagtacaatagaaaaaccaaacagaatcacatgctgtcctcacctgcaggatgttcaggaacttgtgtttttcaataaaagaggagactgggcattgtaatatatgcctttagttccagcactctgaggcagagacagacaggtctctgtgagtttggggccatgctgatcttcacagtgagttccagacatctaggactacatagaaaaaccctgactcaaaaagagtagagaataaaggttggccaatcttaagagcagtgaaaatcaaagacatagaaggagatccaatccagtattgctcctgtctagggggagcgcagggacaaggagtggagcagggtctgagggatgggccgtccaggggctgccccacctgggggtccatctcatgtgtagccaccaaacccagacacttgctatgctgggaaatgcttgctgacaggaacccgatgtagatctctctgagaggctccgtcagagccttatggatgcagatggggatgcttgcagccaaatatcagactgagcacgggaactccattggaggagttgggggaaggactgaagcagctgaaggggtttgcaatcccatgggaggaacaacagtatcaaccaaccagacccccaaagctcccgggaacaaaaccaccaaccaagctgtatatgtggcagacgatggccttatctagcatcagtgggaagggaagccctaggtcttgtgaagtctcgatgccccaaagtaggggaatgctaaggcggtgggtgggtgaatgggtgagcacccttgtggaggcaggggttgggggtagagtgggggagttttcagggggaaattgggaagggggataacatttaaatgtgaataaacaaaataactttaaaaagcaaaaagaacagaaattagaggcatggtatccaaaagccaatagagtatgctgctgcacatctgtagttccagctacttggacagctaaggagactcttgagtctgagttcaaagccagcctaggc

SEQ ID NO: 25671 - DNA, 1162 bp, Mus musculus
gttgctgtgaagagacagcatggccaaggcaacttataaaagaaagcatttaattgggggctagattagtttcagagagtgagtccactaccattgtggctgggagcttgctactaggcaggcaggcaggcaggcaggcagtatagtagtagctgaaagattatatctgatctgtaggttggaggcagagagcgggggtggggggggtggggggggctggtatgggcttttgaaacctccaagcccactttcagtgacacaccttctccaaggccatacttcctaatccttcctaaaacagttccgccaacaagggaccaagcattcaaacatgagattttggaggccattctcaattcaaagcactacaggtgattagtaaaatttggcctgatgttattccagatgaaatgtactgtaacagaagactgcttagctctctggtcttactttaactaggtaccagctggaggatgagtctgcccatttggatgaaatgccactgatgatgtctgaagaaggctttgagaatgatgaaagtgattaccacacattacctcgagctaggataacacggagaaagagaggactggagtggtttgtctgtggaggatggaagttcctctgtaccaggtttgtcgtctgttgctacctgattattacatatgtaactttagcagctagcttaggtgttaggtgttatgtctgttatgttggtatgaagactaaggaaaatgctgtcattgtggaggatactagcaacatcagtccacatcagaggatgctgttctgaaagggaaaaatacgattgattattttatgagacattttaatgattaaaacctggggaaattaggaactttgtactgatgcatagtaaaatgtcatgtggaatgtcggtgtaaatggcattctttctttgtcaaaagggttaatatgaactttaaaagtataatttaatgacagtgtaattatgtgcattattcagctttaatgatttgacttggaatagaattcttctgtttaatcaagttattaagttaaaaattcttcagatttcaaggcatttccatggtattaagttaacacggtctgattgcctttgactggataaagtgcagctgtttgcctcgcatgccatcccacggagtcacgtgtccat

SEQ ID NO: 25672 - DNA, 1183 bp, Mus musculus
atacctctacaacaaaattaaaatttggtaactacaacataaccctcaattttaaagtttcttttatgaagcatagtattattttctttgggtaagaaactacatgagtatgggacttccacttaaagcatggtctgaacattttaattgcattgctaaaccatggctccactaaacagtttaacttctctaaatcttcattctaccctacaaaccatctatccacagagtattgtgtaaagttctgcctaagtacaaaatggggctaatagtcagttacagaaagtgcgggggggggggcagggacagagatggagagagacagagagaagaaagagacaatgagccactggcatcacaatttcaaagaatcaaagtttggtaacaagatggcttaagggcaccgtaagcacttcccttttcaaagtcgtcatcaggcaacgccaatggaggcggggcctatcgtagccacacctccggaacgatccttcgctgttctgtgacgccatcagatggcgccgcgcgggggcggggcgccgccctggggtgcgcttcggccctgactggaaactgagtagactcggctgggagattccgccgagctgaggctgtggggcaggcaggccggagcatggcggaccagattcccctgtaccccgtgcgcagcgcgggcgccgcagccagccacagacgtgcggcctactacagctccgccgggcccgggcccggtgccgaccggcgcggcaggtaacggcgggcccgacccttcccggctccaaggggcttccccgccggcccacggtctgcacggagcccttgagccgggcgcgggcgggccgcggattccagagcccggggccacgggccgagccgcacccagggattcggagacgccgcccgcctctcccgtcgcttcgggagccccaaaacttagtgtgtgggcgagcaggccggtgacaggtgccactcgccatagcgagggtgacaaacacgcctggcagatcagcactgagtcttccagacgtggagcgcttgttaggcccactttatacttagccacaagtgtacacagggctttctgttgacaggaggtgttctggaagagtagagtgaaggtttagagaggctagatggtttagtggggccatagtatagcaatgcagtgaaatgtccagaccttgtg

SEQ ID NO: 25673 - DNA, 1438 bp, Mus musculus
gaggtggtgcctgaggcggcgggtgaatggcagaccctgaccaatgtgttctgatgccttggaaagaggtcagagcaccctccatggagctgcacgtgagggctagagccctagaggctctgttctgaaacttcaagtggtagtaccacgctaatgttttagctaaaattatttgaagaatcattgtcattcaaagactcacaggaaagcgactgggaagtgcacaaatgtagcgttgtcattgccgacaaatgacagagctgggcactgccatgggcgctcaccttctcatggcagtgtgtgtgcgtagcagatgaactgggtctgaatatcattgcggtgagatttgtattagcaaaagacacatcaacatgggagaacacacgtatggtagcgcatgaagttcggaggcagtgccatcacaagcggatgtttctccactttttactctgcattttgctaattagtaacaatcagttctttttagcccgctcttaagttcacgcaactgatgccttgagagactgctgggccagctctctccagcacagaacctaacccctagttctgtgaacacaggcgctgcctcagcagggctgtggagggggcctgacctgcaggcgagggccagctgctcacacggatgaatctgtccggtcacgtgggttaggtcactgcagaagcacaagccataccctgtgagcgggaagtgacagagtcgtctaagggacagtagctgtccctgtccactcagtaaatgtatccgtattttaaggctaaggacacagagcccagcgactgtcctcacgcatacggaggtgtgttgtctcaggagactcttagtgtcatcaggcagtgccccaggggacacagacacgtcccaaaccaaagcctcctgcacggagcagtgtgtgcttcagcattccaaagacagacggttcccacgtgacagcagcccctgaagctctttgtatgttctctatgtaaatacctgtgtacagagacagacacgtgggcctccctccatgtggctgaggagtgcgtgttgtaaatagaagcagtcctcctcctcttcctcacagagcacatctggggccactccccggtgcacctcagacccgtgtcctgttcactgttaataaatggatatctttttcactgtaacagaaagctgggctctattttttttctgaaaaaaaataattgcctttattttctctcattgcctccttggtctcagaagagagcagttttattataaatattatgtggacttgttcactagagtcctgaagagagacatttcactgttattttgaaagggcatcttttgattgtgttcacttttgtcatctgtatataagtaatattgacagtgacataaaaacttttgttatgtgaaaatatttaagtcagagaactgttaaatattattact

SEQ ID NO: 25674 - DNA, 1172 bp, Mus musculus
tgatgagttcggtggggggaatctcaggaactctggactgagtgggtcttaaaggcgttcctgaggtaatttgtgtcccaaatgtgtttaaagacagcccaagtggtctaagatttctgaatgtcaatcctttatttttaattctatttatttaagaaatataactacttacaccatgttttgtgttggggtaaaatgtcagatattagaagggttattgcaacgtcttagagtgtgaacaatctcttggaactgtagagtttatttcttggtgtggtgttagagatctgtgggtaaaactttatggcatcttgggatagcttttggtaggcatatttggggtgtcgccttttctaacctcatagttttgttctgtctcagcaagccttagaaaacagtgggctgtcttcacttccagttgcagctcctcccagcgactgcagccatgctcagacggctacagtgtccacacagagtccacacgcctccagtgtctctgcagagcaagctgatcccatggatgcagagcaggaaaagggacaggaaagccctgaaaagacggataagaaagagaaaaaacttctgaagaagaaatccccgttcctacctggtaatttcctgtgctgttcagacacttccatctgctgtgctcctcttaggaagtgagcccccccttttctgaagtgttttcttcatggcgtgctctcaagctgaagtgcagttgactggtgttgagaaataaaaggcgaacgaccttctgaggagttgtcatgtccttagctcagaggctgctttcctgtgccagtcacagggcagggcctcagcctgtccttgtcttctgactgtttccttctaccagctctccatccattgctctccatccgttgtctcttcagctcttgctttggttgctccttgccctgtggtcccttgtctcaccgtgtcctgcagactctcctcattcttcctgggtcctgcctcagctgccagcctggctgacccttacctttccctttgctccagggctgctcccccggcccagcctgtgcttggcctccttccttgcactgatctagatgccatctttcttcacagttgggttcctgctgtaccagagctgctctcaggggcttttctgcagctgtctctgcagactgacctaggtgtgctgt

SEQ ID NO: 25675 - DNA, 1173 bp, Mus musculus
agagaagcaaaataatacgtgaactgtcaacagttactgatggaaacgtcactcttgcaggacccctgtgccagtgccagaagaaccatgaaggagcgagctgagtgggttttcagggccggtgggcgggcagaggtaacagtggccttcagtgcagccatgtcttctgagggaacaggagaaggttgagagagagcaggtggtgtgaggagagctgagtgagactgggaagctgtggaagcagtgaacaacccagacttgctgtgacctcagaaagagtccctctgttgagttgggagcagccatgggcctggttgaagcagcaggctgggcggggttatgaggttgaatggctgtgccttggggtagacaatagttgggacagccagcagggctgacatgggagtaagtagactgagaaagctatggaagaatggtcttgcaaaaaccgccatgggctttgcttgcgatagggaaaggtttgtctgaaacaggctgaacatttatgaggcgcctgtagtctatgactgcatccctagaagatgctttgcctggagggacagttggagcctggacattggacacctggcagagttctctcattctgaaatattcacagcgattcttcttctctctgactaggtgaaaggccattcaagtgcagtgagtgtggaaaagcttttaaccagaaaggggcgctgcagacccatatgatcaagcacacaggagagaagccacacgcttgtgccttttgtcctgccgccttttctcagaaggggaacctgcagtcccatgttcagagggtccactcagaggtgagcatggtgtttgggctctgagcactataacagtgtcatagatgtctcttgagttaatggttaccctgagaaatgatgttacagttttgaaaatgcagattgagtttatgtacagtagcctattttagcaaaaatccactgatgggaacatgctgttttgttgctgacagaccttggctggtgtggcactcagtgtgtagctcaggctgaccttggactcatggcagtcttctcgcttcagctcctgagtgttggaattacaaggtgcaccactggagcaggcgcttgggactttagtaatgcggaagaaataaaagatcctgtctgtcttcttactacaaataaatattttgaa

SEQ ID NO: 25676 - DNA, 1440 bp, Mus musculus
ggggccgtgccgatggacggcagcaagattctgctcaggagcagccgcaaggaggtggagggtgcggccagcgcccaggaagacactgaggccacggtgccgtgctccttctgtaagagccggttcgagcgcaagaaggacctggagctgcatgtgcaccaggcccacaagccgttcaagtgcaggctgtgcagctatgtcaccctgcgggaggagtctctgctcagccacatagagagggaccacatcaccgcacaggtgcccaatggcagcgaggcctgtgtggagaacggcaaacctgagctgagccctggggagtttccctgcgaggtgtgtggccaggccttcagccagacctggttcctgaaggcacacatgaagaaacaccggggctcctttgaccacggctgccacatctgcggccggagattcaaagagccttggttcctcaagaaccatatgaaggcgcatggacccaaggcaggaagcaagaacagacccaagagtgagctggatcccattgccaccatcaacaatgtggtgcaggaggaagtcattgtcgctggcctgtccctctatgaggtctgcacaaagtgcgggaacctgtttacaaacctggacagcttgaacgcccataacgccatacaccgtaaagttgaagccagccggattcgagccccggctgaggagggggactcagaggaccccctggacactaagcagttcttcttacagtgcctgaatctgacaccatatgtggctggtgatgtgtcccccggtgggcaggctggacggcgggtggctgaattggaccccgtcaacagctatcaggcctggcagctagctaccaggggtaaggtggctgagccggccgagtacctcaagtacgggacctgggacgaggcgctggcaggggatgtagcctttgacaaagacaagcgtgagtatatactggtgagccaggaaaaacgcaagcgtgaacaggatgctccggctacccaagctcccccgaggaagagggccagtgtacctggggaccccatgctttctggccaccttgatccccggccaacctcacgccccaaccgcagggcctcggccaccactggccagggcaagtcctctgagtgcttcgagtgcggcaagatcttccgcacctaccaccagatggtgctccactcccgcgtgcaccgccgtgcacgccgtgacagggatcctgaaggggacagagcagcgcgtgcccgttgcggttcactcagcgagggtgactcggcttcccagccaagcagccctggctcagcctgcgccattgctgactcccctggcctggctgaggaagtggtggatgacagtggtgaagaggctgtgcctgaacccgcatcaggtgagcaggcgtacctgggcggatgaggttcaagtaccccgtgtagccctttgccc

SEQ ID NO: 25677 - DNA, 1163 bp, Mus musculus
gggggcccctgtgctctgtgggcctctggccccgatggatatcgacagaccagagctggacatggccaggagcctcccagcgctgcagtgcaggggcccctggccaaacccaaacaggagggcagctccaggttggcaccttccccgggcagtgggagcctcagcagaagtaccacccccacaccctcagtgataacccgtgttggtgcccagccctcggccaatagcaaaccagtggagaaactcgggggcccagcagtggggactggctttacccctccgaataagcacagtgccccagactctctgaaagccaaattcagtcctcagcctcagggtcagcctccattgaaaggtgaaggaggctctcctctacctccccgagaaccctctgtgaaggcggcccaggagctgagaacactagccacctgcgcagcggggtccagaggggaggcggccttgcaagccccacctggtgcgcctcccaccttaaactccgccaagcaggagccggcagctgaggggcaggagaagcgcttggatatcctcagtatctttaagacgtacattccaaaggacttcgccaccctctaccagggctggggtgtcagcagccctgggcccgagcacagaggtaagaagggctggctccctcctccctggctgctcagaaggtcacagtgtgcttaccttgcctgagccaccagggcacataccggcaagttgctgcctcctcttgacctaggtaccctagctctcaacaggtgtccctctccagagcttgtgtgtctggggcagcaggcagcaggcagcaacctttgaccatccccttcctgtgttgctctgttctgcaacttgacagaagcatgcagacctgaccacatgacccgtcacttagaaaacattggtgcacttgcccaccgtgtttgtctattgaagggacgtgtacgtctttcatttgtgtataaatagtacagaaggcacatacgcagtaccctgcaggcagggtcttgcaggaaatgggtgtgtgcataaagaacggagggttgagctgtcctctgagtcctcaagcagtacttacggtgtccccatccctccttctgtgtcgttcttcacaggcaacagctgcttaggtgggcccacttgtgttccggagtttggat

SEQ ID NO: 25678 - DNA, 1056 bp, Mus musculus
ggcctggtgagcaccaccggatgagtgactttgttcacagattaatgggggtcgccaggcctgagggtgaagacggctttatatacctcttccttagtcacgcaagttcacgtttctgcggtggggtgaaggcccgagcagaggctgcgaacccacgcgacgtgcgcagtcggaactgtattccgcaggtagcagcgattcctttccccgttgctgtgacactgtgtgtgatggcgatacttctgcaagttccagatgtttgcacatatgattttatgcattatcacgaattaccgctgccttgaatgaaaacgttctgtgaaattttttgcaaaagctttactagtttttttttattgtgaaattttgtaaaggcaggaaatggattaagacgagcatgctaaatatatttttcaaaaaaaaaagcaataattttacatgtacagaaattatcctaacctttaatactggtgagagcgacagtttacttaacccggtaatggatcagcgcggtttttgtaggaaatgggcttctgatacaaagacttgtttaaacacacatgtatacacgaaccctggcgcgtggttctctgttctaatgatctgttggattgttattattattattatattattattattattattgttgttgttattgttagttaatgtttgattccaggttctatttgttactgttttaattacttgaccgttcaggtgactgctgcacttgcaagcaatgcaatgttaactggctagcagatatatatatatatatacatatatatatacacacatatatacatatatatatatatatgtgtgtgtgtgtgtgtgtatataattttttttacttacttttcctgatactcctacagcaggtttgtatgagagcggcttgccgtgtcggagcgcttgggaatagccatcattctgaggcgttacttggagcaggagcaggtcgtagagatacattcctctctccgcctgaggcagcgtagtacctttctgttgacggcgtttgttctttttgctaggttccccatcatttct

SEQ ID NO: 25679 - DNA, 1060 bp, Mus musculus
cactctgtgtgtcccctgccctctccagctgccctcttctgactcctgcctcgctctctggctcacaccagcccagcccccaccatcccctgcttcactgtgtgacgtgtcttctcttacgcttttcctcctttcaagtacacattacacagagtttctcaaatacttcaggtgattcactcattcttaattcccagaatgaaggtttaacttcacgaacaataaatacattgtggactcttctcctctggggagttgctcactgctcctttccacacttctgctggttcttgaagtctatgcagtcttaggtggagacagtttagcctctcccgcgtagtacaatttccaagtcaagtggactttgcctttttggttctaaaaagtattagatattttaaaaagtttctccaatatttgcttatttatttttttaagtccaggaagacactggtttctggaagtaaggtgttccaggcggcacaaggcaactctttcaacgtaaaagagctctgctgtcccagcgggctgtagggatgccccttccccttggctgctgtgtgcacaccacggcttctctgcagctgggactggagtcgctctccatttatgctccacaggtgaccagttccaccgtgggcatcacagggctggcagcagtgaccttttcacctcctgggaaccagtcgagttgacacctgtctgggtggatgagggtgtcttccaggtcaaacagtgcctgcagtcccccaggaaggacctgtaagatgagacacctgcctgtcagcacccgaagaacgagttttgttgttttaatgcttataaatcaggcaacttcaaattgcaacttttgttcactgaaaaaaaaaaaaaccaagcatgccccacagacaaggttttccggttacacgtttttgacactaatgattaacacacactgcagagccctgggacatgcctgagtgacgtggccgccaagcaacatgtccctttttcaccgactccactaagcattcgttgaggtgggaagatgcagaagcccatagagtttgtatttctt

SEQ ID NO: 25680 - DNA, 1148 bp, Mus musculus
gctttccaaacagcgatggacattaccctcagactgagccaaaaccagctttcccttttagtcgctgcttcttagtagaggttttaggtacagagaagagaaaagcaagctctgtattgctaatagtgtagcctaaattctccgaaatcacaaagcctctccctgacaaaaacaaaaacaaaagcaaaaaccaacaacaacaaaaaaacaaaacaacaataaaaacaacaacaaaaccaaagtcctgtaggctgtaaactaaccctgttgcctgtgtctgtcatgtttaaagacatcatgcaggaacacatatgaaagcagagcctcttcctctggctacaggtcctgctgcagcaggagtaaagatgaaagcattcttgcccaactttcttgaagttgctgttcaacattaacgatgtaggcttttcctgaaatacagcttagacgcaggtatgttacataggattgggaagaggaacacaaagaggtctcgggacactctctccccctctaggacctgtgttctgccctcctggggagcaggaggcagaaaagtgacttctgtttctcaagggtaaaggacagtgtgcttgcccttttctttcaggccctgaggatcctgtatcccttctccttgtgtgtattctggacagtccttaaaaaaaaatcattagacccaacacaacttaaatctcagaaaagatgtcaatgtgtttcagcgcctgggcacacaattaatctccatctatctccggtaatataaacacacctgtgggatgctttccactgagtacatgaaaggagcctcataataaatctcagactgatcgccttatcatgactgacagagccgctgcaggctccttctttatgagtataatttgggagtgtataaaagcagcagattgatttgcgcagagcccttcccttcctccagtatttattccaagctgtgcaactccctctttttttttattaaaaaaatgtactcacaaaatatggttcctatatttaatttttataaccacatgtgtgtgtgcgcgcacacacacagagcgcgtgcacacacatatatacataaacacacacacagaggagagagagagagagagagagagagagagagagagagagttattacttaaagc

SEQ ID NO: 25681 - DNA, 1196 bp, Mus musculus
cagatgccacaatatcggaggacaaaactcaccaataatctcatgcagctgtgaaccctgctagttacagcaacaactggcctgacaagatatgcctaccggtacaatagtggcgttagtgttatgggagtagctaatcttttatggattggtattaaggaccactccccaagatggaactcacgcctgtcaccaataataagatggagatcctgtggctagtttggtgacaggcctacaaaagcgtctactactactattattttgccaaatagatatagtattaaactgacccctaaagactgtactatatccacagattaggacatctcacacccctttattagagacgcttctatttgctgcagatggctattaacataaagattacaactgttccaggtgctcagccctacatatgacatcaacgtcttaacaatcttcatgggagagggactggaaagattgtaagaacactacagtggatactaaaacagaactgttttctggatacctcagagtggttgtttcatgtgaatttgtggcatttgtagcagtatgcctgggacctgtgtcggatcaaactaaagtcccaacacttaggggggaggttgtcaggagagctcctatctgaagagttattgtcaagtgacggctgttgggcagagtccgttttctgcaaggacacaggtcctgaggtgctccatagagggtcctctccccgaatatacagagagcatcaagtggtctcagtgggtttaaaaagacagaagccatgaagatgggagggaaagagggatggcggagggatacaggaagggctttcgatggggaacggggtggcggagggatacatgaaggattgttggtgatggaacggggtggattcgatcaaaacacattatatacatgtatggagctctcaaacaatgattcagtagttaagtagaaaaggataactgcttgtctttgctgcttcggagctcatgagcagctatgggggcggagggcatcctaggtattttatccttgcaggcagtgtccggccactgcccccagcccggagcctccgttccaaaatggaacaaagccgtaggcttggtgttcatgtccaggctgacggcacacgagcatccgagcatcccggtgacaaagcgcttccccattctgtgcctatcgatctcccatcagtcatt

SEQ ID NO: 25682 - DNA, 1250 bp, Mus musculus
tctggacaccctccgtgcgcatgctcgctggaaaggtcctcaagaaagcttccacgagagcagcgcctcgggggtcctgtggatctgtgtctcgcttcaacagtgtcttggcagtatttttctccatgttaataactttcaatttcaaacttaatgaaatatttttattttaagccccacctcccaccttcccctctctcccatcttttctgtcttattgaacagacccggggatgcccactttattagcttccagatgccttataggtctgtccaggtcgcagcttccagggccatctttcacagcctttggctcctaggatcagccacccccatcttcgtggttagccctatactctggatcagccatgacctctcagatcatctcagaagtggaagctaccgtgaaccatctagtcaacctgcacctgcaggtctcttacacctgcctctctctgggcttctgttttgattgagatgacgtggcttcggagagtgtgggtcacttcttctgcaaattggccgaggagaagtgcgagggcacggagcctctccttgagttgcagaacgatcgcgggggccatgcactcttccaggatgtgcagaagccaacgcaagatgaacggggtaaaacccaggaggccatggaagctgccttggccttggagaagaacctgaaccaggccctcctggatctgcatgccctgggttctgcccgcacagaccctcatctctgacttcttgggaaaccatttcctggataaggaggtgatgctcatcaagaagatgggcaaccacctgaccaagctccataggctggcatggacacaaccagcacagacgggcacacccaagacatctctggacaagtatctatctctttgagcacgactaggaggcctctgtgcctccctcctctgctctgcaccgaccagcctcaagacctctacctgaatgaacctctcaagccactgggcagctttgtaaccaccacggagcctctcccaagtcttggaccaagtaaaaataaagttttttttttaaagcaggagaggagaggagaggagagagagagagagagagagagagagagagagagagagagcgcttctacaaacaaagtaactgtggaatagcgtcttctgctttctctatcaagtgtcccaaaaagccatagtaaccgagttctctaaagatcctgaatggctaatgcatcgtccattttcatagaccagttaacttgggtggga

SEQ ID NO: 25683 - DNA, 1152 bp, Mus musculus
ggctcggggaccacaagccttcacaacctacccattgtctccatctttggagcacgctcttccagaagggtcagcggttacattgctgtgttctactgaagcaaagcttagccccaaaatcacttcattgaaaacagatcccaagcaaaaaaaaaaaaaaaaaaaaaaaaaaacccaagagccacctttattaccatctgagttagtaactcttcttagcgtttagacatgagcagtatctctatgcatgggagtagataagcaagaaagagtctcataaccatgaacagggctgcctattaactccattcccaacttctgcacatgactattcgccctcttggaaacaggtccaaagtataggcattgctccgaaatctaacagtatgtcttaaaaataaatacagcacaaatgctagccaggcatccacaggccattaaagatctgcatgcttgttgaagctacagccgtaatgaggcctctgggatcaaacctgaagactgccccgtccagcagtgccactccatgtgaccatctgcactggcgagcttcacagtccattttcactagaaggagctcgtgtgcccatcacattctggaattcaaagttacagtagagattcacattcgtttaagtgacacttgaacttctgcatcgctccacattaattcattatggttgaaatggaagaatcttcaatgggtgaatctttttcaatctgattgaggctgttacattttataggtgctatttttcaaagcagtactgacagcactcgaagttattaaattgctgaatcaaaagacggacctgcactcacatttatgaactatgatggactggctggggccgcgctgccggaggttaagatgttggtggcattaaacttcatcacagaaccaactgacagcagtatttacccacacggtttactttaatggtttggaagtagcttagcccatctctggattcaaatgaactgagcaagtagttcggaatcataattatcagtggtgcaaggaattcagaggctcattctgtacccaagacggtttccttccgttttctagtgagtagtggattgctggggcccaagcaagtggtctttcttgccttctaagaataatatttttctcatttcccccaactt

SEQ ID NO: 25684 - DNA, 1172 bp, Mus musculus
gttccattccatcccgctggggcctccattcttttgcagctactgagcccagttagtaagtatgtaaatcttttattgtacttttcacttctttaattttcactttctcttttataacctctgtttcttcactgtgaataacttatttttatgtgtatctcaggaaatatacagttttgctcaaaacatttttatacttacattaaaactcctgtctatttattctagcattggatttttctcaatattaacttcagacaattttcttactacattgtgactttctaggatcttgctgtgattggtgactgtgtgccagacctcttgcctattttgtatgtctgggtcatatttggaattttatttcatgaagttacttcattggaatttaacatgcaacataattttgtgcactgtggttccattgctgcctgaatgttttatgcttttataggtcattttagttttctcagtttctgggaattgactgggtttcctactgaaccccactgcctgagaggacagaaggctttctggccacccaattttttgcctttcgatcatttagactgaggtttgattttgcagtattttactttgtagagcattttactggttgctgagatacttcttcttgtccaactggcttacagctatctagaatagcagttgtatcgtttgtgcaaagtgtagaaacttcacacatatttgctcttcttcagcatcccttttgtatgagattgtttgtgtagctacatgaatgagaaccaccttgaatagtgtcacagtttttccttaaactgtgtaaaatatacataagaaataccagtctttgggcaaccagcatcaagtatccttggtttattgttgttgctgttgtttgttttgtcactatcttcctatcttgtcgacagtgaggctaccagccagtatatatacagttccacaaaagcacacttgatagcattacctagaacaggcatcagtacttgaaaatccttttggacatctctggtttgatgatattaattaaaaaagaaagacaactattggacactagtttgcaagggccattgcaacccagttctgaagctatccaaaatcaatgagtcctgcaccccttgcttatttatgcagtcagcgttggagaagtgtcagtggggcaattccat

SEQ ID NO: 25685 - DNA, 1177 bp, Mus musculus
ccccgtggagttccgaaaccacctgaaagagcagcaccccgacattgagaaccctgacctcgcgtacttgcatgctggtaaggaatggaaactggaaagcattcacgctctaacaggtctcactgcgttctccacagtgctcagggtgctcttcctagagttctgtgacttcctcccatgggatccagtgttgatggagtctgtttccggccccgtttgggggttcatcttgctccttccccattctgcatttaaagaggccctttcacctgttttttaatcacatatgcaaatctaacaaaattattgtggagcgtcaatgttaatagcaaacatttaaagcatagtcagatactgatgttggaatctttgaggttttgtttttattaattgggggagcttatctttattatttaaaatgttatgctatattctttatatcactgttttctcataataacatggaggttggaagcatgggactgaggaggagactcaggcgcctttaatgttccatgagatgagcctgtgcgggtatggctacctcttggaatgacgtgagatatgatgtaatgtgtgatatatagcagagactctgggtaaagcaaaatgattcttgtcatctagctttctatataattgaaaagtgtgcctgggcatagaatctctgaacaacaaggaaacacagggctgaggtcatgtgttctgtttgagaaggtatgctccccagagtcaaaagagtgtcctgtgatatggtcctgccagcaccgtggtatgtacagccagtggatcctggcctcctgaaggaaatggctactcacctctgctttaccagacccgggatttcttagtgtatgtctgtgagggagccattgggtgagacatgcatggaactattagctcaggatgctgtgtggataggaactggtgaagcacagctggtgaagacaggctgtgtgtgtaaaccaagggccattttcaggtatgtggttttgctcatgtgatagccacatcagagaacttggtagataaattaagctaggataatagtgccagcaagccaatctctgtctctgtcactccatggagtactatttatactctccaaacatcacgtgtcctccacgtgccttgcctcagcatgtgcgtccaagcagcctgagtccaggggagcagc

SEQ ID NO: 25686 - DNA, 1104 bp, Mus musculus
ccaccatatcagtaagaactgacattatatatcccaaggcaatatcttatttaaaatgtgtctgttagatacataatttcatacagttattttatggacttttatatttgtgttacatagcatgctttctttgtaatttaaaaaataagttattttttcttcattactgtgaatactgatgacttaataaatgtgtatacctaatctttattttaaatcttgtccttgaagttaattgctattttaaattctgattatgtttcttttatgctacctgaaatcagtatgaagtttgtatttacttacatgtggtcactgaagctagagcaactttttatgatttaaagctgtacattttcctgattagtaatatgaattgtattttcttttatacaattggctaagcagtacagttctagggatcttctttaaaatttctgtataaaacaatctgtgttggttttatattcttattaagatctttattttatcctgttaattagtttcgttgttaactacaaataattgttggaaatactgttgattactttaaggaactcagaaaccccactgctctctgctatgactttagggttactgccatggagctgaaccctcccggggagtgctgcttgtagggtagatgagtgatcaaggctctgtagatacctgtgtcttgagatgctgcactgcactattccaacatccagatgtgtctgaggtctgccagctgtctccacggaagcttggcaacagtgagacgagtaaagacaaacaaacactgcgttagatctgaaatgctgccgtccacagttgacataaatgtgtagtggcattctgtctgttttgcctgtaaagttgtagttgtcttttattttgtttgcctggccacctaaattcaaaatatggttaaatagcacttcattaaaattgtattactgttgcataatgttggccttcatatggttaactcataatttggttttgtcaatgtcaaaatcaaaccaatgactgtccaagtcaacaactttgaaaacatttgccctaaatttaatgcataaactataaaggtttttctcttgttttctgttgcgatatcttgtc

SEQ ID NO: 25687 - DNA, 1227 bp, Mus musculus
tttttcaaaaattagctagtcctctacgtggcctgttagtgagttcttcctgtgtgatccgtgcgctcttcccgctggtgattcctgttgcatacacatctctttgtgtccctgttattttatactgttaccctgactctagtataaagtcagggaccacaattcctttacattgaatttcattccttatatttctgtgacattattgcagaaacagaaagaataaccattaaattcatatctttgatatttttgaaacagtctttctttgccatcttggctggcctagaacttctggttcctactgctgcctcctctgagtgccaggatgatatgtgtttgccttcaaattttcttttaggtgaattgtaatggctacagttgatgataatgctcactatttatctttccttgtttcacatttattattatgtaataactgactctacagtatgcttttggtaactagataatggtaggcttctgcataacaaaattatagttaatttttttcttctagaaaatatgcttatgtggttgtgcgtgtacatgtgggggtgtgttttgtgggtgcatgtgtggggatgatgagtggatgtgtgttggtgtttgtgtggagagtagagttccactcctcagacaccagtaaatcctctttctgttactttgagtgttgcccagagctctctaggtagggcagcttagctgtgtagtgaacctggagtttgcctatcctacctcttgattgctggtattatgaatagaggccagcatgcccagctttttgaggggcggcaggcgaggggggagggagaaagagagagtgtaagtatgtgtgtgtgtgtgtgtgtgtgtgtgtgtgtgtgtgtgtgtatgtgtgtgtatgcgttctcccacctgagggggtcacaagtgcaggagttcctgacagttgtgacctgccctttgtgcttgttaggaaacaaattcagaccctcggcaagagtagcatgtgatctaacaaggaggcattcctccaggccccagacccagctttgaaaaatgtgttttgagcattgaatttctgtcttctcctgtggcatacacttggccgactgtggttccctagatcatttcgccttttcatagcatgttgcaaaaatgggaatacagtttttaagataaagaaaaattctcacaagaggtaataacatattattgaagatataggagcatacattttgttgt

SEQ ID NO: 25688 - DNA, 1166 bp, Mus musculus
gcagttcccactaaagtcactatcaaagttgggacttcactctacaccgtagtggtcacttggacattctttgtttctcccagtgtactgcggcaggtaggcttttctctcttgtctgcttttcagtctcttgggtgaatgtcaacacaaatatctgtctcacagcatgtccggattccacaggcttcaggctctttctgtttttccatcatcatcatcatcatcaccaccaccaccaccaccatcatcatcatcatcatcatcatcatcaccaccatgtctttttttcactgtgctgtttttattttttgtcacgtagattttttttatactataattattacgatgatgacttaaattttaaaaagttcctagaaataacatgaaactcaattttggtgttaactcagtgtttgggctgttccataaaatgtcatattgtgtctgtaagactcaggaaaatgattcctttttggtctttatttcagcagaagctggctttccagcaatgatttgtcgtttcagacttgggtactagcgaatcatgtatgtaattgagttttcctctttgtgtttactgctgggatgctggggtcctaaactgtgacccttcttgagcatgtggaaggactttagggagcacaatttatttactacagttatttccagtttcattttttctctcttcatgaggaagtcccattttatgtgagtgatatattttaacaagctcacataaatcaaagccctcataattcaggagtagtattgtggaaggaacttttaaagttaagtcaatactttcctacaagttcatgtatctttagcccttttgttttatgtctctctctggagcactatacaaccctattatttgatacttttagaaaatgttctttccatatcaaatgaaacatttttgcacactttaagatactgtttctctcattttattttgtagacctttgtcttattttaggcaagacttgcttttaagatttctgtcctgttgataggtgtttgcttcccatccagaaaggatacttactctccctttatagcatgtcttgttttccttcagtgtatcagaaattgtttattatatcttggttatgatatgcagatgttggtatgtttctgagaatgattgagactttcttgttccc

SEQ ID NO: 25689 - DNA, 1177 bp, Mus musculus
gccctggctgtcctggaactcactttgtagaccaggctggcctcaaactcagaaacctgcctgcctctgcctcctgagtgctgggattaaaggcatgcaccaccaccacccggcatgttcatgttcttatgttctgtaattaattttttcccccttcagttgaccatttggcctatttgtctatccagcttgtgatgccattattcacattacttttcaaaagctttgtatttgttaatttagtattagtgctcctatatcagtcacaagtttcagccctctggttctccatagtccccttccctaataacattaatcttgaatttgtactctatcttctcttgtaaccaacttaggggttgatttgtttttccccctgtctctataacattttatataagtttcaaagcctgtgtatctgtgtattgtggtttttactttctttgttcctgatcttttgtgcttttgttcttttggaaatgttatgttttttctccaactcccagttcctctgtgctgatgatcttagtgggcttttttttttttttttttttgcaaggcttgtagtgtctcccttaccaggcagggttttctgtacttcttcacatcagttttgatgttttctttcatatgttttattatctcagtgtattctaaacttgctcttattttcttctttgacccactccttatttatgagcatcttctttaaatgatgcatattaattgatttcattttaatgatctatttgtgtgtgtgtgtgtgtgtgtggtgtgcgcgcgcatatgcttagtccacttagtgttgttcatatatatgtgttcgggactgatccctcaaggatcagaagagtgagttgggtgcctggactgggagctgcaggcagtttggttctggaaaccaagccccgtcctgtcctgtcaaaagagtcaagtggtgctgactccagtgctcagccatctctccagatcctaatttcaacgatttatgaatttatcatatagcttttgtgatggtactctggctggcttccttccctgactaccttgtggacagtcttggagtctatgctgtgcgttggacattgttttgattgtgtgggacatatttttgaaataggagtttttaagctacttattaccttattgtttgaatttctatatctttatccaattc

SEQ ID NO: 25690 - DNA, 1138 bp, Mus musculus
gtaacctacagaccgttcttggtgaggaatctggctgctttctgcccttgtccaaaaaaaaaaaaaaaaaccaattaccctaggctaaagtcaagagttttggattaatgacattgtcagaggagagataaagacaacctagtattagctttgttgtgtggttgttagtggtcagtcttatgcagacctatgatgaaaaagaacaagctgaacaaggaaaaatacataatgtacaattcgaggagaaaccaggagaacccggaactataaagtagaagacatgagttccggtgctggaggagctaaaatgtttaaagaaaagccagctggtaagtagaatcaatgctctcaggataaaccacacccaactaaccttccaatttgtgaaaatcaaataaagaaaagcttaagcaatgaagaaaaccattgaaaacagaaagttgattgaaatgtttttgactgagggggtcaagtttggactccagcaagcagcttaacttagcagctttgtccatgtggttctggcttcagagtcaagggtacaagaaaggtgttgtggaacctctctttctatctaaaaaaaagctgctggggccaggtgggccctgtatggaagcccagagaggtcactatgttgatctgggaaggtgaagcctggattgagttagagatccaaaggtggtatagatgctaagagttgtgggggtacctacccgagttctgcagactttgtgtggaattagcccaagaaagagaaatgaatttcagtcaacaaagctgaagttagttggagacatgaagagtggtctgacatttcatgctaatgcagaatgtggagtttgccctgctggttttaggtcctgctttggcccagtattttctacttatggaatggtagtatatatattctctgccactgtatggtggaggtatgtgatctgccttttgattttgattttacaaggggttacggttaagagattgcatgaatctcagaagagacattgaacagtgttgatactgtgatagataggggacttttgaagttgggcattgaatgcatttttgcattatggtatggctataagcctttggtagccacgtagtggaatgtggcttttgaacaagaataattcct

SEQ ID NO: 25691 - DNA, 1190 bp, Mus musculus
aacatcactatacccgaggaggagcattcacacaattctgaggaatttcaaatacatccacaccagtcatctggtactctccaatgtagaaatcctgcagattgttctattttagatgataataccaatttgggtatgtctaaagtactctgtgctcctgattcagtgacagttgtgactgagcaagaatctaattttagtgaaggtcactccttttgtgagaccttacagcagccccttgttaaggacaaaagtatgaaacccagggagatagtgtcccctaacactccctctaacctcagcctcccaggctgtcttcagagtgaaaacctagcgagctctgctgtggactgtgagacagcaaagaaaaaccgtgatgtgttggatgctgttggggatagaagtacaccctgtgaagatgagggaggcagtgtggatgatagtgaagaaaaaattcttgacaagtccccctgccctggagacccagatgggggccattctgccgaatctacttcctctgtggtaatgaaaataccaagagaacaactggacctggatggcggtggccagaacaaggttggatgtgagcagacttctgaagatttaaaagatgtgcaagcaaatcctattcttgagaataaggaaattctgataaattcacaagaagaagctgaagtcattttggaagaggatgccccaacctcgaatggcacagctgacagtaatgatgtttatgagactataataagtattgatgacaaagggcaaacaatgtacagttttggcaggtttgattcgtccataattagaataaaaactgaagatggtgaattggtagaacagccagaagagggtctgacggcgacaggagggagagttagtgagttgcccctgaaagactgtgctcaggggttgaagaagaagaaagttgaaggtggttcttttggtgagtccacacgaatccggtgtgatgattgtggtttcttagcagatggactgagtggcctgaatgttcatatagccatgaagcatcctacaaaagagaagcactttcattgtttactatgtggaaaatccttctatactgagagcaaccttcaccagcatttggctagtgctggtcacatgagaaatgaacaggccagtgtagaagagcttccagaaggaggggccaccttcaaatgtgtcaa

SEQ ID NO: 25692 - DNA, 1113 bp, Mus musculus
gtggccagatagctgcaaataagacagacttcgaagttcacgttaaacagtgccatggaagagagatgcagtttcattgtcagacttgtgacttttctagtccgtcaaggagagacttggaggagcacgtgcacagtaatcagcatcagcacatgacacctgtcctcagctgtcagtgttgttcctttatttccttgaatgaaacaggtcttagagaccatatgaaggagaagcatggcatgggctttttctgcacctcttgtaatctgttcttgtctgagaaagatgtggaagaacacagagcaaccgagtcacataatagtttagtggttcaaccaaagacggcttcatcattgagtggtgattctgttctacctttcagtactgtagaatcagaaaacccggccgattctagagaagactcagggaaggccgcgcaggaaggacctgctgagtccagggcaagccatggaactgaagcacggcattcaagtaagccgcagtttcagtgtaagaagtgtttttataaaacgaggtcctccactgttctcacgagacacataaagcttcgacatggacaggactatcattttctctgtaaagcatgcaatctttattctttgagcaaagaaggaatggagaagcacattaaaagaagcaaacatcttgaaaatgctaagaaaaacaatattggtttaagttttgaagagtgcattgaaagagtatgtataggtgcaaatgataaaaaagaagagtccagtgtttctggaagtggaaggcccgaaggccatgttggtgtgcaatcacaggagcattcccaacgtgaacagagtatgctaacacccaaggagcttccacagtctggtgtcatcaccaaagaggatgaattaggcttagccactactccaaagagagggaggcccaaaggcagcatttctcggacttgttcacactgtggacttttggcctctagtattacaaatttgactgtgcacatcaggcgtaaacacagtcaccagtatagttacttgtgcaaagtatgtaagtattatactgtaactaaaggagatatggaacgtcattgtgccaccaagaaacataaaggacgggtag

SEQ ID NO: 25693 - DNA, 1840 bp, Mus musculus
attgctttgtgagtcagcagtggtccacggatttggctgtggctgcggctgccacctcctcctcctcttcctccttctcctctgacttcccttcttcttccccctcctctttctcttttgtagcctggcttggcactggcagtcactgtgtcacctagattgggaccttaatcataaggcagtcatcttgtcttggtttttgggattacaggtatgaaccaccacacacagcaagattgcctatagaactttagacttgtggtcagattcagtcaagtatgaaggttaatttcatcttgtttttctccgtcaggtccagagtaagcgttttgtattttctttgttcaaagctttaatagcatgtctgtttatttcacaggttgtaaactccagttaaatccaactctaacgacgaaacatcatcagaactttattgagaatggattctgagaataaacatgacaatgatgaggatgaaagtgttaagggagcaaaagatccgaggagtgtttcatcccgcgatgacagttctgagcctgtatctgatgacatggcaaatgtctctgagaattttacgagcaaaagagttttttccgagtcgtccaactcggacggtgttgctgcggaggaatacagaagtgagcgtgcttccaagcgactgagaacagaggcactggagcctgagacaagagagcagggtgcctgtgggttgggcactgtggaagctaatgtccatttggctgaaatgggaaaggaggcctttccagcaaactgctcagaaggaggcagcgctcttcccagtgttttctccccatcttgtgattttagcacatctaatattcttcctctgaaagtagatgaagtgaaaaagcctgctcgggaaatggtttcccttgttcctgaaagacacaatccttttcctccagaagaaaggagcattagttgtagctttggaagtgtagagacaggactcaggtgcggcgtgtgtggctgttcattttcctcttgctctgctttggaaaagcatgtggagtgtcatgtggaagaggggaaggaacggacctgctgccactgtagccacagagcagagagcagctcatctcctcatgagcatgtcagacatactcatgggccgcagaaagtcttttcctgtgatctctgtggcttccaatgtgcagaagaaaacctgttgaatgcacattatcttggcaaaacacaccttcgtcgtcagaaccttgctgctcgtggaggattcgtacagatcttaacaaaaccatcttttcctaaaaaagcctgtgtcatgggaacaaaaaatgttagaacaaaaccaagagcttctaaaccaatagcaaagactggggattcaagagtagtgccgagtactgggaatgactttaaagactgcagaggagccccttctgaagacagtgctggtggtagtgagctccttgttgaaatggtgccatctaggaaaatctcatcaggcaaagcacatgtagttgaggaaaatgttagttttggtgtagctcaaaatcctgaaaatcagaacaaacagctagggggcttagtaagctcagagggtcttttaaataaaccagaatccactaaaaatgccctacagatggcgcatgtcagtatcagtaccacctcaaggccaagatctgagcgaaacctcctagtgttgggtaatagctttcgcagacgaagtggcacttttactttaaagggccaggcaaagaaaaggtttaatcttctaggaattaataaaaggggtacaaatgaaactcagaggatgtatatgaaacactttagaacacagatgaaaacaaacgcacagcca

SEQ ID NO: 25694 - DNA, 1200 bp, Mus musculus
aacatttttgcctatggacctctgccaggctgtatagtctgcacaggtgttcttgctgtatcctgttggtactccctgaagtcttgatccttgggggagggcaggtgggaagcatgactgctttgggactgagtctaggtagaatatactcttagtgttcttgctaagagggactggaggagcaacttaactttcctgccagtctcagagtctactgccatcaagctgagtcctgcaggtggtgtcggggtacccgggtaattgactgtccaagatctccatcctggagcggccccatgtccacctagactcagcacccgtgatggtgattctaatctttgctggggcaggagtacagtgtaggtgacagggcagaggacaggggagacatgactgctttgggacggagtctaggtagaatacactcttagtgttcttgcttttatagatgcagttcactatgttcaccatacgaaagggaactaagccttttgaaatagtatcaaacaatttgtaggttcatttaaacctatcagacacattcttgggcaattttataaagagcttcatgtatttataattgaggaattgtgttgtactctcttaggacagtgaggaggtagagttgttggaacccaagtattcatgaactagttctgtgtgattaaagcaggttctcgtatgcccatttattaaaaattgccccagagttatctagtaaatgtattttagtttgttaaatatattcttgacagaattattcattcaactttataactcaattataaggattttcctggaagagtattcttttgccttgtagaatcagagactgtattttgtgaactctttcccaaattgatgtttctgataggagaggcctagctggaagggctgggcactcctagcacctctagtttcctgagactgcacatcagcagtagaaggctttcatagacagactctaggagtggacttgaaattagggtaggtgacaccatcatgatataggttcagcaggaaatccagtttgaaatggcagatggggagagtgaactttcctgtattctactcagccgtggctgctgcagctcttagttatatgtctggccttgtgttgcaggaggaaagaaccctttgtaggataataacttctagggcttatgctgttttgaatttctcaaggggaaaggtggtgag

SEQ ID NO: 25695 - DNA, 1302 bp, Mus musculus
tttgtagtgagggggtggggagaggaggtgtcacactgaacctcttcttgagaaccatcaggctgaattataaagtcagaccagactgctagctggaacaggggtgctccctagagagaaatcaggaggaggagtcaccaccttcatggatactgactcgtcagcccgcagctgatagctgggttgtttgtttgctagtttgcttgcttctctctcttaggctcaactacatagaaggaaccaaaatgctggctgcatatctgtatgaggtgtctcagctgaagaactgagaagtctcagtttcctcggagtgctgttcctacccagaaacaatctgccctctctctcttccagctttctcgggaaagtggaagtttcttttccctatctctttctcaggtcacaggcagacaggcaagaatggagacattgcctccagctgtcacctgtcagctgtgtcaggcagttggacgtggtcagtcctgagacttactggggacaactgactggccatgattgggggtaggagggtgtctcagatgtggtcagtgtgacttcacctccaggaagtagccagagtccaaaagctccaagtctgtgggaggtactgcccaccatggactgaggctcagggaatatccaggaaggaaatgagagcatccattagctccttgtgctgtgacagcaccatggtgacccgtcactgtgctctgtatcccatcttaagaccctagctgaccatcactggtgtcccctcctgttgctgtccccttgaacttatcccaacagtccccatggaagcaccagtccagttgcagctactactaataaatgtgacaatgagcctctggaggaactgccgtggtctgactttcttggggaatacacatacagttgttcattggtgtgcaacttgctttgtggaacacatgcatatatgtattggataatgtttgggtacctgtcacctcatattgaaaggtgatggccagaactcatagcacaagacttatgtccaccctctgtctccacatcaaattcttaaagcggcagccccgggatttaggcagcaaagatgagcttggagcatcttgtggcgaaggataatgtcagagatgtagaagccagcctgagagcacacaacccaaggagtagctgaaagggagtattaggatagtagaggatcggaaagctgaggcagaagaattgccatgaggtcaatgccagcctggagtatgatgtgaaactctgtctcaagatggtaaacaaaatcgcttctgagttaaaactgcagaagaaata

SEQ ID NO: 25696 - DNA, 1223 bp, Mus musculus
agcagagagaggggaaactaatcaggatatattgtatgaggggggggaaaatctatttttttctaaattaatttattttatgcatatgagtacaccaccattgctgtcttcagacacaccagaagagggcaccagaccccactacagatggttgcgagctaccatgtggttgctgggaattgaactcagaacctctggaagagcagtcagtcagtgctcttaaccactgagccatccctccagccccaaaaatctatttttaataaatgagaaaaccacacttaaaaaacataaacataggggctggcaagatggctcagtggttaagaacgccgccgactgcttttctgaaggtcccgagttcaaatcccagcaaccacatggtggctcacaaccatccgtaacgaaatctgatgccctcttctggagtgtctgaggacagctacagtgtacttacatataataaataaataaatctttaaaaaaacataaacataaaaaataagtaagcatgttcgaatgctgatattgtcccctgcaaactccttgtggcagtttgccatcaccacagggtttttctgatcaactgtaggtgccagcagaggcacaagggctgcggggcaggggtacagccaacttgggtcacagttagcatcacagtggttaccattgctctgtaagggaaagagatgacccgagactgatttgtctttgtgtcactgaatcctcctctagtctcagagaattatgcaagcgtgtcctggagaggtggcaaggcctttaggggaaagccctggggtcctctctgccaccattttatttaccagaatctgtggattgtgtgtgtgtgtgtgtgtgtgtgtgtgttagcaacatgtctgctgtctgctggtccctacaaagactggggaagagagcatcggattccctggtgttgaagtggttgagatgtttcacctgggttctgggacttgaactcgggttctctggaagggcagaaagcactcttaactgctgagccatctcccagccctgagttccattaatgtcctgactgatgatccattctgttgtcttagttgtctacatgcagaatttcgaaaatgtagcattcagttgcaaattgtagctcttgtagccattacttcaaaatgagttaagttgtatctcagactcaggctacagtgtttcattgagtctattgattcttttttttttttttt

SEQ ID NO: 25697 - DNA, 1134 bp, Mus musculus
ttgtttagtttatgtgggagaacaaaaggtgtcaggacctttcccctttgtgggcttatgattgggaacccagagtttagtttcgagcagcatctgttgaggaagctgttaacagctctctgtatagagtccatggaagatgatggaagcagagcaaggtgttagtttctcatggtgacaatagtggagagcagcgaggccagctctctagggcatgcattgtgcacaagataatgttagcaaaactgagctgcccttttttgccaaagtggttctagaagtaaggaaaatatgctgtggtagttttccatcagaggaggcagggggtgaggtctctgcattgagggtcactcaagcatctttttgctcatgtgtctttctagttggtggaccaactgggtgatcccagccatctcagccctggctgtagctctgatgtatcgcctctacatggcagaagattgacttgtctctccgaagccgaagaactaaaagactgccccagagcggggagaaaagaagccagtgttaatcacttccactgacagaaacctccccctgagaacgtaattgtaatatatctgtttccctttcctcctgtgctagtagaacaaacaagggactctttgtactcttcaacttttcaaatgtgcctttttactcaacttcatggtgatgtttcttcactacataatttacttattgtaaacacgatctttttaaaatatatctggcttgtaaagtataccatatgtgtctgtctgtttggtgtattttatttagtgcttagtgtttcagattatttaacagaattgcttaatgtgctaattattcacaccctgttgtctgtgtctcgaagtaaagcagcagccctggtgctagcttgttcttgtcttaattgctcagtggtaatcgcaatcagcctgcatgtgcctatttcatgtttctgtattgcattcctatctctgacaagataactgaatgaagcaaaggacagaagagaagaatgtaagtctccacaccgccaggaggacttggtaggggttagtgtgcaggtctgtggtagcatttttggatagcagagagctaaggacagaaacagaagtgtgttattgtcttgaataatttattcct

SEQ ID NO: 25698 - DNA, 1111 bp, Mus musculus
tccagcccaggtttttttttttaaaatcagttttgctggtctaaggactgaaactaggaccttacatatggataccataagctacactcctagactacaggaacagtttagatcagagggaactgtctttgatagttctttattgtgtgtgttttggtgtcttccatgatcttgagtaaagccagagtgttgaagtgccatcatgtcagaacatcacagatctttagggagagtttcctgggaggagggaaggtttagaaagtgctgtgggtaaaatgaaaatgtgtcagagataggctgaggattttgactgtattatgggaatgatgtgtgaagttgctgttatgtgttgtcaagttttcagcttttcttttctttctctagaatatctggcttaggttggacaatcatcttaagagaagccagtggcaaagaacacatcatgcagcattcgaatctttccgtaaatgacaactctgtcactgttttttggcatgacaaaaattggccacatgtagacacgttgtccaccctggatttgtatggtgccacaccaatttttatggagcagtataaaggccctaacacaagttggtaagttctgattgagcagcttgttggtgaggattcctggaaccccaatattaggtggtgtattattaatttgattgtatcctagagatcttcctgtcctgcattgttccagaagattctgggtgtgtcacacgtagctctaaatttcttgaaacttataacagtaatactgatactctatgttaaaactttgttagatgatttgtggattttctacctatttctacaaataaccagtgatatataagctgggcacggtggcgcatgcctttaaacccagcactcagaaggcagaggcacgggggccagcctggtctacagagtgagttgcaggccatccagggctacacagagaaaccttgtcttgaaaaaaaaaaaaacccaaaaaacaccaaaaaaaccactccccagtgacataattatgatattcttggtgctggagaggtgactcagaggttaagagtatcatctgctcttccagacattctgagttcaattcccagcaaccagatggtgg

SEQ ID NO: 25699 - DNA, 1113 bp, Mus musculus
tacacatgtgcagggaggcctgggtccagtctgtgcatactcatacagtcagattggtggctcagtccccgagatgttcaagtgtcaaggttagttgactctgtcttcctgtggagttcttatcccctcgggggcccctcacccctttaactggagtttttttgctgagtctctgccctgtagatttgcgttgattcatcttttcctgggcaactgaagacagagtgttctttgtagagaactactgtctcagtcaatctcatagtcactgtggtggtctttggttgcccatggaactctgcctatgtcccagtttttgtccaagttggtgagggattcctatagcatgttatttgtgggaagtagtgtttttggatagataagttttagtagtattttctagccaaatattttatctgtggttttgacagatttgtacactttttttttttctttcagtccctatacattgcctcccgacactacatttgtggataactacccagactcaatgaccttttatggagataaaggctttcagctgcatatcgacattcatggcagtaagacttacttcctgtgtagcaccttccacaatctcttctgcaggagaggtaaacctaagtcaacttgttcccttctgaagttagtgggttgtagagaagagaaagtataatccaggttaagaattctccttccagtttataatctgccagccctgctctgttccctgacccttctctttgcatgaggcttgtgaagtacagacagcctctcactctctctgtaacctctagagggaggcttggctcatcttttctgatatttacttccaaatctccccttctatttccaggaattttgtaaatgtggtcacagggtgaatgtcacaactaggatctagtttttctcgtttgcagtgcctcagagtttgccatttgccacgttttcgaaactagggctgggaaaacgcagaatgcacgacctgccctgtgctttgggagagtgtttcatgatttcttaacgcctagggtatgtctgcttgagtgcaagtttaacattgttggtgagtgtattttatagggaaaatgtaacttcattttgcatcattat

SEQ ID NO: 25700 - DNA, 1220 bp, Mus musculus
aatcaatgggccgatgtcatcatgtctcctgggatccctagggtggttgggtcactcaggagatgggtaagggggtgggtgcgtagcagagaaaccatgagcaagggtgggagagctggaagtttagactcaagggaactggttgataagagtggaaggcattgagaaacttctgtccagggctgagtgacaccctcttggaaacaggaacaaaggactctctccagttgcctctaacttcagcaagcgccttggtcttatgcaggggtgaggacacggtaaggactgactgagtagctgtgggataaaatgtagtcacacgatgtgtaggagagggttttggagtgtattatttccagtctgctcaacagtcgcagttcctgtggaattgaacctttaccctgaaatgtgttcatcttctttgtgaattacagagttgcattgtagtggatatgaccttgctggatgaggacaagaagcccatctggtatgtgagttctccagtgtgcttgagatctgcctgccttcctgatttcccgcagccggcttactctttcgagtacatggacagcgtaggaggagtgtgcgcagacctagggtggtttgaaaataccgatgaatacttcattgtcagactggacatttacctcagtgtagcaaaattacaacaatggtttgggaggcaataaatgctgagttagcagtagggagtcttgttattagtaagctgtttgttttttacaactttgtttttattgaaagttaaaataaagcatatttgtggtagtctgtttggtgtcttattttctaatacaaattatggtttgtgactacagtgtttagaagttgacatttttaataaagcatgcctcagtgaagatcaatataaaggtatgcagtaaattaatacagtggctgtttttcttattcctagctaactccccaataacaacacagagagaccaagatttattttcaacttaaagtacgactataagtaggccttataattctaatctagatcgaatcctttaatctaatatggctacctcccagcctaaatcactgagattcttgcatttttaagttagtcttgctctctgggcttcaggtttgctctggaccccttcctcgtgccctcttctcttttcctctttctctccctcctcccctggttggcaggagtcctgccctattccctctattgccttgttgacttt

SEQ ID NO: 25701 - DNA, 1201 bp, Mus musculus
cctaaatacccgggcgtggtggcacaggccttttaataccagcactcgggaggcagaaacaggcggatttctgagttcaaggccagcctggtctacagagcgagttccaggacagccagagctatacagagaaaccctgtctcgaaaaccaaaaaaaaaaaaaaccaaaaaaaaaaaaaaaaaaaaaaaaaaaccgattggcattaagaaggtgcagggtggagccctagaggaatctcagctggtggttggagttgtgctcaagaagactctctccagtgctaggtttgacatgcagcctataagaacccgagcattgccagcattgccctcttaaatgttgagcttgaactgaaaccagaaaaagataatgctgaaatcagagttcacacagtggaaggttaccaggcaattgatggtgccaaatggaacattctctattacaagttagagaagttggctccatccatctggagccaaagttatcttgtctaaactccttattggggatgtagccatccagtactttgctgataggaacaagttctgtgctgtcggtgtgcctgaggaggatctgaagaggatgatgaaggcttgtggaggttcaattcagatcattgtggatgctctgattccacaggtgctgggctgctgcctggtgtttgaagagatccaaattgaaggagagaggtacaatttcttcaccaccggccctaaagacaaaacacgtaccatcatcttctgtggtggcgctgagcagtttatggaggagacaaagaggtccatgatgccatcatgattgtgagaagggtcatcaagaatgactctgtggtggctgtggtggagccatagaaatggagctgtccaaagtcctgcgggattactcaaggacaattccagggtaacaccagctgttgattggggcatatgccaaggccctggagattattccacaacagcaatgtgacaacgctgggtttaatttcacaaacaacctcaacaagctgccggctcgacattcacaggagacttgggtttgatgccacaaacttcaataagcttctggctcaacatgcacagggggcatgtggtatagggtggacatcaacaatgaggacatcgcaggcaacttccaggtatttgtgagggagccagccatggtgcatatcaatgctctgacaacagcttttgaggctgcatg

SEQ ID NO: 25702 - DNA, 1156 bp, Mus musculus
caggtcctttcagcgaaatcttgctagtgtatgcaatggtgtcatcgtttggaggctaattatgggatggatccctggatatggcagtctctagatggttcatccttttgtctcagctccaaactttgtctctgtaactccttccattggtgattgtttccaattctaagaaggggcaaagtgtccacactttggtcttcgttcttcttcagtttcatgtgttttgcaaattgtatcttatatctcgggtatactaagtttctgggctaatatccacttatcagtgagtacatctcatttgagttcttttgtgattgtgttacctcactcaggatgatgccctccaggtccaaccatttgcctaggaatttcataaattcattccttttaatagctgagtagtactccattgtgtaaatgtaccacatttttttgtatccattcctctgttggatacattactctgttgaggggcatctgggttcttttcagcttctggctattataaataaggctgctatgaacatagtggagcatgtgtccttcttaccggttgggacgtcttctggatatatgcccaggagaggtattgcaggatcctctggtagtactatgtccaattttctgaggaacaaccagactgatttccagagtggttgtacaagcttgcaatgccaccaacaatggaggagtgttcctctttctccacatcctcgtcagcatctgctttcacctgaatttttgatcttagccattctgactgatgtgagatggaatctcagggttgttttgatttgcatttcactgatgattaaggatgcttaggcgaagtcctactccaaaaatcttcaatgaattagatctctgagacgatcttagctgctgcatatacctttattggggttatacctttattggggtgggcttatacacatacactttatttggattggaccaaaggttatatggttttgggaaaaggggtgagaatatccagggtgcacaaagattggctaaaggctaagactactaatatgcctcactagcatggcagaggcattccaggaatttcacttgcaggactacatgacattactcaggtagttgacccccagagaagagaaagcctagctgacaaagctagtctgccattttg

SEQ ID NO: 25703 - DNA, 1208 bp, Mus musculus
cccaggccttcaggtccaagggtctctttgagatacagccctggcagtattaagtagtgacagcatactagtaaaaggtgtctccagagacaaactcttctcagattttctgtattatgtaaagtattttatttttttgtacattttaaattttatgaaagttgcatcatttcccccactcctttctccctccagccccttccacagcccttccttccacctcctgtgttctccctttcgctttcatcgtgatagcaacttcccagattgtgcatgcgcgcgcgcgcacacacacacacacgtaaatgtgtacacaatatataaacaacctacttttatccctcatccttttgctagagtcattcattctacctgatataagaatcaggaagagaccagatggtgtccctaaaagtttttgcagtctctgtgaagaggatacgagtagtgagacatttcctgagggtggaggagctgatgcaacaataccagctaactcactggaaacatcagtccggcttaggatgcataatttacgcttatgcttaacagccaatttaatttactcccacctttaaattcttaacttctctgccccaggcccagatattttctttttctgaggcttttaacttctgaattaaaaacacttataataattttatttcggttgaatttatcctcatagagcctgatattttggcctccagtgaagtttttatttttcttttaaatctttgctctggggctagagagatggcccaaccctgactttaaaagtgcttgctgttcctcagagaccctgagttttattcctggcatatgcttgggcagcccatgtctgctttatctcaagcaccaagagattcttctccctgtctctgtgattcttgaaacttcattagcaggcatgattttgtcctgtgccatctgtgcctttgaagtgtcggttagtttaatgtgagtatggtgctctgatcttaggtaattcagtttcacaggaagatcattcatgagttcacattagagcctggttttagctggacatggaactcctacctaaaatcctagcacttagaagttataggcaagaaaaccaggagtccaagatcagcttctgcttatgtagcaagttcaaggtcagcctaggctacctaagactttcaaacaaaagaaaccactggctgtttgctagggctgggtcatgg

SEQ ID NO: 25704 - DNA, 1148 bp, Mus musculus
accttgaatgacatcagctaaataattaaaaattgtgatacattatgtgagaaaaattgtaaaactatgtctgataccagaaatagtttcctgcttgtgactaccctttgaggatagcattttggtttattttaaattggttaatttgtaagtagtctggcacctctacttacttatcattgtgttagagaatgatgagaccaggttttaaaagttattttggaatgtagactgttgattcagttcaaagttctgcagtggtgttattaaaactattaagcgatagtatttaaagatttctccattcagaaaatatttccagctgcacatgcttttaaaaaaatcagggtaaacatcttaggtcagacctgctggctttgtcatccaaacatatctatagctttacatttttcctctttttctagggtcaaaattgagatattgcaggaaaaggctcagtgccaacatgttaaagagttgtggcatcttgacttataaggagcaaggcacttacttttgatggaatgttacaaagaatttcattttctgatatgtttcatctaatatgatagatgaattatatggagatagtgtaagcattcactattggattaagaactattggagaagtgtaggcttgtgtgcaaaataatgcaagacacttaactatttttttgtaaaactttatttttaaacaactgaagctatatctagtgtgagttgacagtccccacatctacattagatggcaggtgttgtcacatagtcactgtattaatgatgaaggttgagatgacttcatgtttcaaaaatatgcacatgtcctggcaatcatggctcatagaagtctcaggactgtccccaacatgtttcaagtaaacatagcttgtttcctactcttccccatggtgccgtgtggttaggatctacccattaaatgtcaagagtattcttatctttatctaaatatttctaataatcaatttgtgctattctgtaggacaaatctttattatgaaaacaacaacccttgatgaatttccatttacatgctttatatgacctgtccaactcaatttgaaatgattaggttctgatacttgatgaataaaaatcaaagcatttattgagaaatcagatttgcaaat

SEQ ID NO: 25705 - DNA, 1221 bp, Mus musculus
ttgtacatttgatagtcttatgtaaattacttttgatatctcaaatctgttattttaaaaatcttacttttttaaaaaagtttttattgattctttgagagttttacatcatgcatcctagacccacttatcttcaggtcccctcatatccaaccttcacccttgtaactcccccacccccaaataaaacacacacacaaagtatagaaagctgtagtttgtcacagtgtgtcccacagtacatctctctattgatacatcttcacttgcaaatgttcattgtaatgagtaattggtctggtttgagatcttggtttctgtgacaacatcaatactggatccttacagggacttccccctgatatcctgttattgccctatgtcatagagatcctgcaactttggatcaacaggaccgacccctttatgtatcccaatcattcgtagatggtggagtaaaattttatttgtaattcaagtgtaatttagaaaatgcaattgttttttaccataaagctcataacttacagcagagattaaaaagcttatgtgttctttatgcaaaagcatttgaataataaatttttttggattggaacttgtgttaagatctatagaatctgagaacagtcaaaggaactttgttactttttagtcatttgtattgttgttactattatagttcagtgcattgaagagaattctacatatgagcaagttcttagagaaatcctgttgtagcatcagtctgctatattacttctacccagagtaaaaatgtagctctttgggtctatgtgattgttcagtttgtctaaaattcataaagaactttaacctagttgataaccagaaaggtgacacttatttcataggcagtgcaagtgatgaacattttgaagaatgtgtaatattttgtctaaaaccattctgttgacattataactgttaattttaattttcaactgacaattatgacagtgtatcagtgaattatattaaaacaattacacatttacagcacagacagggtttataatattatataacttatcactaaatatgacaatagatcttttcaaatagtcaagtataattgtgccttagtcattaaagtggatgtgtgggaactataaggattttaatagtaagctgggtatcatgcacatgatttcctttattagtgttgcccttgtgtcactggtttattattaagtttgt

SEQ ID NO: 25706 - DNA, 1163 bp, Mus musculus
tagttacattaagataaaatcacagatgaattacatggaattaattggacttcagaagttctttagattaaaagcttttttaacttgatattatcaactgattctaatttaagattgcatcttcactattgttttagatctgtgcttattaagaattatataaatcaatttaagctagaaaaaagctgtattctatgctgtcttagaaactttatagtgtttattcagttaatagttgtaaatcacttggaaagagtaaagctcaatgtgtacccaagaatattcttacttctagatgtgctaattggctcccatgagtaagaattttttagtgtgtcattgataagaagggaaagttggtactatagttgggatgctaatgtaaaactatgctgttgatagatttatatgttagtattttgtaactgtaagttaacccgtattgaaaagcatatgaagccaaacagaatttttaagaggcttatttatagaaataagtgtgggtttatcgttttgtttttatgcctagatttttagatacactgcagctgtccacagaagatatccttgcactgaagatcacatacacggatagtgggttgaaggactgccttcagtccatcattcaggctggaggccacagggatgtgagggctgctatcaccaggatgagtttttatcttttgaatgacaaactgtctttgaaggatgatattggtccatgtggcgttactttaaaatccttggcttggcacactgtgctgaacaggtgagtataaacttaaggccgccagtttgagtgacttgatttgaatttgtttaggatcatcttcaaacctttgtagagaagagtgtatatttgtgcagttgctatcatgagagaaatgctttatacagaaagtaaaactaaacttcaggatagtctgctatctgtgaaaaataataacaaaagaaaaacttgacctcagttctagcatgtctgaagaaacttttttataataaggatgcaacatggctgaagcacgctgaatgtttattcctgtccatattttaaacgaatggagccatagtagattgacaaatagatttggtacacctgctactggctgtttttgtttgcctatgttttcttctcaaataaatgatttgagttttctttctgt

SEQ ID NO: 25707 - DNA, 1219 bp, Mus musculus
attgctccaagtcctgtttactgctcaactcactctgttatgattgtgtgcatgctgcactaccaacatagttctgatattacatgagctcccattggaggtgttgaagaatgtacagttcactattctttactgcttttctaaaactcaacagtatttggaagttggaaacattctgctacctagaatttaagtaaaaaaaaattgtgttctaatgttggctcttattacccattctcaagacatatgcatgctgcatgcgtgtatataggtggaattgcatgctgggtacttctgtatgtgcacatgtacacgcacaggagtgagggatgggggttcggtgtaagatcagtaaatctccctagcctcaaggatgaggtaagcaatgcagttaggagagttaaccaacccctacctcatcatctttaggttttttgtgttataagaacttgtaaattttgttcataacgacctgatagatggaataattttttatgttctttgtacataacaggtcaacgtgaaatgagaccagtgcgacctcgtgactcattgctgtctacttccctgaacaggcagtatgtgtttgttactccgtctctgctgtcagcagtctgtagccttttagacaacctcttggcagttactccaagagatgctgcaaatgcttttcaacaagctcatctcatagaactcctctgtaggtaagagataagggcataaacataaggtgtatgtgcctaacagtatattttcattcgttcttctacccttagtttttcattttcctaatattaacgagcttctgatgatggtttttgaatagcagcaaagccttagctgtcgtgttcaggcccatctaagattacagcttattccttgcctggtgttgttttgtcctgtacagggtattgctgaccgcagcttaaaggggtgagcgtgtggaaggctagggtgcagatactccatgttgtgctgaatgtgacatctcgttcttcctagctactttctcctagcatgcccaccttcttttaaatatatgcatatgtttatttctctgccattctctcttcttacttttgaacagtgctgtctgaaatatcttttttctccttgctaaatcatactgccttttctttctactggaaaaaaaccaaaacccttcatttctgtcctaggttttctgttgcttggataaaacactaaccaaaagcaactt

SEQ ID NO: 25708 - DNA, 1139 bp, Mus musculus
tttgtccagggttagtccctcccacatggggctaggcccactcacatcaattagcagaagggtcattggtgagcaaggggagggggtagagggctttcagaggggaaagcaggaaaggggataacatttgaaatataaataaagaaaatatcaaagtaagtaagtaagtaaataaataaataaatgagtatgctccacagacataccctcaggacaatgaggaggaggcaattcctgaattgtgacttcttctgttcaggtgtatcaaattaacaactgatgctaactgtgacaacttaactttttaggattctttgtttgtcacacttatctaacagtatattcctgttttctgaaatactctgagaaaccttaaatattctttacctggaaaagctctttctctctatttatattcagggttatatggaaacttaatattgtggtgttttgtctttaataagaaacacagtaactgtctatggggtgccctttatccttgacagcacggtggatgcttccctcatagaaatgtgcatccaagaactcaagaccccactgcctttaccatctgctgttgaacatattcaggctcaggtaagcatcttggatctgcctctcacatgtgtcagggggcctctgccttaagggccaaacagcaaattctgctaaggagatctacccacaagaaaaagatggaaatctctcagtatatgtgtggtgttatgtaccttttaaactaggttacttaaaattagtaagagagactgggattggagaatagtggatattttccctaattccatcattaatcactactaaatgtttaatttcttggagtattattttataaagggatactggtataacccacttactactatgattttaggatgtgtctgatatgtctttatttttacctaggttaaacttgttagactagcatgtatgtttgtctttctttctttctttctttctttctttctttctttctttctttctttctttctttctttctttcttcctttctttcttccttccttccttccttccttccttccttccttccttcctttctttctttctttctttctttctttctttctttcttttttgacaggtttctctgtgtagaccag

SEQ ID NO: 25709 - DNA, 1233 bp, Mus musculus
tgtcttgaatattctaagtttctgggctaacatccacttatcagtgagtacatatcatgtgagttcttttgtgattgggttacctcactcaggattttgaaagaccaaaatctgtaggcaactactaagatgaaagattcctcatatatagacatttatgttgtaattttattcttgacctaattacaaaagataaagtctcaggttgatttaaaaaaaaactcatttatattctgtagtaaagaaaccacaagaggctaaagagacaaattcaaagcctgagaatatctttttccacaaagattttgctgaatttagaggatatttgtgtggctacaaatttgagacaaaacttctataaagaagaagaaaaataaaaacaaacaaaaacaaaagagatgagattggcatcccacacagacaaagctggacacttgagaacaggaaagggcaagaccaagcaaaaaagaaaattgccattgggaagaaagcaaaagcacagaaaatacaataaaagccagtatttgcttatcttcaaagaggtcaaaaagacattgtatccataatacataaagacactgtttcaaagagcagagaacaataaagagctgaaattgaaaaaaaaaaaacactttacagaatcacattattattacattgctggtaatgtactattacaaacaattatgtcagtaacaaggcagaaaagcaacacaagattaaaagaaggaatttataaaccactatttaaataagaatcacttctaaatagtatttcagaacatactgctcagtagggattaatttatctagtagataaatcaaaggaaagaatagaaggtttgtaattgcaaaagtatgcaactatacagcgatttgacaaatactacatagcaacgaataaataattattagatttcaaaaacaagatcaaaatgaaaacaaataccaaggaggaagaaggtgcaagatgaaacattccattacagaaccctcttagaaatcacagtaaattatctcagcattctcatgaagatataaaagcattaaagaaaaaaaaaactagtgtaacctagagtgacaggatgagataaaactatgatggtaaatttgttgtgtgagtgtctaagagctaaagtaaaggcaacaatagggaaagtacatgttgtagaattggaaatgaaaagcataaggaaggatctattaggcatagtttgggtatgaagagtcctt

SEQ ID NO: 25710 - DNA, 1184 bp, Mus musculus
cctggcagacaaacatgggtttaagcaagagtacttagatacactctacagatacgcaaaattccagtatgagttgtggaaattactttggagctgcagagtatctttacttctttagagttttggtcccagcaacagatagctttaagttcgctttggggaaaactggcctctgaaatcgtaatgcagaattgggatgcagccatggaagaccttactcgattaaaagagaccatagacaataattctgtgagttctccactccagtctcttcagcagtgaacatggctcattcattggtctcttatttgtttttatcaaccatccaaagggccgtgataacattattgatctcttcctttaccaaccacagtaccttaatgcaattcagacaatgtgtccacatactctccgctatttgactactgccgtcataaccaaaaaagatgtgcggaaacgccagcaggtgctgaaagtgattcaacaggagtcttacacacataaagacccaattatggaatttgttgaatgcctatatgttaactttgattttgacggggctcagaaaaagctgagagaatgtgaatcagtgctcatgaatgacttcttcctggtagcgtgtctggagaacttcattgagaatacccgtatcttcatatttgagatgttttgtcgtatccaccagtgtatcagcattaatatgttagcagacaaactgaatatgactccagaagaagctgaaagatggattgtgaatttgattagaaatgcgaggttggatgccaagattgattctaaactaggtcatgtggtaatgggcaacaatgcagtctcaccctaccagcaagtgattgaaaagactaaaagtctttcttttagaagctaaatgttggccatgaatctcgaaaagaaacttaatcagaatagtagatcagaggctcccaactgggaaacccaagactctggcttctatttaaggattataaagaaaagaagaaaaaggaataagtgaaagacacagtagccattgtgtataaaggatgacaattaacatgtttgctacaaattttggagaatttaaataaaatcggctatgattaaaaaaaatcttgaaggtcaactgatgaatgaacagataataaaaacccagacacaatacaatatgattctatatgtttttataa

SEQ ID NO: 25711 - DNA, 1189 bp, Mus musculus
ttctctagactcagctttgcctctatgacagtcacaacctcgcatctttcatcagaatgcagtcgtgtctaagagtgggtattttgtgataatgtttactatagatcatttgttaattttgatgccttcattttagctaatttcagaatttttattaggtaatgtctaggtcctgttctttgagtatcttagagtgtgttgaaaggatccgctgagcatttacaaacatggtttgtagctctaaccctgaagttacttggggactttgctttgattgccaagggagcttctggtttctgatgcaatactaaccaatattgcatcatagtaatgaattaaagcatgtatatctgtagagcaagagaattgctaattatagtctgtgtccaagtgttcttttcatatttaaaagcaaccatttttaatatttaatcacctatcattaactttattgataattgtgtatgtatgtagtcatggggaatgttcagaaaataaaagaatattctcaaatggaaactggagataagcactgttaaaagttactgtaacaaactcctctatagaataaacttcttagactctttgggaagcttcatggtagtggtcccaatggtcaagccttattgcaggagaaaaaacctgaagtctgtacagatgcctcattaatgataatgtgtggtaagaagagagacgtgaagaaatagggagtaccactattacattttattattgtttatcactaccaaatgttaaatgtatcttgtctggtcaatcatccttgtaaataagttctcaataggaaaaaagagtaaagcacagctttgcattaataaacatatgcacagaggtgattcattgtattctgaaatagttttctttttgaatgagtgctttggttctctgttgtgaagcaactttatattgatcttcaattctatttgtacttttataatgtgcattagggaaaatgtgtaagtggtttgtaagtaaatagttttatttctttttgtattaaacttttgatttttacatgtttctttttgaggatatttttatttgcattgtcagagtgctcacataaaaaaagaacttaaaatttgctcactcatgtgcttttctttttaatgttttatcagagtactatttgcttatcaggagaacatactttagctctattcataatcta

SEQ ID NO: 25712 - DNA, 1205 bp, Mus musculus
gtgtaattccatgatggcgtcagcggtgctgtctgtgtctcgggtctctcggccgctgggccgctgggccgctgggccgctgggccgctgggccgctgggccgctgggccgctgggccgctgggccgctgggccgctgggccgctgggccgctgggccgctgggccgctgggccgctgggccgctgggccgctgggccgggccctccccgggttggggcggcccatgtcgaatggcgcccacggcgaggagggttcagctcggatgtggaaggccctcacctacttcgtggcgctgcccggggtgggagtgagcatgctcaacgtgttcctcaagtcggggcacgaagagcaggagagacccccgtacgttacatcaggaccaagccctttccctggggagacggtaaccataccctcttccacaaccctcatgtgaacccacttccaaccggctttgaagatgagtaaagagaacctggcctcccccaggcaacaagggaccacagcactggttttggacccttctctgtgtggaccacgaaagcccattggatgctaagctcatctctcctttcctcagatggcgaccattactctgatcttccatccctttgcttgtaagaggagatggcttaaataaataacttaaactcaaaaaaaaaaaaaagactctcacactgtaatccaggctggtcttgaactcaccatgtatcctaaactgatctcaaactcacagcaattctctgcttcagattctaggactccaggtataagccaccatgcctgactattttttaattactttattaatgaattaaaactagatatagttgtattatatctttagatatgtggttctcaaccgtcctaattttgcaatactttaatgcagctccttatcttgtggtgacccctaaccactaagttttcttttttttttttaagatttatttatttatttatttttaaagatttatttattattatatgtaagtacattgtagctgtcttcagacacaccagaagagggagtcagatcttgttacggatggttgtgagccaccatgtggttgctgggacccgaactctggaccttcggaagagcagtcgggtgctcttacccactgagccatctcaccagccccaccactaagttttcttgttgctacttcctaactgtaatcctgctactgttaagaatcat

SEQ ID NO: 25713 - DNA, 1166 bp, Mus musculus
gtcgtggggtggcagcttggtggcatggccatcgttagggctcatgggctgacctcagaggtgaaatggttttgatgcaggcggcttgactgtggagaaagcaagcccagtagataagtccatcagccaagctcagaggactggcgcttgacaccaagccatgttattaaaatgaagacagtctcaagtcagcaagaagcctcagcagataaagtgcttgctgcgcaagctttgtgacctgagacaactccctgatcccacatacatgtagaagataagagactccacagagctgtccactgcctctgcacatgctcagtagcgtgtgtccccaccccaccccaccccctccatgcacaaacactagaacaatactaaagacaaattaaaaaaatgaagacagttgtggcagaggtaattgtgctgcagcctgcagggttctcatgatttgatcaagagcattaagctttggggtctttgaaaagctttcagcttattggggggggggtgattagacacggcttggaaagggggaatcctttgccagagagcagaggtgagtgcttgagtgccatcttgtgcatctctgtgctttgggaatgtgaagtcagtagctgtccaaaaccgggtcctgagggggctaactgtgatgaaggtaagaacaggtatgacccagtaggggctaaggaaatggaacagacagtgaagtgcttgccttgcaagcgtggggacccaagaaaggtcaggtgtggcagtgcacagttgcaaccccagctcaggagaggtgaattcaggagaacctctggggctcaccaccagccaaaccagcctcgctgaattagccagggagagaagcttggcccttcaggaacaacacccaggattgatctcaggtacacacacacacacacacacacacacacacacacacacaccaagagcatagtgcaggcagagatacaacatagcaagcaggtgccagttaagcaccagacctaatatgtgtccttagtttttggtggaggtctcttgttctgcattgcagtgaggggcttaggagactaaagtagccctctttgggagttcctccttggcaagtgaggttcgaggctggtatgtaggcagggttgggcctggaagcatggggacacctgcgacaaggaagt

SEQ ID NO: 25714 - DNA, 2025 bp, Mus musculus
tcttgggtattctcatttggttcttgaagacagagtcttgctatatagcccaggctgggtttgaacttgctgcagttgatgctcctgcctcagttttcaggcgctgggatttatttgcccggctgctgatgtgctgttcggcttctttcttttaggactcacaccgctttgggaagcacttgagacaagccatgatggacattatcaccttgtttggcctcaccgccaattccaaaaagtaactgtcggagccgcacggaaggaaaatggactctagtgatacaaaccaaatgaataggtgttgctcctgaccataggacaggcagaaaattgttcttataaaactcagttttccttccagaaggtttaccgtcggtctccctagaacaaccgtaggctccaccgtttgacttgtgaccctactacatccagagatgccttggctccaggaatattgggcacagtcccccgaagtcttttgaatcggctcctaatggataaagggatttaaatgctggtgaatccctggattttgggggttgtatcaatatgtgttggaggtgacagacttcctcagtggtgaccctgtggatacttgggacttgacttcacccaggcagtgagagcatcaccttgtggaaagagaaagtggcttcagagccagtggaggtaacagctctagctaacacacctgtaacacactaatggaatggttaggcctggggattaaggttctgctatgaatgacagccaccatcgctttgggagtccacatttgactccacatttcctggaagcaggataccacctcctcagtgccaccttcgaaacccagtgccttaacgatgggagcccattggcaagtggggccatagagaaggcttagcatgtgaagcctttgggtggatatgtgagggtgctgcttcccctcacaagttcctgcatagagatgtccctaagtaagcacttcccccaccctagaagatgaggtccctggtggagggagcgatgcagaatctcattggccaccagttccattaagcaacaaaataacagatgtgtccacagagggaagtgaggggcttggtagtcaaaggctaccaagttggacaccagctggagagtgtggcagccattggcaaggagagtgagaccctggtcactgagtcaggcatactgacacaggcagccaaagccttgtcatggcagccaggagatagagatcctggcagatacaccaacgggctcatcttctaatcccacccagtcagattccaaccagagcaaattcgatagaaggctaggtcattttggtgacagactcgggggtctcaagtaatgggtgctttgtacccaaataccatccctctgtgagagtgcctttcttgacaacatccaatagactgtaaagcaactccgtttggtattccatgtaaacatagcataatggagtggcctcccctacctgttaccatcctgtcctgacaagtttagctcttcgtgttttaaatcatgtatttattttccagtgcccctttggccttgcttgattcctactcgtgtgctagctgtaacagaagtgagggtggggtggccagaagtacagagaggtgctggctgaacagctcatgcgtgttttataagtatccatgaatacaaaaaaaagaatcacacctacaagggccaaagtttttttcctactaaaaacaagaaaacaaaaggcaacataaatatatagcagagacaactgtaagtcaaagccgcctgaccgcgctcttaggactacttgctaacctctgttactcggagtattcctgctagtacccaagtgtgacattcctctctcaggtctccagtgtccttccttgctgctcctgagcagttaccaatgcaattttttactccttccaaggcagaagagtgggctttcactgtaagtgttcaaaggaggaggtaagactactatgtatttaatgtggaacaaaacatagtcttaccgcagccaaggttcgaatttggttttct

SEQ ID NO: 25715 - DNA, 2565 bp, Mus musculus
cagatgtccgtctcctcctctgcaggaccgaccagccaagcatgccaagcgacccatcagttaatggccctgtatgatgagtgacgtccactgctgctgactgaggactgcaggccaccaccacccaggggctctggagggctcacccagagctactgagccaccactactgcactctgcaagagatcagaaccagcagcctttctgtttctagattctaagatgctgtacagagagactcagacatgtaaaacactgcacattgacaaataccaagaatttttttgcgtatgtttatattgtattgatctaaatactgggtagcctgtgacaccagatcttgccgcccatgtaataatagtaatgatacatagttcagatggttgtaagaatagttttataaagtgactacacagatctattgtattcgaaacataactatttgacaattattagtgtgaccaaagtattaggcagttttcatacattttccaccttgtacaaaattctgaattcatttttcttccaggttggcacggagctgtcgatggaaaagccctctgcgtgttatattttggttgttctgacttacaaagtgattttgaataagaaatacttggtgtttttttataacccactttcaattggtaactgttttctgtattgtttcaggcggatcaaatgcttgagtcttggtggagattaagtatttattgctacaacttagttgatgaattgctgttcttgtaaagccatatgttctgttaaggtctggtttgctcagagcgtttctttctgcaggtgaaacactagaatattggagtgtacatggctgtggttagaattttaggggggttggggggtgtttgttttttgttttgttttggtagttcatccgccttttaacccattcaccaaaatgtcccttgtcagcaagtatcactgatggctatttcagagtggtctgcacccacactgctctgtgtcacagaggtgagtctggaatgctcatgtggtgacagggtagagtgtgcccatcacgcgggctggctgtaacagaatcacaacctggcatccaagcatgtttcttgttttactgtaccttgtgaggttttcacttgtaaaccagtggattttagaactggtttgtgtgtatatagtgattatggatactaattcagtgtaatttataattttctatgtcagcgtaaacacatcctagcctcctccaacagctgaagcaatggcctgtgcactgccgcggcatcgggtgaagagctcagtcacctcgcctcttgcacttttagatgcagatcagtttttcattctataatagaaaatattcacatatttttacatcatttgttttttcctgaccagtatttaaaaccaaaaggatattctgaaaaaatggccaacaagttttttagaaccagcatcccaagcagtgtgcctacatgacatcgcgtatggagatagagtcgagtgtccaatgccttactccttactcgcttctcactgtacacagtgcaagggaccacctcaggtggccgaggcaggcctggtcaccaggctcagtgggcagcaggaagccctgggactggtggcgaggggctcggtggcctgtgcttgcccgctcaggacccttcagtcacagctccttcagaagagactgcgttctctggaacctggtgccaccagaggacagggctccttctgctcgtctcagggatggttgacctgcgtggcccaggacctcacattgctggcggatggcattctcctgtctcacctggttgacaagccttgctgaccccagccaggacttggctcctcctagtcagcccacactgcctccttgctgtggactgggctggcttttctgtcccactgtccactgggaaaggaacgcttgggtactgttcttgggaaaggacttaggcttgcttgtcataaggagaggctgtgagggtgaaaggggacaaggtgtgttgggttggagggtgccagccagggcttgtgatgagttcctgctccttttcatttctgtgtattggccgaatgaattgcaagactaacagacgtctacagtacagtacctgtatcacaagtaataacaaaataaagcctgatgctttgtttctataaacttcctcgtgagcctttttggggttctaatagccacatagtgagcctctgccaaaaagtcctctttagctttcacctgtccttactcttgggcatgccagctactgaagaaacagtgttgtgacccccacacgccttgagcctccagtgcctaacacgtttgcttggcaccttgttgctgagagtgaaccaccaccacttgccgtcttgagatggtctgcctggtcctccagcttagcttgccatatgtgtcgttcccggccctgcctgctgttattgccagcaaacagcattagtgacagttctacagattcccattgctgtcattaaagcgtactccctgctaaacacatggtgcaggaagagagacaacttttgctctgttttttgagactatataatcctgactatcctgaa

SEQ ID NO: 25716 - DNA, 1134 bp, Mus musculus
taggagagtgtggacagaggagagacacagaggctgccatggggtagggaagcaagaagagcaccctgggctccgggccaagaaagcaaggcccagaggcatcacaaatgggtccagcatggccaagatggaacatagaagttaagtaaattagtgtgtgtattagggttctctagagtcaaagaacttacgggtagtttctatagtaagggaatttgttgatgacttacagtctgtagtccagctcccaacaatggtcagcagcagctgtgaatggaagtccaaggatctagtagttgctcagtcccacaaggcaaacaggcgaagaagagagagtcttccttcttccaatatccttatgtaggtctccagcagaaggtgtagtcagtttaaaggtaatgtgctaccacacctttaatctcaaatgaccttgaactcagagatctccttgccttaatctggaattctggattatatttcattccagatatagtcaagttgacaaccaggaatagccactacaaagtgataactcagaattatcgatgggaggtagattctagcagcctggaggctactgtgctttatagggatattaaaatataaaggctgtgtgtgtctttcattcaggaacataagccgttgaggcaggtagcaaacctggcaccaggatttattaataaataattaatacaacagatggcacccaacattatgtcgcagtgagaccaacctgttcatctgcatttcagaatttctgcggctccaggactagctcctccttagtggcttcattttgtgttttctgattagcattgtctctcaaagccttttgactcttcatagtatagttaccctttcatttccacagctgtggagttgtaatgactttgagtctgatcaccagctgattgatctcaggcatccagaatgttgctttgtctatgacctgccaagcccctcaagaaagaggtggcctttgaacttccatagtggtattcctcctctgccattttctccagctgagtctgtgtattatatcctgtgacttttgtgtgagaacttcctccagctgtcataatttccttagctgtttattattcagtaactgcaggaggactattcttgttcaga

SEQ ID NO: 25717 - DNA, 1186 bp, Mus musculus
gggtacacttgattgagattttaggcacatgtttctgaattggaaatagtttatctcttgttttttgtttgaacaggttgctataacaaaataccatagcttgagtatttaaagtacagaaatttatttacagttctggagactataagtcaagatctgagttttggacaatgcagatttcaggtgagggtccctttctggtctatagacactgtctcttgatatattcttactctgccttttttcagagagcaagtactctgacatttcttcctataaagatactgagttcatgtaacagttcttacttactgcaaagatagcaagacttcattatagaagttgagagcaatataaaatatcagtggatgagccttttatactgtgtagccccacctggtcttgaacttaatgatatccgtgcctcaactttcacaaatttcttcaaccttaaggttgaccatgcccaaacaaacccaggaagaggctcacctgtggctttccccagaacttcttaccctgtccagcttaaacctttccagaccaagggctgggctcccctactgtagccctggcttctcattttcatataaacttgccattttggccatgcacttttttggtccttggctcttctcttggtctacttgccctttcttctgttttcctctttcactccctccacccctgttcagtctggatccttccagatgcctctggccgaactcttccttatagctacaataaaatacctaggagtggccatgtcctcattttcattaaaggtatacttctaagctctgcttcatttattcccccttaaaaagtggtaaaatgtatttagcataaaatttttcctatcccctccacccctcttttcaatagggtcttttttttttttaaagatttatttattttatgtatgtgagtacagtgtatctgtcttcagacacactagaagagggcatccaatcccattacagatggttgtgagccaccatgtggttgctgggatttgaactcagtacctctagaagagcagttagtgctcttaatcactgagccacttctccagctccctcaaaagggtcttcttatagcctaggctggccttgaatttacaaagattacaattacaaagatcccctgcttcttgttaattaagattaacttaatatcagtagaa

SEQ ID NO: 25718 - DNA, 1139 bp, Mus musculus
gttttaaaaaccaattttctatggggtatgctggtgtgtttgagattgaacccaagactttcgatttaagcatgctaagcatgtactctatctctgagctacttctctaacacttttataactatgccatatttgtattctttagctgtcaccacagttagtagtattgaaaaagaaggtacgatttatagtaggggcaaattttatgtttattgagaaaagtattgattctttaaggaatgatagatgataatacaattaaaaatgaaagcatatcaattttcctgtcttgattatttttagggaatggattttttaatccattttctccgagagagtaattcagtaatggacagctaaactacttgactattgttattattgttgttgtttgtttgacagggtctctctgcgtaaccttggctatcctagaacctgatatgtagactagtcttgactccactaactcaagagatcctattgcttctgcctcctgagtgttagaaatcaaaggtctaagctgcttgctattttagctctcacatcatcagtgcctcccttagctactgtggccctgaccttattccctattcctgagcagtcttgctctctgagaacctttctcattttgtgctttctgatgtaaaaatataatttcctagaagtcagatccttaagagattcactgctcccttcagttgacgtccttgatggaatcctagacagactttttttttttttttttgagggtgggggctttgctaccattgttcagtgacctcatgtcagagtttggatatctttagttcaattttttccaagctaggatctgagcccttgtcttgtttcttcagtagtctgtctagcttttgccactccttcaatgcccagcttatttctctgttttagcaatagtagccctagtgatcccactctctcagttcttactgacatcaagcagataatgtgtacacatatactgttttcagttttgcttctttctctcttttgcatcctccaaccattgctgccatactgctttgattgttactttagattcaggagttggtaagccaggaagatagtatagaattcatttatgccatctttataattcaggaatggattctcagattaga

SEQ ID NO: 25719 - DNA, 1126 bp, Mus musculus
tagatagctaagtagagcctagctgctggagggcgctgctcaggagctgtgtgaacaccctctgaggaggtgggaacaaatgttctgtggctacaatgttgatccatatactgtctcagacacttagtgtcttgccacttcaggttttccctctgaccagttgcttctctttgcttcatggccttctcttttcagcagttttcactggattcagggctaccctcacacacaaggattgtagctcaatcctaatattttccaagaccccatttccaaagaggctcataccctaagttccagggtggcatgaatttcagggacactattccccccaccatgaggtataacccggcagcctggaggacctgtgaggtcaggggctgggctgggcctgcggatgaggtgggagctcacagcgcccgcccacttcttccctgcatctcccatgtgctgtgcttccgcaggtacatgtactttaccaacatgcaggaccatgctgccaagatcgagcgagcctccctggatggcacagagcgggaggtcctcttcaccacaggcctcatccgtcccgtggcccttgtggtggacaatgctctgggcaagctcttctgggtggatgccgacctaaagcgaatcgaaagctgtgacctctctggtatgcaccctggatgtctccagccactgagtcctcagtctgcaactgttgggggtgaccctaccgtgcgctcccagccttccttactaccaataggggtagcagttaaaatcttgctcggcttgctgtgagcctggcattgtgctgtgagcctggcagctctgtattcatatgtaatccaaataccatgggggcctggctgtgagcccctggactacggatcctagtgccttttcttctagtaaaagctgtgtgattggggaggtggctcagttggtaaagagcttcctatgcaatagaaggatctgaattctgatccccagcacccttataaacagccaaggtctatggcccatgcctgcagtcccagccaaggactgtggcccatgcctgcagtcccaacagaggactgtggcacatgcctgcagtcccagctgaggactgtggcccatgactgcaatcccagtgtta

SEQ ID NO: 25720 - DNA, 1151 bp, Mus musculus
tagacaaaccaccacaaggtgtatatgataaaaatcctcactgacctgttaggttatcaagtcatagctataggttcgactctccttttcttcatattcttcttcctgttcatcctcttcttcctttctctcttcttcctttccctctttttcctcctctccttcctccccttcttcttctgttagtggtaggttcgactccccttcatattcttcttcctgttcatcctcttcctttttctcttcttcctcttcctttccatcttcttcctcctctccttcctccccttcttcctctgttagtggtgaagatagtggctggttcttcaactccacgctgggcaagtggttccaggctgtcacctcccagacagtcaccttgagtactatggatgactgtagcttttgtgtaagaaagcgccatggtacaaatcataagtcctgtgactttcagaccctcccctccccttgtctgcctcagacactttcctgcaccacccagtccttcccacttctccttgcctgccccagataccccttagctgcatttgcctacccatcactcgctgtacatccttgccttgctccaccctttgacccaagagcctcacacctgccctatgccccttgcctggctctgcagcctgggtcccctctccgtgcataagaagagaggtatccctctgctctccattcctactctcctggccactgaattaaaagaacaaggtttgaacatcgaaagccaagagcctgagtcctaaacagtggaaatgaagggagagaggttgggcttcaggtctcatgtctatctagttgacagcctgccagtgtcctctggtggattccatcatgggacctagagtctggtgtcctgttggggctctttctagtttgttctgtgtattcgtaaatgggcatatcactaagatctaagttgagggccatcgtgatgactcagtgggtaaaggtgtttgaaatcatgcctgatggatggcctggtttcaaatcctgggacccatgtggtgcaaggagagaaccagctctcaccatttgtcctctgaacttcacacggtgtcgtgaaaggtgtgcgtacacacatatgcataaaaccaaccaaataaataaacttgtttttaaaagagccgggt

SEQ ID NO: 25721 - DNA, 1214 bp, Mus musculus
aagtgttgtgtgaaaaacagaatcagatgtcatacagctgctactgatgggtcacagtacagaagtgcttaggagaaaacaacaataaatgtagtctatgagggtgtgcaaatgaaaaacacagtgagggtaataagtttctacataaattgtactagttttactagcagaattttgaaaggtaaaatatgagacagtccctcaagataagatctgagtaaaaagaactgtgatgttggctgtgaacacatagatgccactctttccataataataaactgcttgaaactttatttttagaattgaccaaaactatattaaagcttataaagtattgtatgcttgatgaaaaccaagaaagacaaaatcaaaagaacattggggcagccaggcagggtggtttatgctgataatcccagtgtttgggaggctgaatcacatgcacttggaaaagtttaaggtaaacccaggccacacagtacgctctctctcaaaacagtcatagaagaagccgggtcctcagcactgaacaacagcgaccacaacaaaggttaaaggagggttggggaggaagcggctgcagagctacttaaagaacagggtagatcctggcgattgagcggctgctatagtgttacttgtctatgattccagcactcagagagtgaggcaggaggattagaagttctggtcattcttggtaagtagagcatttgagaccagcccgagaaataagagaccttgcctctttttttttttaaaggagagttaccttaacagatattaaagattattgtattataatggttatgatcaaacttgatgcattggttaggaatgaacaatagtgaacagagaattctaaaacaagcagagtgcacgtgggaagtgagtgctacctctgcttctggggaaaaataggctaggcttccaaatacagtttaaataaacaatctaaaatgattaggaaaagatctgcctagggccgtgagagttaagagcatgtgctgctcttaacaggacccgagtttagttcccgacacccatgctgtgctgtttccggcactacagggagactgacaccctcttgtcctctgagggtttgtgtgttcatgtgtatacatgtaattaaaaagaaaataaaacttgaccaaaaaagtgtcagagccaaatgtggtggtgtactcctttaatcccaacacccagaaagtaga

SEQ ID NO: 25722 - DNA, 1150 bp, Mus musculus
ctcagacagtcagtctgtcagctctaacacagatgcagacaccactcaggaaaaagacaatgcaagtaagtaagggagctgctgtgaggtgccagttatgctcctcaggagggtctgtagcatgccctaggagggtctgtagcatgccctaggagggtctgtagcatgccctaggagggtctgtagcatgccctaggagggtctgtagcatgtcctaggagggttttttggtttttgttccttgtttttgtgttttttgtttttaagatttatttatgtttgttagtacactgtcgctgtcttcagatacaccagaagaggagaataatcagatcccattacagatggttgtgagccaccatgtggttgctgggatttgaactcagaacctctggaagagcagtcagtgctcttaaccactgagccatctctccagcccagcctcagtggttttgaaactccaaattgatagaaactgagacttgaggcatttcagctagaaatgcacttggtagtacacaacatacttttcgtccatagcagtttatatcaattccaaatttagagccaacatctctatgtatttctgaatacttggtaattggacattgaaatattcagcatatgtacctatcatgctcaaggaagacattttcaagtcattagtgatgggtaatggtgttagaggccccgtaagagcttggctggttcatcaggctacccaggtctatctccagccagtctaggaacaggatggacccagagttcattatagcttcaagacttccattcatttaactatttgattagcattttttgaggtgaatcaacctagttcactaggctccgaagtgtgccaagagtgtttggatgtggctattatagggtgtgtgattgctactacagaaagtagcaatccaggaagcttggggccagttttatgttggtggagtgcctaatggaaactggggttggtggtgaacaaagagaaaaggaagagaagaaatgttacagaggccaaagacagcacagtggagtttgagtgctgggacctctgtggaggctgtgatgccgcacatcagcaggttctcctgtctgactcgtctctactagagtcgtctgtgagaaaagttggccttggttacccaca

SEQ ID NO: 25723 - DNA, 1114 bp, Mus musculus
caggacagccagggctacacagagaaatcctgtctcgaaaaaacaaacaaacaaaacaaaacaaaacaaaacaaaagaatcacacaccagactgggcagtggtagcaaaaacctttaatcccagctctcaggaggcagaggcaggctgatctctgagttcgaagccagcctggtctacacagtgggtccaggacagccaggaattcctgtctggaaaaaccaaagaaaagaaaagaagaaaagaaaaaagagaagggaaaggaagggaaggaaggaagaaagatagaaagaaaaagatagaaagaaaaggaaagaaagagaaagaaagaaagggaaagaaagaaagaaagaaagaaagagaaagaaaagaaaagagggagggaaaagcatataccaagcagtctcactttgatgtaatagaaagtaaaaaaaattttttttttttaattaatttatttattatatgtaagtacactgttgccgtcttcagacactccagaagagggagtcagattttgttacggatggttgtgagccaccatgtggttgctgggatttgaactctttttttgctgggatttgaacttgaccttcggaagagcagtcgggtgctcttacccactgagccatctcaccagcccaaaagtaaaaatttttgacggaaaaaggtttttcatttgtttcatagctgagaattcatattttcatataattaatatagttagcttaagtgcagttttcctaccaaagtttaaatagttaagtcatgaatttcagcttcaagttgcatttttaaagaagattaattattatatatatacattctagctgcctttagatacaccagaagagggtatcagatcccagtatagatggttgtgagccaccatgtggttgctgggaattgaacccgggacctctggaagcacagtcagtgttcttaaccactgatctatctcccagccccccaaattgcatttttttgagggaggggagttctcaaactctgcagggtctagcagggatatttgctgccagcttggagttttggatattaatagctgctggccattggggatattgtgagaacacagtgagaggaatcaaattcagg

SEQ ID NO: 25724 - DNA, 1159 bp, Mus musculus
agtttctggctgagcactccaagcccagctccagctcagcccgacatgacagcgccgctctgcctgtgcatctgtctggctcagttccagacagtaacacagcagagctgtcacatgctgctccacgtgacaagcggcggctgggggctccatcccacgcagaagacaaggccctcagtggcccctcagctctacaccttaccccagctagctgaatcctgcgggtctgccagcggggcgtgggtctccaggcctctcttgccctcccaggtaggctggggagcggggtgaggcggtgaagagcatctcccaggtgcaaggtcggcgcagaggccctggccagcaacctccctgctggcccagggcacctgcgggaaaagacactgaacatggcccagggcagagatacgaaggatgtttctctctccccccacacacatgtaatccaatcgccagcctgtctgtcccaacagctgctcaaagtcatccccctttgtgctggctcccacaggtgtccctggagtagagccaggcacagctctgcacctgcagagaagcgggaccccaggggccacttcagcaacacagggtggcaggcagaggggatgtctttggggagagacagccccagctctatagtcataagttaccacgcacatcctacgtggccaaaccctgtcccttcacagatcccgttttctcattgtaaaatgtgaggtttggaggtgacaaatctgtgagtgggcttcagctggaggtagatcgagggtcacgggcaggcagaggccggggcttcagctggaagagagcctggtccttagaccgtatttttggactcagggtctggcctttccttttaacagatggggaaactgagactgagcgtagccaaggctaggcggggtgtacagtctttcttggtgttccaggcctctttgttccccccttcacattgaagttcccaggctacaaatgctcccacctcagccctcccttcctccgtcagctatccccagtcaatgctcagaactgctgtgcgactctgacctgggtgcctttctctgggccctgcctccttttctgcggtctgagagaatatctctaaacctctatgagatagatgttgtggtaaaatcccagctaacagcttccacctggc

SEQ ID NO: 25725 - DNA, 1173 bp, Mus musculus
ggtctcttgggactgctggccagccagtgtgggctacttggtgggacacaggccagtgaaagattctgtgtcaaaacaaacaggcaaaaaacatggtagaggctggtgagatggcttggtgagtgaaggcacctgtcacaaagattgatcttttaagacccacgtggtggaaggagagagccaactcctgcaagttgtcctctgaccatgacaggcatgttcacagatgtacatacatacagggtttaagaagggaaagaagcagacgggcagtggcggcccatgcctttaatccctgcacttgggaggcagaggcaggcggatttctgagtttgaggccagcctggtctacagagtgagttccaggacagccagggctacacagagaaaccctgtctcgaaaaaccaaaaaaggaaaaaaaaaagggggggggggaagaagccaagcatgtgacacacccctgtagttcccgcactccagcggtagagacaggaggatggagaatccaaagtccactcttagttggattacatagtgagacttgtggagcagaaggggaagggatgctaggctgctcctgccagtgagctcccctgctcagaacacctcaaataatgtacccagtggccagggtgaagccgagtcaagtagaagacactgcctgggaagtggaagaagagagccatacggaggtggagcgagaggccagtcccaccatacagagagcctcaaggggacagacttgggagagagagccagccaggggacagggtgggagtgtggtgtgactgccagctggtttccttgaggaatgcagggctctcccagatgctgtacccatttctacaggaggaccccaccccttcatacctccacagtcccctgtccctttctcttccctctccatccccccacatttctgcccttctcacctatttcctctccttgcctaccccccccaacacaccccttttgtcacctctagccctgcagcctccttacccagcagcaggcacatgatggtggtaaaaatagctcctttcaacagagtgtgaatggaatggagggggcagaggcaggagacaaggctgggcccccagggctcctgatcccctccctgctcagtcacacacttgctcagatggttcacctcaggctctgtcaccctacac

SEQ ID NO: 25726 - DNA, 1174 bp, Mus musculus
tgggatcctggatctgaccaggtgccttctgggtggttcttgcagtatttttctgtgccctttggagaggaggacaggttgatgaggaaggtgttaatagtatagcctctgccagtgccacccacagccttcagttaacatcagatacccatgtcccctctgggctgtgtactttcttcctgtcccaggagctagaggtgtgatggtgaataggagatgctgccctggagttgggtacagtgtgggccaggagcgatgaggagacaagagcaggacatcccactaacaagagtcatgttcccagtgggcaggtggtgcatgcctttaatcccagcactcgaaaagcagaggtgggtgaatctcgagttcaaggccatcctagtcaacagagtgagttctaggatagtcaggttatgcagagaaacccagtgtccaaaaacaaagcaagtttcctttcctggaaatccaccagtctcttgtttttccttgaaggagtgtttggatgccccacaactgtggccaatgtggagacagtggctgtgtcccccaccatttgccgtcgtgggggcacctggtttgctggctttggccgagaacgcaattcaggtaccaaattgtttaacatctctggccatgtcaaccacccctgcactgtggaggaagagatgtctgtgccactgaaagagctgattgagaaacatgctggtaagcctggagccaactcaggggctgtgcttgggagagggcacggtgggagagccatgacaatccttttgcaaattgtcacaggtggtgtcacaggtggctgggacaacctccttgctgtgattcctggtggctcatctactccactgattcccaaatctgtgtgtgagaccgtgctaatggacttcgatgcactggtgcaggctcagacaggcctgggcacggctgcagttattgttatggatcgctcggtaatggacctcatgccccataaacctcctcccagcctgggtgtgttccctccctgagcctctctgaaaattctcctgcctggctcttggctcccaattcctacagactaaaaccctgtacagtgggagagcatgggccagagcactggacccaagtcagggttgttgtgggagggaggctaagatgtctgtgcactgttccttgtctcctagacaga

SEQ ID NO: 25727 - DNA, 1210 bp, Mus musculus
agcgccctgaactctgtgccaagagaatgtggcccagagagctggctggctgagttaaaagcagtcaagatggatcatagaaattagtaaatagtaactcggaattatggataccaacagcatggacagtaggcagttgcccaactcagtctataaaggctgtgtgtgtctttcattcaggaacataaaccactgaggtggtagtgatcttactccaggatttattaaaatattcctactgtactaatggttgaatgtttgttggatggataaatgattggataggtagaaaggcagatggatggaagtaggtagatggcaggtgcaggaatcttttcaaaaaagatttattttattttattttatgtgtataggcatttttccagtaattatgtgtgtgtgtgtgtgtgtgtgtgtgtgtgtgtgtgtgtgtgtgtgtatgtgtgtgtgtgtgtgtgtgtgtgtatctcacatgcacacgcctggtatcatggatgccctggagctacagttacagacaatttgtgagctaccataaggatgttagaaattgaacctgaaagactatactttcagggatcatttctatagttcgttactagagaagtttctctgactgtgtagagcacctgaaaccacgaggacgagacatagcgtcccctcctgagcgtgaagctggctctaggtgctgcttgattgcagctgcctcttgccattgatgatcgttcttctctccttcgggagggtgagagggagggaacgcagtctgagtggaaaaaaaaaaaagaaattgaacctgagtgctctagaggagtggccagtgctcttcaatgctgagccatctctccagttgcaggtacagaatcttatctcccaccctcaccccctttttggacatggtgtccctctgtagcctaaactggcctataactcactatgtaaccccgactaacctcaaactgatggcaaccctcctgctttggccttttcagtgttgaacttataggcatgagctttgtactggctggtttagtgtcaacttgacacgagctggagttatcacagagaaaggagcctcccttgaggaaatgcctccatgagatccagctgagaggcattttctcaattagtgataaagggtgggagggcccattgggagtagtgccatccctgggctggttgtcttgggttctataagaaagcaagctga

SEQ ID NO: 25728 - DNA, 1174 bp, Mus musculus
gacttcgagaggacgggatccaaaagcgtgtgatacaggagggccgaggagagttgccggactttcaggatggcactaaggtttgtgtccatcctctccccactttcccagcgtctcttctgaagcgcggtgcgcatgcgaggcgggaggaggccgtaggtgagaggttgcgcatgcccagagagcagctgccagtcaggctacctctcacatgccgagctcgacgctgattggtctggatttaagtgggagttaattcagatatgtctactccgccccttggctttgctttaggactgcattggacaggggtgggtgtcagtcatctcaaaatggtttggtgtgggtgtgacctcagtgctgatacccgtacctgaaggttcaaagctcatgcagttttgagtaaaggggccttctgaaaccatctaggacaattctcattgtttacatagggaaactgaggtcctggaactaaaaaaaacacagagtcccagagatccagttttccagaccaaactcctatgtcagcgttctgatagatggtagcattgcttttatatctgggcaccaagttcaggtgcccctccctaaggcactccatacctctaggttcccctgctttgttgctgtagatctctaatcacagttgtggagctgataccagtgaagccaaaagcaagaattctgtgaatgaatgtatgccctctggccagtggtgttaagccagcaggcagagagtctagtctgatgtggtgaggggtaaatgctgagagcagagggcaggcatgtggtggtagtgatcagctgtgcttgaaaaggggatctacaagctgggcctggtggcccatgcctacagtctcagccgctggtgaagctgggctacagcatgagttcaaggccagctcaggacactcaatgagaccctgtcttaaaattagagagatggagatagagaacaggctttggaaggagcctggcaagagggatgctagatggaaaagcttaggataaactaatataagactaatctgtgagcaggggcacgtggtaaatagaagcaggcaggattaaacaatcactggggctcaggaggggggaccgtcttctgctggtgaggtggcttagtggatagagtgcttgctgccaacctgatggcctgggtcagatccccagg

SEQ ID NO: 25729 - DNA, 1174 bp, Mus musculus
aacctcccatttaatagctgtttcccagggctgtttcccagggcctgccaaagtaccctgccctggaaacagctttgtgcgcatcctgggaggtgttctgcccaggaaacatcagtttaggtgggagacgcatcgggccaaagcctggctgaaagaccctgcccttacccgcccccccccccccgtccttcccctccacaatcatatgtgtgcagtgcttatcctggtcggcgtgggactggaggtggccccctctccaggtgagtgtccttcctgcctgggtcctcagcaaaccctcccaactccccacacaaggcacacaagccacctcccaggagaaaggggggccttcccaggcagccatcatccccagggacccctagtcctgagctgtccgtttctttctaccttaggtgtctccagtgccatcttctttgtgccgggcatcctgctgttagtcccaggaggtaagagtgacaagagggtggggcatgggtggggtggggtggggccaggcaccctcactgacagatatcacccccacagtctaccatgtgatcttcatctactgcgctgtcaagggccgccggggcttccaattcttctacctgccctactttgagaagtgagctgcaactggccagtggctcaccagtgatccaaggcctcaggtcacctccacgtgtccacagggtattcctccaacctacacctggttctgttcctttcacctggaaggcagaggcccctgggaccctcacaaccaccaggcccctttgaatttgctcaggaagtttagagcatgccagcctgggaatattgcctcttacctgatgtgtgccttaacttattcctgggttctggactcctgggttggtgtaattttgtgctaataaaagggtaattatttccaacaaggacagttgcactttcctgggccagcaagcctggcccagcacactaacgaccacagtcccctcctacagagggactgtgtgtaaaggacccacctagagctctagaggaccaccaacttcccaaggacaacctggatggcctcaggtgtgcccatggtcaccattatgcccagggcagagctggatgaagtagtcccaccctgtctgccttcatccctgaggagattcaacactgccccctagccaagggcaccaag

SEQ ID NO: 25730 - DNA, 1219 bp, Mus musculus
atcagaaaggccacgaccagcctcctaagggaaggggaatgccaccaaggttgcatgaagagggcactgttgacccaactctgaaaggattgaggggtgcatcgggcagaggccatgttctagaccctatttctgcttgcctggtccccattctggaggctgggcacacaccatctacttctctccacccttaccttaccctgttcagtttctgaagcggaaccccactcagcgaattgggggtggcctgggagatgctgctgatgtccaggtgagtctggttatgtcacagtgaactggggccggaggatgacgtggatatagcagggagataggcaaggggagtaattgacatattcccgggcgccctctaccctcagaggcacccctttttccggcacatcaattgggatgatctcttggcccgccgcgtggaccctcccttcaggccaagtctggtgagtatatgggggtcattttggccacatggcatgtggaggtcctgtcctttggagtcctttaattccccacacggattttcccacagcaatcagaagaggatgtgagccagtttgatgcacgattcacacggcagacgccggtagatagtccagatgacacagccctcagtgagagtgccaaccaagccttcctggtgagggcctgggggttatggggaccgaaggattgtagctagggattggagatgccagcatcacctggcctggcctcttccccacagggctttacatatgtggcaccttctgtcctggacagcatcaaagagggcttctccttccagcccaagctgcgttctcccagacgccttaacagcagtccccgcacccccatcaggtacccaggagcagggcaggcgtgtgcctggggcagggttccctagcatggactagtacctgtgggctactcggccaagctttcctttaaaggctggcctcaggcccctgctcagtgtgggaccccaggccctgtacatctgtaacagaggctgctaaagtggtagtttgtggacctacaacttgtgtgcccaagtagataaagtgcctcacctcccttccctgctgccagtattactgaccaggcccggaggctctgactcagccttgctttctcttgcagccccctcaagttctctccctttgaggggttccggcccagtcccggcccaccagagcccatggagccatctctacctccactc

SEQ ID NO: 25731 - DNA, 1196 bp, Mus musculus
actttgtagacctggttggccttgaactcactagagctcctgcctatctctgactcccaagtgatgggattaaaggcatgctccacccaccagtttggttgcactctttcctgttgtggcatgaggcatcctgtagtcaactcattaatctccttctgcccccccacccccgaggtctgctatctgtacttctaagtggtggtgtcatataaagtgagttccaggacagccaaggccacagagaaatggggccagtggggaagtaatggattctgtctccctgaacttaaggagcccagattagcggtgggaacagtggagctgtcccaccccagagctgggcacaggacagcacttggtttaaggaacactattcccactccaccacccccaggcctgtctccagacttgcaatccatggagcagattaggcgtattatgcggcccacagacgtgcctgaccagggcctactgtgtgatctcctgtggtctgaccctgacaaggatgttcaaggctggggcgagaatgaccgtggtgtctcctttacctttggggctgaggtggtagccaagttcctgcacaagcatgatttggacctcatctgcagagcacatcaggtgggctggtggcctggggcgggctgggggtgggggtggggtgcctaacttacagactaaaccgttcctgccctggcccaggttgtagaagatggctatgagttctttgccaagagacagttggtgacactcttctcagctcccaactactgtggagagtttgacaatgctggtgccatgatgagtgtggatgagaccctcatgtgttccttccaggtgggtgtggggaagaggctgcccaatagacgcctggctcaaccccaggaccctgatgagtgttttctcttccagatcctcaagcccgctgataagaataagggcaagtatgggcagttcagcggcctgaaccccggaggccggcccatcactccaccccgcaattctgccaaagccaagaaatagcctccatgtgctgcccttctgccccagatcgtttgtacagaaatcatgctgccatgggtcacactggcctctcaggcccacccgtcacggggaacacacagcgttaagtgtctttcctttattttttaaagaatcaatagcagcatctaatctcccagggctccctcccaccagca

SEQ ID NO: 25732 - DNA, 1186 bp, Mus musculus
tgtgatctcctgtggccccagcctggcccagcccccagggaggggcccgcttgcctcagctcctgctgccaccaacccagccactgtctagcacccctcccctgtccccactcccaccccctagggtccttgctcccagtatcttcctacagggaagaagagcaaccctcagcagccctcttgcccctccatggggtgaagccacactcagtgggtgtgtcacttcaggctctgtgggctgtgctcagtctgtggcccagcacccctgccctagaaaggggcaacacagggtactacttgaactttcctatcacagctcccatgccacagagggacagacccctgctgtcctgccctcttgccactggtgagagaaggcccttgtctcctcagactaggaggtctcccacagtgacagctcctgggtccttgttcaggaaaagcctgtgtgttaccactgcctcatcaggaggctgccattggcagtggctgctgctggcctccctgcaagtcccctcttcttcctgttgcgtgcctggactcaggagcatagaaaagacaattgtggattgggccacactggcctagcctgaacctagatccctaaccctgggctgggtgaggctcacctgcccaggaccacagtgggacagcctgggcaggtgggtggcacagcataagaacccagctggggccagccctccctgtcctggctggtcagtgtgcccccacccacactgtccagccccttagcccatgtcatgtcagtggccactgcccacaggtgccaccttgcccaccgcatgaccccttgtgccagtcgcgcagctgtgtgtggtgtcgcgccctctccccttgggggctgggtgggcacaccctcccctcttgtctactcactcctagggcgtttctttgccgatttttgaatgtgattttaaagagtggaaaatgagactatgcgtttttataaaaaatggtgcctgactcctcgctgtctcagactctttgtgcctggtgactatttttcagtcacttcagtctggggcctgaaaggggaggagcttagtaacccgtcctcccctccctggtggagtaattattccgctcgcctcccacataagcaggagtagccgtagtagttctcgtcagctgtcatggttggaatggctgggggtatactggtttc

SEQ ID NO: 25733 - DNA, 1198 bp, Mus musculus
cctcacccatgctgatgcccagccccgctctgtgcagtaccctcctccactgatccccccacgtggggaggtgaatgcagctgacgctttcgacattggctcctttgatgaggaggacacaaaaggaatcaaggtactgcacctgcttggctctgagccctgagcctgagcctgagcctgagcctgagcctgagcctgagcctgagcctgagcctgagcctgagcctgagcctgagcctgagcctgagcctgagcctgagcctgagcctgagcctgagcctgagcctgagcctgagcctgagcctgagcctgagcctgagcctgagcctgagccctgagcctagcctggtctggatgaccctttgcccctcctctgcccctgtgagatcctgtggctaccctgtgaactgtgggtcttacttcctcatcccccagtctccctggggatggtggttacaggtgaccatgcctagcttagggccctacacaggcctgtggctgataatgtcctggcaccctttgtctacccatgtatccctgccatgtccacctggtgaagttactggacagtgaccaggaactgtaccgcaacttccctctcaccatctctgagcggtggcaacaggaggtggcagagactgtctttgataccatcaatgctgaaacagaccggctggaggcacgaaagaaggccaaaaacaaacagctgggccacgaggagggtgaggacttacggcctgttttacactgcagaaatgaaaagcaggttctgctaagaaactgaccaagaccagctagaaagtggctgggtgagggtgggtgctgagcctgcatcccatgtcttgtacagactatgccctgggtaaggactgcatcgtgcatggctacatgtccaagatgggcaaccccttcctgacccagtggcagcggcgatacttctacttgttccccaaccggctcgagtggaggggtgaaggcgaggctccggtaagaaaaggttctggcgggacatggtgtgggccccagggtgggccccaggaccttccttcacagcctgctctgtcttctcaccctgcagcagagcctcctgaccatggaggagatccagtcagtggaagagacacagatcaaggaacgcaagtgtctcctgcttaagatccgaggtggcaagcagtttgtcctgcagtgtgatgtaagt

SEQ ID NO: 25734 - DNA, 1179 bp, Mus musculus
ggtggagttctacgaagaggtaagatgggcgaagtctactgagataaaggtgcgtaagcaccttgctgtgtctgaggcccctggcatctagcttcatgccgtggccacagacaatcatctataggtattccttctaccagatcaagaaatatgagaagctggagacagaggaggaacgtgtggtccgcagccgagagatctttgactcctatattatgaaagaactgctggcctgctcacatgtaagagtcctgtggggtgtgaactcatgtgttgatcccagcaacgtgggattagaaggaaagaaagagccttatataagattcacagccacctctgtcctctccagcccttttcaaagaatgctacggagcatgtccagggccacctggtgaagaagcaggtgcctccagatctcttccaggttcgtgctgggtgcttctcctcttgcccccattctgcccagatcaggccctcccgccttaagtcagctggggccctggagcctggggcaccgcagacttagtcaccaattcccagctctctccccacagccatacattgaggagatttgtcagaacctccgaggggacgtgttccagaagttcatagagaggtaagtaggagaagcagcctgccctggctctgagcagccaggtgtggggtctgtctctgtcccatcacagggactcttgagaggtcacatagatccaacgtcctcttctcccaccctgtatctccctgtgctatggagtgtcagggtctagcagggctgtacctgaagtacacgcttccctctgtggtgagaaccaccagtgtctaggcagaacgctaggaacagctctttcagtcaccgccacccagccatgggaggtacagcgggctgagtaggtgacatcactgggaatgtgagtgagcagcaggtgctgtaccctggtggaggtctgactggcgagcatttctctgattgcagcaggacaacatggttcaggctgcagaggcttgttggcctgagctaaccataggctcaggaggtctctatgtccacgtgtcaggaccctggaagggcagtgggtggatcggactctgatgacggcccagtgccttgatgcttgcttgagtgtgtcttctccttcttccccagtgacaagttcacacggttctgccagtggaagaatg

SEQ ID NO: 25735 - DNA, 1092 bp, Mus musculus
gttgcgtgtctctcctccgttaaactctcccggcttctgcaggaggagccaacagccctagaaacaccaggcctggcaggtctcaatggtgctgtgagttgtctgaagctttgctccatgtctgtcatagcccttttttcttgtccctgagcttgatgctgtccaacactcataatacagtccccattctgccatcaccccctaaacttttccactagtcacccacttgtcctttgttgcacttacttggggttatcaaaagctcttcagaggagctggaactctgcccctcccccccccccccgaaatgcccatatcattgctacccaggcatattctaagacaggcatcattaatactccccacccattgctgcccaccaactgcccttttccatttgtcctctttctgcctgagcagggcttttctagaatttgtgtcctcagaaggagcagcatgtttctccaggtgggggaaacagaagactggttgaatccccacctgcctctctaagccaggcttttctgggctctggtttagcatggccctctgagcccaggcctgtgtataacctagcagctcactgacctggtgccttttaaggggagtcctgattgaaaacctaccctctgcctgcagccttggaagtgtgtgtgcatgtgcctctgtgtgtctggctaagtgtgctgcacatatgtgcagggaaggaggggagcatgatggctcccactcctcatcgcccttcttcaagccccatcaagctgccccctttgactttgcattgaacggcctgtccaaagatcctctctctagggcagcagagagctttttgcactttagaaaaaaaaaaaaaatgaaagaaagaaaatggtcggaactgttctgggtcaatatttagagtatgaggagatgctcagcagaggcctgtggccagagtttgtcagtgatacatgcaaatttgcactctgctccccatctataggagattgataattgatagcacagccttgccccgccttctcttagccccaaacatatcccttcccacttcccaccccatttcctggaatctagcctcagactttcctaaac

SEQ ID NO: 25736 - DNA, 1218 bp, Mus musculus
tctgaggcagggtctcactctaactggtctgaaactcactatgtagtccagtctagcctgggactcactgagacccttctgctctccttatcagtacactgggggtagaggtgtgcaccaccccacccaactcctacagggttatttctgtttgtaactatgattttcagaaacattggtcttgtcatctataactttggacaaagcttttcctctttttgataaactagacaactagcgtttatcttctttgcattggtagatatggagttaaatgagttggagtctggaaatggtgatgaggaaggggtggacagagaagcccgacgcatgaacaataagcgatctgtgcttaccagccctgttgctaatggagtgaacctggattacgatggacttggcaaagcctgccgaagtcttccaagtctgaagaaaactttgtctggagactcatcctcagactctacccggggatcccacaatggccaagtttgggatccccaatgtagccctaaaaaggataggcaagtgcatctcacccattttgaacttgaaggtcttcgatgtcttgtagataagttagagtcactgccactgcacaagaagtgtgtccccacaggaatagaagacgaagatgctctgattgctgatgtaaaggtaagcagccattgacgtgtgcagaaaagtcaagtttcttgatttggagggagaaaaagtacaggtatggatgcttcaattacaaggaagttaattaatatgtgcctgtgtaagtaagtgctgcccagtgtttcaatttctagagtgacattgagtcactcttttggaaatgggaacatacatgtatctagtgttgatttaaacttagtgctaaaaacgaagcttaccactaagagtgttgggtggacagagcaggtaagatggctctgtgagtagacctgattgcctgagtataattcctggagatggtatatcaggtacattcatatatatttttatttttgttttctgaggcaggatctcactctaactggtctggaaccactatgtagaccagtctagcctgggactccctgagacccttctgctctccttatcagtcataagcatgggaaccttgctttagttcctagggcctgtattttttaaaaaagaacaaaaacaaaggcaaaagttaatgcagtggtgtccacctgtgaccctaacattcctaccgtgaga

SEQ ID NO: 25737 - DNA, 1178 bp, Mus musculus
accctaaatgtctctctctttctttttttaaaggtggatttcattgactgggtagataacatgtggccaaggcacttgaaagaaagtcagacagaatcaacaaatgccatcttagagatgcagtaccctaaagtgcaaaagtaagtgacttgttcttgtgcactttcctcagtgttctgtgaggtacagcattcattgataacaaggaataggctatcccttttgtagctttgctgtttttaatcatcaaattggtaagagtatgtgagaaattacatagcacatgatctcataataaaggggaaagattttatggtcctggaaatgtgacatagaactgaattcctttaagaagatatggtgtgtcatgcctggtttcagggccagcctactctagtagcaaattcaggacagccaggaaaccttgcctcaaaccttccaaaaaggaaagaaagataacctactagaagtttattagatgccaaatagaggggttcactaggaagagaatgtctttttggtgggcaggtctctttatcagtgtactaattaatgctgctgcttctctttgggtcaggtactgtctaatgagtgttcgaggctgctatactgacttccatgtggattttggaggtacttctgtttggtatcacatccaccaaggtggaaaggtatggtcatagtaggattggaattagaaatgatttgcatgcttaatatactctggaaacctcgtaacatagtactaggagacatcatccattctatgtgaagagaattgtagatggctaccttttgtagctattcaactggagtttagtaggccagtgtcattctaccaatatttggccagttcttaaagcaaaaggtttctaggtgaagctgaagagagttttaggaggacagtatcatttttgtatctgtaagaaaagtaatgtagaggaagagagcataagttttggatatattaaccaaaagtccagcaaattagaattcagccacctctccctgtctggaggtattgttatgaaatgtgaccaaagggagcattaagtctttttaaggattggaaaaagtgccttcaattataaaagagttacattctgataataataaaatatattctatctcctaatgagtttttctaaatagtatatcagaattacaatctagaatta

SEQ ID NO: 25738 - DNA, 1119 bp, Mus musculus
gtgtaacagatgcatggctgttgtggaacttcctttgtagaccaggctggcctcaaagccccagagatccacctgcctctgcctgccaagtgctgggattaaaggcatgtacacatgcacaacccttaattcatactcttgaaacagtctttaaaccgtcactgaaacagtatatatctcagtaagtcttttgtcttgcaagttacctggtccctgttgcttcatgtttgaaataaatactgacagtgatcatgtcagattgtagggttaagtgaggtattgaagaagagaaccagtacttgatagtgtagtaacatgatgagtattgttattctctgatgtggttatgattatccttctcaagtaatttccttctgtattactgattatcttaacacaggatgccttgttagtaactatggcttaaacttctttcatgtagggagtcgtcggatggtggatgtcatggatgtgaacacacagaaggggattgaaatgaccatggcacaatggacacgatactatgagactccagaggaagagcgagaaaaactctataatgttatcagcctagagtttagccacaccaggcttgagaatatggtgcagcggccttccacggttagtctttttcccacattctcatttatcttttttttctctcttgttctctctctctctcttccttcttccctccctctctctcttccttccttaaagcttattgatttgtgtgtatgtgcttcacatcatgaatccctgtcttgctcacctccccatctcctcataactgcccttcacccttgcaacttccttcttcctttctaaaataaaaaacaaacaaaataaaacatagaaaatatctcattgtggaagctgtagtatgtcacagtcacagtttgttctacagtatgtccctctgtccacacatcttcacttacaaatgtttattgcagcaagtcattggtctgtttcaagatctctggcttctgtgacaccatcaatattggatcctcaccaagacttttcccagctatcttgtctccctgtgtcgtagagatcctgcactattaatcagtaggactggccttttcatgaatcctaattgttagcagatga

SEQ ID NO: 25739 - DNA, 2046 bp, Mus musculus
tcaaacatgggtactggaaactgaaagagtagtatgcaactattaagcactgagctaattttccagccctgatttaagtgtttttaaatgtccttatactgaggagctatgataggtatttagtaggtttgagttggttttttactgtgaatttatatctctagacttaaagaggtagcagaaatcaaattcagctgagttttaggccactgtgatcttaagaattacagacaaacagggctacacaaagaaatcctatcttaaaaacaaacaaaacaaaacagaaacaaacaaaaaaaaaaccctataaacttcacaggttggaagcccagtggtttattacaactttgttttattttgtgcattttgagactatcagccaatctgagcttagagaaaggaacgtgaatgctttggactagcagctcagactggaagtcacattctctacgaggggagcactgactgcttggtagagaaaaggaaaagtgcatgatttttacctttgtatccttttttttttttcacagcgtggtaccatgcgtcgtcgctatgaagatgatggcatttcagatgatgaaattgaagggaaaagaacttttgacttggaagagaagctccaaaccaacaaatataatgccaattttgttacttttatggagggaaaaggtcagtatcattttgattcagaccctgaactccttgatgtaagagtcatcaacttgagattttagcaactgtgcaacgttaaaatatcacctgttgatgttaattttactcataatgctcattctctgccagatttgaagtaatcttttattagaacaagaaggttactgggaaaaacacctttttctgaattcttggcttgagtttaactaaaaatggcacaggtatgatggcacatgcctgtagtcattgcactttggagatagaaacagaaggatcaggaatggtctatgtataagttataatgtatgtataagtaatggtaagttaaggccagactctgctacatgaaactttggatagaaggagagggagaaagatatcaaaacaaaaaagtacaatgaaatttcttttatgatgttggattccttatgtgttatgtagccttgacccttaggaaactgtggaaaaattggacatataatgttcaaactattttagccattaagagacataatttctagttagaatgtatgaagtgactcattaacacaactacctacaagccctgatttttcagtatactttccatatttaataagagatgtaaaatattgtatgcacagagtaacaaacactataaatacctttttacttaaaatttccttcatagtttttttcaatgattcttctctttctaatttttccccatggtttcagattttaatgtagagtatatccagcggggtggcttgagagaccctctcattttcaagaattctgatggacttggaataaagtaagtgctctctggtcctaagcctgagatggttgtaaaatggcttttacacccgggaattcggacagtggcaaatttgagaccccagagcagtaggaaattgaggataatttcccagttactttgtgaagtatgactcttgtctcactggtgattcatatacctagaaataaaaactgtagatgaacttaaaaaccagttaagtctcttgagtctatcagtctgatagaattgctgctaacattgtgggatttcttcctataaaaatgtgtaatcatttatattttaaaagtatttaaacttaatggtgtttctggaaagtgcttcatactttccagatccacactgactggagaagaagtgcttcttatttactggtgtttatttcacaggatgccggatccagacttcacagtgaatgatgtcaaaatgtgtgtgggtaagtaacaaacttttggcctgcctcttcatctttgagggttaggaaccttaaaatatatgttttattagaaagaattgtttaattagcagctcagaattttccttaaaggacatttaaaaagaaaacagctgggcat

SEQ ID NO: 25740 - DNA, 1132 bp, Mus musculus
aaaccagagcatatcaaggtgaaaacaaacactgttggtgatttggtataggggaatagaaacaagtcttttgttctatgctggctcaaggtgattatttatttatttatttatttatttacccatcctgggaaaagtctggtataaagatctttaatcttaaaactataaggttttaagaatcagtgaacctatctataccttattgtaataggaatgaaaatttcaggaattcaacaagggctttctttaggaatataggaaagccaaacagcaatatttcttattctttttaattaactctgtgaccctttaatacagttagtgttgttgtgatccccccaccataattattttcattgctacttcataactaattttgctactgttttaaagcctaatgtaaatacatattctgatggttttatgtgacccttttgcaagggtcattcaactcccaaaggtattgctatacaggtttttaccgcagtaacctctctgggtcgctttactgtaatgtagctgagtgtggtgctttgaatgctaaatgtcctttgtagtctggaggtttgaattcttggtccccagttcgtgggagtatttgattaggtttagaaggtgttgctggagatgtgtcactagggcagtatttgagatttaaaataccatttctttttcttttttgttttttgagacagggtttctctgtagccctggctgacctggaactcactttgtagaccaggctggccttgaactcagaaatccacctctctctacctcccaagtgctgggattaaaggcatctgccaccactacccggcatgccatttcattttattctcttgctttcaatgccattttcaatgtgagcccttagctgtttgtgccatatctgctgtctgctgccacaattccctgtcatgataaggtcttatccctctggaaccaataagccaaaataaattattttgtaaggtgtcttggccatgatgttttttctcaacaataagaaagtaaccaaaacactctgttggtggagtgagaaaaggtgtggattctctggtttctctttatagtatacaaatctctgaccttttacatagttgacttcgtttttactaagtcatta

SEQ ID NO: 25741 - DNA, 1193 bp, Mus musculus
ttttcattgcattttatttattgtgtgctcatttgttccatgttgcggatatgaaggccatcagacaacttgggaaagtttgttctttccttctactgcatgggttttgaagattacaacttcagattgtcagctttggctaccatcttaatggacctggagtccaacaattagtctagtctgactagccagcaaatcccaagactgtttcttctttcccaacagtgggactataggtatcttctctgctaccactttgacctctagctttttgttatttgaagaggcttgttgaaatgttgggatacatgggtgtggagttggacgtgtgcatatgatacgggtctggagataccaggtattggtatcttttgtcttttcttactgagtcagttctcttcctaattgctactctagatagccacttgccctggagattccatctctgcttccggagcactgaaatcatgtctagtgtgcacacccagttttatgtgggtggtgggatccaaactctgatcttgttacttatctgtgggtttggaggattgaatttatgtctgcatcccagaccttgagatcctcttccttgacctcctgagactagtattacaggtgtgtatcaccacttgtaaatgcttggtttatgtggtaatcaaacacagggactcatgtatgctaagcaagcactcctttaactgagctacaaccccacccctaattaaccttggtggactttatttttttttcatctgttgaagagtgaagtgaaactaattaagtattagagttgtaatgcagtattccatatcttcttagctctgggctcaggccccagcaccacaaaacaaaggtgtggaaatagtgtaagtttttaaagctttttaacattgtagggcaaacttattatcctagtgtttatgccccaattatcacaatattgtttttattttactcttatcctgggtgtattctggccaaaccaaattaaattacctgcttaggtttttccacctctatgtaatattgttttctggttcctgttttagtgtcccccccccccccccatctctgtctctctctatatattgtagatgggctttctagccctatgtagtcttgactggcctttgaactcactttgtagatcccccccaccccccaaactcagagatctgtctgcctctgccttc

SEQ ID NO: 25742 - DNA, 1189 bp, Mus musculus
ctgtcctgtctgcaggagatgcacttccatcccaaggctttgaaggatgtgaagggccaaattggggccccgatgcctgggaaggtcatagacatcaaggtggcagcaggggacaaggtggctaagggccagcccctctgtgtgctcagcgccatgaagatggagactgtggtgacttcgcccatggagggcactatccgaaaggttcatgttaccaaggacatgactctggaaggcgacgacctcatcctagagattgagtgatcttactccagcctggcagcctggccgaccctaccccaagcctctcaacagaagctgtgcagccagggcaggcccaggccagccagtacctgagagtaggaaggccaggcccttgaggtcctgtcccatgggacagcacacacactacctgcaatggcctgcccattcccttcagctatttgtccttttcttactggcaggtagttgctcacatattcatctcttgccaaataagggcctgctcctcgtgggagaccacaggtgtacagtcggtggccttgtacctgggggaggtggcttagggcttctacctctgggggtagagggaagacctaattcacaggtcctgggaaatttgctcaataaaagtggccttcccttgccctccacactaggtcatgtacagtctaccgcaccctagtgacagtgtgggtgtatttctctcaaactcccatgggatctaggccagatctgctgctttttttttctttttctttaaacttcctagaccttggtaaagtaggccccgcaagcctgtctgtctagtgttcacggggtgcttggtagagcaggccactgcctaccacccctcacctccctaccacccctcacctcccaaccaccagcctcacaggctagaggagacaagagctccttagggaggcaggcgcatgactgtgagtgccactagtaaatgactacatgtccattttccatcaccagtttcagggagtgggtttcagaacaaccttaaatgtaggggacttaaaaggatattcacaaatttttaaaaaggcaaaggaaaacaaaccattcttgaagtgtggtgggcaggtaagagtggaggtgcttgggagagtccttaccactttcagggctgtgacctttgtcctggattcctccagggactgggtgaagcagaggg

SEQ ID NO: 25743 - DNA, 1145 bp, Mus musculus
ttgatgccattcaggccagaattctcgattcctaagtttaacacagatcactttcaacctcatatggccagtcagctccaacctgaatctactctctaggctgcacatctcgtactagtgattttcagtgtcccttataccctgggtagaacagctcaacttgattttagaaccctatccccagggctaggcctgaaccttggttcctcctaccacaactttggctggtggaacagacatgaagtagaaagccatgtgagaagagagagacttcagctctgctgtcccccagctctgcctgactcagacctgaattcccaccttcaggtccagcaagttcaagatgatggccaaaggctacagaaggcctatgctggagacaaggctgaggaaattggccgtcacatgcaggcagtggctgaggcctgggcccagctccagggaagttctgctgcccgccgacagctgttactggataccacggacaaattccgattctttaaggctgtccgagagttgatgctgtggatggatgggattaacctgcagatggatgcccaggagcggccccggtgagacccatagtgcctggtgtccttcacaagttgtatgatgctactggtggctgtggtggggctgggacagcctgtaataccacctttgtcttggcccagggatgtgtcctctgcagatttagtcatcaaaaaccaacaaggaatcaaagcagagatagaggccagagcagacaggttctcctcctgcattgacatggggcaggagctgctggcccggagccactatgctgctgaggaggtaggcaagacctggagagaatctggctagatgcacctaacagggcccatgcctgtaatttctgttcattttgtttatttgtgaattattgtttgtttgcttaagacaggggctcgccatgtagctcaggctggtcacggttctcttactctatcctgccaagtgctttgacattgcccatcttctgctttttgtcattctctcttagcaagaattctttcactctctcctcccgatgctgtccatagatttctaaaacctcacttctcctcccaggactgttttcctcccctctcgacgttaagttaaaagtcatcgctgtattttggtgg

SEQ ID NO: 25744 - DNA, 1329 bp, Mus musculus
tttctaaaatgaaaacctcactctctttttctacctcctcccatcatatttcccctctgtctgctacaggctgccccaagtcagtccttgtgtatgagctgatgtctccctgtcccctgcaggcagagatgagctcatggctgagagtggtgaatgcagccattgccactgcatcctctgcccctggagagtcagaagagccagtggtgcccagtgccagccggggtctgacccgggccatgaccatgcccccagtgtcacagcctgagggttccatcgtgcttcgaagcaaggatggcagagaaagagagcgagaaaaacgattcagcttctttaagaagaacaagtagtcggggcaagactcccaggccagctccctccctctgttcagaaaactgccagggactgtcgacagagaccaccctcttggcaggacaactgcctgctgctagggtctgctgctaaggtcaacccatcaccaggaactgtcactggggacaaaagagtgttcccacaaccttctcttctgctatttaattcaactggtggtgggacccaggctacccctaataccacccattcctaccttgtcacctcttcccaagccttatacctccacccatccccccaccatggtgcagatagtgccaccctcaacgtgggctatgtgggaaccattgtccctgcctcagggtcattgtgccaccacagctagggtgtgccatccaccattcagttctttgcctctgggatcagccaggaccctcagagctgaagcaggcaggacctgagggcaggagcgccagatgatgaagtcggaggcgctgaagccttccctgcctatcctgcctcaccctctgactcaaggggctgcttgtttccagccactctaggtggctcccaagtgtgagttgttcaggagtagccacatccttgagcctatccaaggaggtgattaaacagctcgacttctctcactgcctctgggtgttgttgctttcctgaccgtagcctctcctggtctcctgcatgtcagatagccactgtacgcccagcttctgagcccccacaaactgtgtgatcctgagagcctccctgcccagtctccccatgatagtgatctgtttcactgggctgacctatgctaagcctctgtttaaaccaaagacatccactgtgggttgggctgatgataattaacagtattcatgatcaaaggaagcaagtcactctccctggtgcacacttttttgttaaatttcttgccgtgcatgcaaggcaagcactctaaactacaactcctcgctaattttcctcactcccaagtgt

SEQ ID NO: 25745 - DNA, 1202 bp, Mus musculus
acccaagctacttggaaacatttctttaccaaatccatgtttcccactcatttcagaaggcattgtctaattgtaattacacatttttaaaattaattttttttggtttgtttttcgagatggggttttctggcagtcttggctgtcctggaacctcctcgggatctgctatcacctaaccttgtacattgtattttgggatctcttcccaaatttgtgggggctccacaactaatgctctactaacagttcccatttttttcttttttaagatttatttatttatttattatatgtaagtacactgtagctgtcctcagacacttcagaagagagagtcagatctcgctatggatggttatgagccaccatgtggttgctgagatttgaactcctgaccttcggaagagcagtccggtgctcttacccactgagccatctcaccagcccagttcccatttttctatacaatttcatttcaccccctttctccctccctgcctcttttagacatggcttttctgtgtagtcaaggctgtccaagaactggctgtgtaatccagactagccttgaactcacactcctacctcagcctcccaagtgctggttaattacaggtgtgtgatatcatttctagcctccagttttatcgttttttattatgtgagttgggtggtgatgagcacattcaggcggctctgtgagttggaggccagcctggtctaagagcaacttccagaacactaagggctacagagagaagcaatgtctcaaacaaacagacaaaacaaaaccccataccccaagacaaccaaaccaaaccaaaccctaacatgtgtaagtagtaccaagttcccagaaaaaaagaaaaaaagaaaaaagccctgctagaatatcctccacttggaacacagaggcactatgtttgtctgttctgtttttcctgtcattaccaaggtctggtagtaacttttctaatttttgtcagttgaaaaggtgtaaagttttattcacaactcgacgtagtttgtttttgtcttgtttctaatgaatttcaaaataccttgttcttatcatttgtgcgaatgtacatttcctgctttccgtcttctgtctggattttaggtctcagcctttgggttgagctgtcgagttttcctcatattgtagctatttctacttggttcagatatcttgtcat

SEQ ID NO: 25746 - DNA, 1190 bp, Mus musculus
agtgtgccttaatttcctttagttcttctatatctaacatgcttaattggcttcaggaatacggcaatgtgggatgaattttacaatgtaaggactattgataccaaacttagaaaaatcaatagtacagaatttagtatagagcgttattattagtacagtatagtccaatctgttccacccatggtgtggaaaagggaaggaaaatgacttttagttacagacttcaactaaactagaacattgtgatatatttaaagacttgttaatacagacaagacattttttgctggtgggtagagaggtagggtgatggctgcaagtttgaaaccggcagcctggttctccatagcaggtttcagggctacatagcaacatcctggggggggggggggagaaacatcaaagattttaatttaaagttagagaggcagtgtaagaattaaaatggaatgaaaaggtcccaacagaattctagcatggcacatctgtggagtatgagtggcccagagggaaaaggaaacatctgagtatagtatagccataatcctggctagtcatgagcatgaggcaggcaagagaaccacacatttgataacaggctatgcaacttttttaagaccccttttcagagtttgggattgtaatgcagttgtgaagggctctcacagtatacaagcccagaactgtcaaaattaaactttggcatttgccttgagtctgtccattcaagactagcctgggtaatatactgagagcttgtctcaggaaaaaatgatgtatgggatgaagtgacttttactgtattttcagtccttagaatgtgattttcacactgtatctgaatctctactagcataaaatggtgtgccttaaaaattatttttgccacatatagtggatatatgcctataatctagcattggggcatggaggctggaggatcaggttttcaaggttatccttagtgaacaatgagttccaggccagtccaagacctgtctgggaggtgaggggggaatgagcagtgctgttttgtatttaagaaggctaatttacatcagcctctttttgaaattctgaccatcagccaaaataactactactggagctgggattgcgggtcagggtttcacttgaatgaaatcagtccattctcatctgctgggttagtaatgttactgtataaa

SEQ ID NO: 25747 - DNA, 1388 bp, Mus musculus
cttttacaagttgacgtataaactttcaaacatgttcagtgtccttagcaataattcttatattgaaacatcctgtcaaactgtttgctgactctttactccaggggctaattggaactttctgtttttttggtttgtttgattttgttttttctattttctctgatgagtttgtggaattaccttattttgggaatgctaatattgttaacattgaaagtaatagaatgtcttcctactatcatgaaagatttgctgtttaattttggagaaaggcctttgttggggactgtttagccttcccagtgattctctcaccttcaagctgttttcatttttagaaattgttgatactagggaagggaacaataaacttaaaagtgagttatcaaggtatgattttgtgagatgttctttgaagttctaagtgggaaagccctttgagctttgctgtaaagcccctgtactgtgctctctttcaggtgggatgtgtgtgggctgaaatcccaagctgcggttgtgcatgagaatacacccttcgtggtgccccatctccgggacgttctcggctctgtgcattcagtccccaggaaccgtggaccttaatttaccttgttaagttctttctctttcctattctctctcctgctcaatttcctgttctcctgtttgctcttctgtagcttcccctttgagttctgctctcccagcatgcctcctatgcagaaaccggtggggctgtgctgtctcctcccttcctcctgactgcagtcagtgggtattggatttgggagtgaccttgttgagaatcactgctcctagttttctattttggcccaaagactagacttagaaatttggagcaccttccagtgaaataaatggtttttcaaattagggtatgtgtgctttgagaaagttcttgtttgggcttgtttctgggttctttatttatttgtaccctgaacagaagatgggggagtgtttaaagtttaagctacttagcttttggctaacactgaggtttttaaattttgctttttaaaatagtagatgactttaggtactaaattaaaaaaagaggttctacagaactcaagtaggcatctctgtttcaatgaagacatctcctactggtctacttctgttgaagccagttagctagtggtttagagctgtagatctttacttgctggagaattaatcattgtgtatacttgcatctgctgttaacactcagtaaacatatctcccttgacttattttcaggaaaaaggtgaaggtttgaggaagaagaggtagctttcatctttgggaaaaatgaaggtatggctcccacagagttatttagctactccataggccagaactacctcatgatgcacttc

SEQ ID NO: 25748 - DNA, 1569 bp, Mus musculus
cccgatcattcctaagtgatggtaactgattttggggtgttgatgcataacagtggctcagaatttttttttcctgtttaatggaatcagtcttgatatagaagttgagagattggagcattctagtttgagtttcttttgtattgggccactgggataggtatttgtccagtcggcagtggatgaaatctcttctgtgtaggagtagaattcttagtaagctggtgttagtgattataatatttcttcttcatctgcttgatctttgcttgaaataaggtcatttataccaagtccatattttggaatttcccctcccccaatgaaagtctttttgtcaatttgccccaaaccaagagttgtttaggtgaccagtgactggggtagaggtctgggctattactttgtgatagcaacccttcttgcgtctgtttcttcaaggcaaacgaatgcacgtgcagttgtccaccagccggcttaggaccgcgcccgggatgggagaccagagcggctgctatcggtgcgggaaagaggggcactggtccaaagagtgtccaatagatcgttcgggccgcgtggcagacttgaccgagcaatataatgagcaatatggagcagtgcgtacgccttacaccatgagttatggggattcattgtattacaacaacacgtacggagcgctcgatgcctactacaagcgctgccgtgctgcccggtcctatgaggcagtggcagctgcagctgcctctgcgtatagtaactatgcagagcagactttgtctcagctgccacaagtccagaacacagccatggccagtcacctcacctccacctctctcgatccctacaatagacatctgttgccgccttcaggagctgcagcagcagcagcagctgctgctgcttgtactgcagcttctacttcatattacgggcgggatcggagccccctgcgtcgcgctacaggcccagtcctcactgttggagagggctacggttacgggcatgacagtgagttgtcccaagcttcagcagctgctcggaattccctgtacgacatggcccggtatgagcgggagcagtatgcggatcgggcgcggtactcagccttttaaagtttgaggtgagagtgggggggtgtcacctgttggttttgccatccctcctgtggcctaaaaggttccaattacgctgctttgcttgctgctgctgcagggctagagtgaggttactaacatggttcagtctacagacacatctttaaatgctgaagtttgaggtaaacatcctttgctcttgtgtctattttttccatggcttttaatagtgggggtcattctcattgtaattgtgtctgtaagaacaaacagtggtatactggtgaatcttgggtcaaacctgcatgtggtaatttgatctgggatccagatattcagacttggttaggtgtactccttctcagagtctgtagaatttcttcgctgtgcggcattagtttttttcgagttgctgtgatccattatgctgtgaaagggtctgaccactaagaaaaagcttgtaattagttaa

SEQ ID NO: 25749 - DNA, 1232 bp, Mus musculus
tagagttttaaaattacataaagatacttataattttggtaacttgagactcagaaggactacattggaaagtgggggttgctttttaagtaggggcgggagcttggctatcgccgggaggtctgggtaggttgactgatgcaatatccacgttgcggggcgtggtgacgctcagctagggaccggtgcggaattgtggtgacagaacttgaattttgtcaggatgtgcacgtgtaagtgacaaaatgtgaaagcttaacaaagttgggagccacgaagctacaggttgccccactgacgcacggcaccttgttcattctgcctaatggctggccgcgctttgaagaattccgcgtttctagctccaccttcagatggacctcttgcccaatcagtggcttcagtttcactaggctgggtgctcattggctttcatataaaaggtccaggttactgacgtttccacctcttcctggcctctcaggtaattggcgttccgggtaaccaatcaggaagaggatctccgggaacgccagccttttactttaccgaacggccaatccggtgggtaggttcacccctctttctacccagagtcactgctgtggccgccgccattttagcgttttgtcagaaccgtccgcgctgcaaggaggaggacctgcaggtatccatgcggtgagatactccacgttcttccactgtgttcttttctctgttaaaaaaacttacctgactccggtgggtgtcagggttggcatagtggggttgcggtctgcgcacccgtccctgagagccgacatcggtcctcgacttagtgcggtaagcctgaaacaaccttcctccaagtcctcgttctctactcccggaatagctttcttttgtccaccttaccctctgctttgctcaatcttctttggggtttccacctagataaatcttagatttaggctggagaatctgtcatgccctgggcattgttggcttcctcaccaaactgtagcaccagtctttgaccagttcttctgtaggagcctgtaatgacatgccccacccccacccccaccccagaggactcctcctactcgggcattttctatatttccctgctttttatctggttgatcccggaactcactactccgagtgaaattcccacttttccggaaatggttgctaagagaggaagagctaatttgaagtaattataattagcaagtctagtagttaga

SEQ ID NO: 25750 - DNA, 1067 bp, Mus musculus
ttggaaatccgcctgcctctgcctcccaagtgctgggattaaaggtgtgcgccaacaggcctggcctgaataatgtattctgaataggtagagacaataaagccagtctatctggagggctggtaataactaaggagactggatgggtaggtttgttagaccacgaagcttggatccccgtccccggtttttcctttagaccaagtcacactatataggcctggcaagcttgggacttgctgtatagaccgtctggcatttaactccagcggtggtattgtctggagactatttccacttggggattggtcacagggtgagggctgtctgtctgtctgcacactgtggggatagtggttcccttggcttgttagcaggctcttccccttcagaccgggagccagtccagtttagtggagtgaattggtcttgtttgctactgtaaccccaacctccaggaattttggcataagaaagatgattaaactgagagaaaatgatttctataccctatgcatttctgggtgcatattgagatgtggctgtgcattttagatcccctctgaaagggcctgtgcaggacagcagaacttgtattacagatctcaggtggcttttactcagtctcaggtgctgcagaatgaagccatggccatatttaatgtcatattgttactttttaaggggcctatttcctagccttaaattatagactaattttctgctatagaatccagtagcttattttctgtctctgccttttgtttgactttttctttcttttgtggcagttttgggaggtagtatgctctatttgttattttactcccaatcatcctgttctcatgaagttccccctgctttctgcctgttcacctttaagttctccattcagcacctttcccggttatctccatcttaagaagctgcgttgcagagggtcatgactaaagttgcttgctcaatgagtatgggattatgtgaagcagccagtgggtgagaaaaatgtgatgagggaatttggaccctgtgaagaatgttcgtttgtacttgtttacagctgattg

SEQ ID NO: 25751 - DNA, 1102 bp, Mus musculus
ttctaattcctgtactgtacacaaccctcccaccccgcagcttgtcaaaagtccttgcacatctgctggtccttcaggcattttgtctatcaagccaagtcagtggacaacagaacagcatgactgcataaagtcatagtgaaaacaccttccctagatttatgcactagttttattttattattatttttattatttgtttatttatttatttgagatctgtctgtgtaacagtactggttatcctggaatttaccatttagaccagattggcctcaaactcacaagagatctgcctgcctctgccttccgagtgctgggattaaaggtgcaagcctccactcctggacggagtaatgttctttcatagaagacagcacatggggagctagatagttacctaaattctatttttaaatgatgttaaatgagagtttccagaagaaaatttcttacaagtgatttctggtctaactctgagtcatttgaaactgtgtgggaagcttgagatggcagtactgggaactcagtcttgtttaacctagagaaaaacttgagacttgcctctggcttgctgaatttgaatgctggctctctgctgcctcttcgctgtgtgactattggccagtcaggacttctgcctcattttgtcaaccagcatttttttttctgtctaagtttgtgagacagggtatcattatgtagcagtggctggcctggaatccaatgtgtggatcaggctcacctcatactcagctgtttgcctgcctctgtctggtgagtgctgtaattaaaggtatgcaccaccataatcagccttttctttgtcatactatattttattttattaagacagggtcttctgtgtcaagttggtcggtgtcccaactccatatgtagctgaagatgaccttgaaatccatctttctgtcttcatatcccaagtgctagtattgttggcaatccaccatgtccagtgtatgtggtgttcaggattggaatgactaggcctcctgcatgttaggaagcactctgccaaccgaattgtagccttccttatctgacaatgatcatggttctaagtgctgcttaaaagtcgtct

SEQ ID NO: 25752 - DNA, 2588 bp, Mus musculus
aagggagagagaggaagaggtagggtagggtgcagacccaggttatcaccaccctctctcatacctctcccaatggtggcttttcattccctccctctatcatgtgggccttccccaggagaggacccttttgtgtttggcagtaacctgctttgtttctttgcctcagcagcacatcttgctactggctttagatctgtggttttccctctacccagccatctccccagaatgggaatttcttttatattttaatttttttcctggctcccttttatttttgtgcgcgatacttaaggttgtttggaggtgatacaaccgacagctgatgtcaggcggcgcgtttttctttttagatgcgagggaggccaggaaagggttactttagctatttcctctgtgcccagctatgccagcagtccaggggccctgcctgtccttctgtagaggctgttgagactgagatcctgtgggacagtcagttggtccgtgtccaaatccccgcttaccactgatgttttagctgatggtgactggcatagtcccaattccctatctctccaagtaggtggtgttagaaatcttaattcttttcccttcttttgtatggactacaaataaaacttggggcgattcgtggtttggaaacctggttgtcattgtcttgattgcactgtcaggtgagccagtttgacatccaggaagacgtgacagctagaagaaaggcagcctgaagacccagagtgggtgtggaagggtgcttgagtgtggggattggaatggtttcctggcgaccaatggaattaagctcatcttaaatagcatgccatctttgggactagagagttcagatcaagtggttggactttctcagcaatcaattttagttgatcacgtcaaatttcagtaaacatgcccattacctctacttatgtttgaccaatgtccctgatttttttcccagttcaggaaaaacaaaaataaaccaaaagctacacagtacagcaggatggttctggctgcgatctggctgggctgggtactgggtactggcagctgcaaaggcctccaggtagtgggcttgaggggatgttgagcctggggtctgggaaaggagctgtagtggtgtgggagtgacaccactatctggtactgccctgtggttggaggaatgagggcattgggaatttgaagcatatggggtgttctggccaatcctcgtacttcgcctgttgaacttcaccacggagcatccttcctgtttcctgccaagctaagccatcacagcacctgagactccttttccctgtctgcatctattacggtttttagatgtcttctggctgggtttatatttgaaggtgttataacagacatatttttgagaaggggctggggtacaaatattatcaagtagggatgctaagattggatgaagagtccagagttctttatatacttctggggtggaagacctgggtagtttcaaccaggaataaaatggaggcatgaacttggtgggtaaatgaaagaagactagataagtggaacgataactgaaacctgatagtccttggggaagaatgctttagagcgcttttgggtcttgcaaaagggagagtgtgtgtgtgtgtgcttgtatgtgtaagtgcatgtatgtatgtatgtgtgtatatatatatatatatatatacacacatttacatacatatatgtgtgtgtgtgcacgcagctgataagttgattgggagggttgtatattggcttcatatgaacttggctgtgacagtagcttgccccagatgtcttcttccttctgcccatcatgtaaaaatgccttattattacgagttctttttttgtggttaagtgggataagtctcaggctgtgtaggggtcagagttcttttattttcttctctttctgctcatcgcctccccttcaggtgctttgctgctcattttcattcttttgcaggactgggtagaatgggaggataggtttcttgatactttctctgtgatggtagaatgacttgagggccaaggtacaggcttggcgtgactgggggaatagagggttgaatgcaggctgagatcgtggcttttgtatttacagtattcctttgtcgttttcctttccagttcttgttctgccacagtcacaattccatggttcctgcaaaaacccaaacaccaccaccaaacaaactaaatccctcccactcccaaaaccagctcaatacacttccagggcctgtgctgaccttcattgcagtccaaactcttcaaggcggtttggcctattgaatcggtctaatggtcggccatctgtagatccacatgcattgttgcctcagcccttggggttttcactaaagccagaagaaactacacagctaaatcatttgccactttcctttctcttgcagattgtttaaaaacatccttttatttaaattaccaacctgtgttaattctataacccaatcatactttgctttttatagatttctgagttccaagttcttaaaagttggctttggtgaatgggaggacagaaatgtaatgagtgttttggggaaccg

SEQ ID NO: 25753 - DNA, 2117 bp, Mus musculus
gacctggatgtagctggcaacagctgggtgctgttgtgtgtccagtttgggacccactaggtagcatgccctgcccccctaattgctaaccctctgtctgctgctttatcagactacgcgtttgttcacatggagaaggaagcagatgccaaagccgccatcgcgcagctcaacggcaaagaagtgaagggcaagcgcatcaacgtggaactctcaaccaaggggcagaagaaggggcctgccctggctatccagtctggggacaagaccaagaaaccaggggctggggacacagcattccctggaactggtggcttctctgccaccttcgactaccagcaggcttttggcaacagcactggtggctttgatgggcaagcccgtcagcccacaccaccattctttggtcgcgaccgcagccccctgcgccgttcacctcctcgagcctcttatgtggcgcctctgacggcccagccagccacctaccgggcccaaccctcagtgtctctgggagctgcatatagggcccagccttccgcctctttgggtgttggctatcggactcagcccatggcagctcaggcagcttcttaccgtgctcagccctctgtctcccttggggccccatacaggggtcagctggctagccctagttcccagtctgctgcagcttcctcgcttggcccatatggtggagtccagccctcagcctcagccctttccacttatgggggtcaggcagctgcagcttcttcgcttaattcctatggggctcagggctcctcccttgcttcctatggtaaccagccatcctcttatggcgcccaggctgcctcttcgtatggggttcgtgcggctgcttcttcctataacacacaaggagcagcttcttccctaggttcctatggggctcaagcagcctcctatggtgcccagtctgcagcctcctcactagcttatggagcccaggcagcgtcttacagtgcccagccctcagcctcttacagtgcccagtctgccccatatgctgcacaacaggctgcttcttattcttcccagcctgctgcttatgtggcacaaccagccacagctgctgcctatgctagccagccagctgcctatgctgcacaagccactaccccaatggctggttcctatggggctcaaccagttgttcagacccagctgaatagctatggggctcaagcatctattggcctgtcaggctcatatggagctcagtctgctgctgcggccactggctcctatggggcggcagctgcttacggggctcagccttctgccaccctggcagctccttaccgcactcagtcatcagcctcattggctgcttcctatgctgcccagcagcatccccaggctgctgcctcctaccgtggccagccgggcagtgcctacgatgggacaggccagccatcagcagcctacctgtctatgtcccagggggccgttgccaacgccaacagcaccccgccgccctatgagcgtacccgcctctccccaccccgggccagctacgacgatccctacaaaaaggctgtcgccatgtcaaaaaggtactgtatgccccccccgcctcagcccctagctggggcttagggcaaggggctgaggttggcatgggagggaaacaggagccattggcccctcccttgatcttacttctatgggatgtccaaaagtcatgagggtgagtgtctgaacagttctggccattgggatttaggtggggcatagtgctcagcctggggtgataccaacaaacttagggtcctcattctaggaggcccctatgaaccgatggagccacattttgcaggattggctcatagatttttcccactgtctgaaggatccttaaactcactcctttgttctggttttggtgggatggatgtgaaagaaagtagtccttttggcactcactggctgaaggcaagcttatgaggtgcgtccaccctgggaagttggggaccctactttcgtccgtcgttctgttgataaaccaaggtctttttgtgcagggcccatgagtgggaatagcttgtttgggaatgtagaccagactcaccttggctggtttggaagggagcttc

SEQ ID NO: 25754 - DNA, 1129 bp, Mus musculus
ttccaaatccaagggatcccacaccgtcttctggcttccacaggcgcccatccacaatgtgtggcacacatatctagaaacatagacatatgaagaaaataaaaataactcggtagagctgggcattgtggtacatatttttagtcctagcatttgggagacaacagaaagcggagcgctgtgggctcaaatctagcctgatccacatggtgagtgagttctaggccaaccgaggatgagaacttgtctcaaaacagtttttaaagaaaatactctagaataaaacagaactaagcaccaccaccagtagagtgcacagaaataagacacactggtgctgaatatttcatagcctgtgtgtgtctgtccttcctttcctttatgtttttttttgagacagggtttctctgtgtagccctggctgttctggaactcactctgtagaccatgctggcctcaaactcagaaatttgcctgcctctgcctcccaagtgctgaaatgaaaggtgtgtgcactacgtgtttcttttctttttaattaactaattaattaacatctcaaacactggctcccccttcgtggtacccctctcacagagtcccttcccctcccctcttcctttctcctgtgagagtgtgcccgcttccctgtatcccccacccctggcacatcatttctgccagattaggcacatcctctccaactgaggccaggcagggcatctctgttggcgaattgataccacagtcaggctacagctttagggagagtctttgccccagtcgttaggggacccacatggagactgagctgcatgtctgctacataatgtgccgagggcctcgttccaacctgtgtgtgctctttggttggtagctcagtctctgagtgttcccgagggtctaggttagttgactctgttgggctttctgggggggttcctatcccttgcctatgtttcttaatgcatctaactcatcttttaggcttttaacagctcttttcttttctaatggtcaaagcaccccctctctgctctgaggtgggatagacctgtccttttgaatggtccattgcacagcgtcacacttctgctcagtgtgtaagtgatgttgccttgaatttaat

SEQ ID NO: 25755 - DNA, 1202 bp, Mus musculus
tctttcccacaccctctcatccctagatgtgtcatcactagtctgaggagatttcctcagaggggtaccggggccctggggttatgtaaggagcatgtgatctcatgtctgtgggatgctcggcagtcctctatctgggagaacgtgagtaagtcataaacagacgtctacttattccccaggagggctggagacagaggatgactacggctaccagggccatgttcagacctgcaacttctcagcacagatggcaaaagtctacatcaatgattcagtggagctgagccggaatgaaaatagtgagtgggggtccctgtaggtgggtccaggtcgatactgctgggccaaggtaccactggcactgccttcccctttcagagatagcagcctggctggcccagaaaggacctatctcagttgccattaacgccttcggcatgcaggtgaggtcctgacctctctgtccctccccatctcgccagtgccttcctcccttctccttgacgctggccccctgcttcgttttcttctcagttctatcgccacgggattgctcacccattccggcccctctgcagcccttggttcatcgaccatgctgtgttgctggtgggctatggcaaccgtgagttccgctggcctcctgcttcccttccgtctacctcaggccccagtcagaggctagatagcagcctcttaggccttctgagggggatcaccctggtcatgcctgagaaccttgtcctgaaccccagcctcagaaaaacacccgtgtattttgtaggcagagaagctggggctgggggaggttggagggttgttctagaggcaactggacaagtgctttctctaagccttgtatgtacatgaggtctccatgaggatggtaggtgggccttacaggcgctgctgttttcgtacttcttgttacaccataggcccactgacgatatttaaagggtgcagtgtatgaatctctgagtggagaagggtctctgacttcttgtactccatcttgttccccaggctctaacattccttactgggccatcaagaacagctggggcagtgactggggtgaggaggtgagttttgcccggttggcctctgacccccctccagcctctcccttacccaagccctctaaccaagcccactgtcttgcagggttactactacttgtaccgtggatctggagc

SEQ ID NO: 25756 - DNA, 1195 bp, Mus musculus
gagggaattgccacaggcaaatggctacttctttctgcctagcatgaaggactccctaaagccaaactgaatgttgtcttgggaagagaatatcttgtcactggggtgatataagccaagtatgaaaaatccccaggaggggacatgaggagcaagacctctttcctttagcatgtatggacacagtgcctgatgtctatctctgcagggagaagtggagtttgctcgaatcatgaccatggtggaccccaatgcagctggggttgtgaccttccaagccttcattgacttcatgacccgagagactgccgagacagacacggctgaacaagtggtagcctccttcaaaatcctggcaggagacaaggtgaatctcactcggtggaggggctgcaaggctaggacatgacccaagacccatggtcccttaatgtctcctcttttctagaactacattaccccagaggagctgcggagagagctcccagccgagcaggctgagtactgcatccgtcggatggcgccctacaagggatctggggctccatctggagctctggactacgtggctttctctagtgccctctatggagagagtgacctctgacattctccgtggaaaaggagagggggcacttcctgtggtggattcagctgtccctcagggccaggccttcaggtcatccagtgccatgcttctgaataaagatcaggctgtgggcctctcccatctgtttttgttttgtttttgttgttgttttagatttattttatatgagtatattatcactgtcttatcactgtcttcagacacaccagaagagggcattggatcccattaccaatggatgtgagccaccatgtgattgatgggaattgaactcctcaggacctctggaaaagcactcagcttttggttcttaaggggaacctgagccctggaggtccttggtgggccgtctaccccaccctgacccaccagggatccctaaggaccccccttttccttcagagactaagcacttacaccacacaaggagagcaggctacctctttattgcccttagagaaggccggtcacaactttcctggatgtggaaagggaccagaaaactgacagcatcagaccgaggagcaccaaagcaaaaagacagagcctgctgaggacagatctagttttatgacgagcatattt

SEQ ID NO: 25757 - DNA, 1467 bp, Mus musculus
caagagccactcgtactctaaccccctgagctatcactccagccctgacagagtgcttttatcagtcatttttattagtgattgttggggttatgttggctttgttgagaccaggatttcctaggctagccttaaaattaataatccttttcccccagttccttgagtgctgggattatggtgtgtgctaccatgccagacatgatttaaatcttgacttgagggaaggatgaggtcaagtggcaattcatttaagtctaagtctccccccatgtaattctgccttcctggcagggttattctgatgtaggtaattagataactatcctgaacattgacagtttgtgccggagctcgctcagaactcgccgcccctaactacatctttctgtgctgctgttttctctccatcccccaggctcagaagtacaacttgtggagtatgaggcctcagccgctggtctcatccgctccttctgtgagcggtttcccgaggatgggcccgagttggaggaggttcttatccagctggctgcagcagatgcccgattctggaggaaccaggcccaggaggccccacctggccaggcttgagaagatctgtgtggtctctcccctctttgtcaaaccagggctgtcagtagctctgagttgtgtgtgattaggagtcaggggagggaggggcaggagcttggactttggtgctacctcagctgagggtggtgatgcgaaccccttccatttgtcagcactttgcagtttaccgtatgtcctcagtttctggatctgcactgccatctatggccggagctcaacagggtgcctagtccggttttccacatgggaaggtggcaattctgagaagtgactgttctagacccggcaggtggcatgtgacagagccagggctcaaagcattctcaccaaatccagcgctcttcgtgtattacttttatagccagaaaaataaatatgacgaccaccatctctgcagtgtatgtttctttctcttccagttcaaagccaggggagggcacactacatcactttaggcttccaatccacaataagattttgaatatcatttccaaaggaatgcacaaactcacaacgtgttccggagctcttctttgtgacatatttcttaagatttgtgtgttcgtgtgcattttcttcatgggtgtggtggtggtagcagagaccagaagaccccatcagatgccctggaactacggttacagaattgtgagctgccatgtgggtgctgagcagtccagggtcctctgcaagagcagcaagcactcttgtactttcaaatgtttccggagccaaagaaccgtaacacactaacatgagatcctcacccattaatttgtttctcagtctagtcttaatccctaaaaagcgctcctccccaggcctcaaagcccaggcccctgtctttaatgcagaaaccataagtcaaca

SEQ ID NO: 25758 - DNA, 1634 bp, Mus musculus
taaatacgtcttttcttccggctgggccccagtggacccatctgtacagtggggtctctgacgccattctgtgagctcctgtgaagaaaagaaggggaggtgaggtatcagccctggcacagtggggttttagccaacctgttaggatctgggaggcacagaggctacttgggctgacccaggctggggctcttggtctctgagcctccctccgtcttcccaccggtgatgtgtgttggtgacagaggcttccccaggaggtcactgtggaagatgcttggcatggcggggagggccgtgttggcagcatgagtggtagcagcagaggcacatggggagaagcagccatgctcagtggcccacatattaggtgtctcttccacagctctggagagtgagttcccgtacagtttcaggtggtccctcccttgtctggaccccagtctcccccgtacagtgaagtgcatgggtgattcctaactgctgagggatctgaaggagtagttggcatccccgagctctgaggatgccgcctttcttctacaggatgagaaaggtgctttcaactttgacaaggagactgtgatcaacccagagactggggaacaggtaagagagcccctgtggagtcaggcagctgggatgggggacacaggcaggccctgattcttgggtcctgggtcatccttctagatccagagctggtaccggagtggagagacgtgggatagcaaattcagcaccattgcctccagctacgaagagtgccgggccgagagtgtgggcctctacctctgtctcaacccccaagtgctggagtagggaaccgtgggctggaggggcggtgggctgagcccccacgctgggccgctctgaaggtaccagagcatggggctaatctcatcatccctgtctccgctccaccaggatctttggctttgagggagctgatgcagaagatgtaatctacgtgaactggctcaacatggttcgggctggcttgttggctttggagttctacaccccagaggcagccaactggcgacaggtgagacaggcgaggagcctgctatgtggccactgtcaggattctgggtgcagggatgggacaagtgcatcccccaaggccagataaacttaaactctaaccccagactccactgtagggaaagctctatcacatcttagctggaagaagagcatcaggattcaaatttatgtagtcttccttccttagccactggactcagccactcagtcacagtttttgttgtttctccaaaccagtcacttcatttctctgggcctcaatgttttgtcatatataaacgtggggtagtggtgcctactcagttccattgttgggcacaaaaaggatgatgagagcgagtcctcagggtctttagtgaggggccccatgagtagctgctgcctgaagcattcagaggtgtggcaagtgatgagggcgaatagggcaccatgttctgcacacagcccgcctcagtgaacactggagaaaggaagaaattgagggcagaggagtgagcagagtggacccccagggtacaggggaataaacagatgatgtcatctgacgattggcatgttgaaaacatcagcaagttgtgcactaa

SEQ ID NO: 25759 - DNA, 1237 bp, Mus musculus
aatgcaggaacagctattcctccctcctgctgctgctgccgtgggttactctataaaccttgctgctcagctgcccttaaagatccacgtgtcccgaatgcatgcaatacctccagcccctagtgagtaagtaacaagtgggcaggcaggcaggctgagatcagcttttgctgacttccagtacaggcaggatagtgacaagtgggggacacatggacagtcaggctctctacctagtggagggtggacagcttcatgtttgtttggatcggggaattctagggcttgggagcagcccttgctgggtttgggaaagtaagaggcttcatggaggtgggtaaaacaggagctcagcctccatggtggcttggaatcttacaggcccacaaggtaaggggtctgtaccctcttcgcgtaggttcagggtaaagaagcaggggtggagaaacagattaaggggagcacggggtgtggctatgcataatggtgaattcagaccctcatttatgggcagctcattgctccccagcaccgtctctgaaacaagggctaccactgctgaatgttcactgcgtgccccacccagcctaacaggaaccacagctgcatccacggcaccagggctctgcttccccaagatgttgttatttaatccagtgatctgggaaaggagattggccctacttgggttcttagagcgagaattataacctagctggaagctgttattgaaagccacaaccgcccctctcagatcatactaaggctgggcaagaccgaggcaaggcaggttagggtctgtttcctgggaaagctgagaaacagagagatagctatccactcaaccagtgcctagggtcataagagccccggcgatgagcaagggcttccggtcagaggagggacctaggggactattgccagactaggattacaacatcctgctggccatctgtacctgctggggttgctgtgcgaatgaatggcagacactgtagagataggatggagtatggagggcagcctgggtgagggaactaacataagacggcagggagaaggcttcacagccaacatgcaggtcagcagaaaaaaggagaagggaccagggttaggctgggacctggtgggccttggtgactatgagagtgaagttagtgatgagtccctccctgtgcctcctgtgtgagccagggcttcctttgagccaagggctaagatggggttttcccctgac

SEQ ID NO: 25760 - DNA, 1193 bp, Mus musculus
tggtctcttggtctgtgggttcgtggctggtagccacgttgcatatggtgaggaagaatccaccactggtcactctgcctctcagctaggagtaacacgggacacagaaacctggagctcacagagatgcacaaaagggcaagttggaaggcagctatgggggaagcaggcgcagggcccttcactgccctcctgactacatttcttcatcagtccatccactgaccccagggagcaaagccagctgtaggtcttgcttaggacaccctgacggtctctacctcggctcagagtgggacctgggaccagctccagagcgtcagcgtccccttctcacccacaggccctgacagggcatgaagtgtcatggaaactgaggggaagagaaagctcaaaggacctctgagcctccaacagggttttctcgaagccaacacccctagaatccagatgggcctgtctgacagaaaggcagttggcctgcatgtgttgtgcactgcactttacagtttgcaaagtttttccagaagcctctgtgaggcctttggaacaagctgggcagggatcatccccaggtgggattcgactgtctatggaagagtaaggcgatggccttcatcgccttccttgtaggtgctgcccctgtcccgccacttgcttcttttcctcaaagttctccaggcaggtgccctcggcacttgctactgtgtttttgccccatttctcctccgaccctgctcctgcatccaattaaaactgttcatttctacgacggattcctggagtgttcacttctaaagtattggcctcagtaaactgggtagggccgagatggctttaaggacgtgacagattgaggtggccagttcttgggggggcagaggtttgcatgctggctctgctggctctctggacctcttgacagctgagcccaccaaatgggtttgcaagaagctgtccttctagattacctgggcttaattcccagcacttacgtggtgactggaaactctaactccagttccaggggatccaacgccctcttacggcaccagggctctgtggacaccaggcacacatatggtgaacatataattgtgtaaattatccagtatttataccaataaagacgcaggaggcataaacggaattaagaacctgctagctcagtgaggtaactttttattgtctga

SEQ ID NO: 25761 - DNA, 1155 bp, Mus musculus
aagggattcaaggaggcattgaagttccatccccaaaaggaggctgaaaaccagcgcaataagatcctttaccgccagttcaaacaggagttgaaggctaggtaccccaactctccccaccgatgctgagtccttgtcttccatggtctgagaattgtcagtatctggctccaggcctgactggggtaagaaacatgcctccactttacagaggtagctatgggtttggaacactggacttgactatggggtgctgggagtcaagtctcagctttaccactaactagctgtgtggccttgagcaaatactattacttctctgagcctccgttacgccgtctgtaaaaagggaggtgaaaatacctacctcacagaactgttggctcagatgagacgctgtatgtgtaaacatcctgtaaacttcgtacaaatgtgaagtattattaatattgctacagtgttattatgatattgttactattaaccatgttgggtggatagcggcagagcaaaaagtttgaatgggctagaggtgggaagcttgagtgtttaataaaatgaggcttttggaaagaaagatgaaaacgtagaatgtagtgctaagaacgtttcccgttctctcatgccttcgccctccgccctccgagatccctgaaggaggaaagagataaaggttaaagtcccagatctgtgccctccagtaggttgggctgctcatttgccttcggatgacattatgtaaataaacgaatgtcacacccacagctggctctgttactctcctaagccgaggggtggtgggccggagcaccgtgttagacggcggtggacccaaggacaccgaccacaatgctaggacaggctgaaggcctgggttactgggggccagttgctatggagacccgtccgccgtatcccggcatgcctggacaccagtggttccattgtaagcgccacaaatgggcgcctcctgatgacgcacacggaagcgtcgacacctcctggagaaagagaatcctgcgcagcactgttccggagatcaacggcggcggcgttcacaccctgggtcggacagctctccgggagtcctggacgtgaggccggaggccccagtgtctgcggtgcgtatggccacgcccggcgctgggttgggct

SEQ ID NO: 25762 - DNA, 1155 bp, Mus musculus; identical to SEQ ID NO: 25761

SEQ ID NO: 25763 - DNA, 1686 bp, Mus musculus
gctattcagtgaggtaaaggagcagggcttcaaggtcaagtgcagtctaccaagggtcttgttgcaagccagtcaggaacttgggtccagtcccattggcagtaggaggcctttcccattatgactcatagccttggtgagcattcccatgcatctcagaattctgtaagaggagcaggttccatcgagcacgttttcagtgtggtgacactagtcacttcccctgtctcgttcgaggcttgtgtttggtcagctccctgtgtggctgctccaaaagtggccagtggccagtaatagcccatgctccctctcccagagcccagatgcccatccagccttcaggcaaagaaacagaagagatggaggcagaaggggattcagcagctgagatgaacggggaggcagatgagagcgaggaggagcggagtggcagccaaactgagtcagaggaggagagctcaggtgagcccctgcaacctctccatctccccctcccgcctccccccgggagcagcagcctgcccctgcagaaccattcctaattgccctctcaccccagagatggatgatgaagactatgagcggcgccgcagtgagtgtgtcagtgagatgctggacctggaaaagcagttctcagagctgaaggagaagtgagcatgggagtgctggcgggcctttgtgcagcaggggtgcgggtgcccgtagtgacgagcagcaagtggggcacaaggggagcaggtatttggtaggcatttacctgagaggacaagtgaccattggagaagccggtgatacgcagctgcctttttacctccaggttgttcagggaacggctcagccagctacgtttacgactggaggaagtgggggctgagagagccccagaatatacggaacctcttggcgggctgcagcagagcctgaagatccgcattcaggtggcaggtctgtagctgccctgctctgctcccaaacagctctctgtcaccttccactttgcccctatccttgtagctcttcctttgggggacactagggcctctggccaaacaggactcctcttccctctgcagggatctacaagggcttctgtctggatgtgatcaggaataagtatgagtgtgaactccagggagccaaacaacacctggaggtgagctggcgtggacgggccccacgggaagttgggtgagactgaggtatggcaggtcccctgctgagcggctgtcccctcccagagtgagaagatgctgctgtatgacacactgcttggggagctgcaggagcggatccagaggctggaggaggaccggcagagccttgacatcagctctggtgaggccagggcccgatcctaaagcgccccacccttttctggacctcagtttcccaggctgcttaaggggagtcaaaaggcccacttcttggggtcaggaaagggtgtagctcagcattccacatatagtgggggctcatgcagagtgggtcccctgcctgaccctattgagaatgcggtacccaactgacacatggatgcatataaaaaaaccattgtcctctccgtggtagggcgtcagtgttcatatgggatccacaaatttccttcatccccatctacaaagcaaatagaagacctaaggcttaagcaaagaagggcagtggtcttccccaggctgcactagtgca

SEQ ID NO: 25764 - DNA, 1193 bp, Mus musculus
gtgtcccctcagaagagaaaagcagacggtaagagccatgacgtgggcctgtcagcttggtagtctgatctcacttggaggcttttgtgggattttgaggataagaaccaggttggagaggctcttggctgagggagcagggacaggtagaggtggaaagtaggctggagatgtagctcagtggtagtgcgcttgccgaacatgggcaagaacccagtcccaatcccaagatcacaagaagataaaagtgcctggagcccccaggcagggtgggtccaagagggcaggaagaagaaaccctgatggacgagggagtaaggcacttcctcactgccgtcaggaaggaagtgctggtggtccttttggttcaactcccttcagaagtttcccatatcccactaggaccctgaccctgcatttactctcgctcggagggtcctgggagcagctggtacctcacgcaggattaacatttctctgcaaaggcagggggttgcctagtagctcttcagtgttgctgctggcccctgaccctctgccaccactggcctggactcctctgctctccttgggatctgcacaactgtggccctgaagccgacctggccaagcaagactgtggtctccatccctgaccagcccactccctcccaaagaataacttcttcagcgtccccccacagagagaccaggcctcatccagagtcacagcagcagtcctcctgaccttgaaccctggccctcagccactgagccaggcccaactgtaggaggaactctcaagcagacatgttgggccttgtccaccctgactgccgctggagaggacggcttcccaggctttctcagggctattcctggtgtctgcctctcagattccaaagactggaataaaatttaacctgggaccttggtgtggctgatgtgtggctgctgtatcttaaaagggaatcaaggctttgtgggagcacctaagacagactttgctggggtccctgtagtttgtgacttagagaaaagcctgggagaggaagttgggaccagagcaggaagcgccgcatggcacaggcaagccagagaagcacatggccttgtgtggtgaagggacttttggacatgcctggaggccaggtcatgtctgcacctgccccagacactcggcagattggcaaggcaggctagctagcagggcc

SEQ ID NO: 25765 - DNA, 1197 bp, Mus musculus
ggcagctccagaccctcctccactcttcgatgatacaagtggtggttattccagccaactgggcggatacccagccccaggagctgatgtagccttcagtgtcaacaacctgcttggagacccagtggccaatatggcaatggcctatggcacctccatagcatcccaagggaaggacatagtgcacaaagaggtgtgccctgggctcccgggaggagggaggcagggcttctggccagggttggggtgtcacaggatcccatcttactccccaggcatcctttaggaaggatcacggtagggctcatccatagcctcttctctttacttccagctgcaccgttttgtgtccgtgaacaaactcaagtatttttttgctgtggacacagcctatgtcgctaagaagctagggctattggtcttcccatacacacatcaggtgagcttcccaccaggagagctggccagcctctccccactcgcggataacctgactgatcatcagatctcaaccctctctctctttctctctgctcctgtttacccgaccacctcgccacggccagaactggaaaatgcaatacagccatgatgtgcctctgcccccgcggaaagatctcaatgcccctgacctctatatccccagtgagtctctgatgtggggcttggccacaaaggggacttgtgccttgagcatagttaggaagacgattctgttaatgacccagcgttcattcctggagctttccacgtgggactgttactagacactaagttgacaggatgaccagtaggaaacttcctgaatgaccttgatttttttttttttttttttttggtttttcgagacagggtttctctgtgtagccctggctgtcctggaatcctggaactcactctgtagaccaggctggcctcgaactcagaaatctgcctgcctctgcctcccgagtgctggggttaaaggcgtgcgccaccacgcccggcactttcctgacttttaaagtggaccctgtctctctccagcctggagctcagggtttcactcggcccagcagttcccagctgtagggcttcagactttggatcctcacagctgcctgcgtccccatggcgcttgtcaggctacctacttgcctctgcacttcactctgtcctgttggctaagaaggttcaggctcagggcacacacaagga

SEQ ID NO: 25766 - DNA, 1247 bp, Mus musculus
acagcggttacaaatatgtggggtgagtgcctgcaggctgagaggagcctgaagggtctcaggctacaggttttgggcctatgtagcaacagccttcactgtgatgctagagacagttctactccgtctcaaccgccagctctacgctgtgagttggtggctgtttctgacagtctccccttggagccagtgactttaaagagactggggatttgttagttaccttggggagcccagagaagggaaggggagtttaggccctgggactgagtcctgaaccttgcaggtctatttggagtctggttctttgtagggaacagcccagtgttgtgggtcatggtactgggtagttgtaggccctggtgggtggggctagtctcaggctccaacctcaggaacctccagttcactcctgcacccccagttcattcccacttcactcctgcacccccaggatgatccttagtgtgctcacggggctgctcttcggcagtgatggctactacgtggccctggcctggacatcatctgcgcttatgtacttcattgtgagtgtggggcggcccctccccctctcctctgggacacattccccttcctagcccactcagctctcctctcttccaggtacgatctttgcggactgcagcttcaggccctgacagcatggggggcccagcccctcggcagcgtctccagctctacctgaccctgggagcagctgccttccagcccctcatcatatactggctgaccttccacctggtccggtgatccctggtccttaggtggcactcatttttccatacattgaagatttggtttccttaacttggcttgaccctggttcctgggacctgaggggaagccataggtatctgctttgcccaggggactaggcttcaggcttctaagagaagggtaagcggattctgggagagcatcctcgaggcatcttttatactgctttgaaaaacagctggaagggtcgcatcggacacagctggaaagggaagatggaagggtggctacaaggagacttccaaggcttcagattcatccgagagggttccagaaaagcccagagcaagtagggcaaggctcacagtgctggggtttagctctgggttgtcacctctagaatattccacctaaccctatgtgttcaagccttccagaagcagaattggggcttgtgtgttttcagtagtttattcatattttgtcacaaatgtcaggggatgggg

SEQ ID NO: 25767 - DNA, 1761 bp, Mus musculus
ccaagaatgccaccaatgttgagcaggcattcatgacaatggctgcagagatcaaaaagcggatggggccaggagcagcgtctgggggtgaacggcccaacctgaagatcgacagcacccctgtgaagcctgctagcggtggctgctgctaggaggggcacttgggggagggcaccttgtccagatgatgcccctggagcgggcaggaagtgcctccctctcctagggcatttgagtctgtagctttggggtgtcctgggctccccatcttcctctggcccatctgccttctgctctgagtcccagtcctgtcagggcccccgtggaggacatgcagagcctgtggctggggtggtcacagggacagctccgctgctgcctctgggtaccttgaaaagatgcccaccacgcacctttctttggaatgagggctccgctgtctgtcactcacccccatgtatgctgcactgggtttctctttcctttcttcccaatagcaagggcctccctgcctctgctgcccctgggtgcaggcagtagccaggggatccagggcctcagatccagggtcctgcatcggacctcaggacaggtgccagggctgcgagagccccatagccaccttttcctcatctctgcctcactccatcgctcccacacagcttgagccgtccagctgcggttaggtcttgagcacatctagggtaggtgggcggatggctgcggggcctgtgtctcaagccgggagggagcctgctcctgcctccccctgccctgcctgagccaggcccatgtgctgcctgcccaccgagcccctttgtccctgaggaaagcggaggcggaaggcccaccttgccaaaggccgggcaccagccttaaccctcactctgccagcaccacctcccttttccgaggcagcacatctggcttgttcttcctccattcctcagagcctgacagggccagacctgcttctctggggaatgtgggtgcagcttggggttgtggggctcttccccctcccaactcagaatcctggcccccaccctctggcacagcttcctgtagaaaacctttggtctttacctaagaagccatgtcctttgtgctgtctcttgccagtctcaccctacaacctgtcctccccctccagtgtgtatttaagtccctgggctgcccctctgggagggagcctcttctcccaggttcccctctgatgtcacatcaggcatcttgcaaggaaaagccacttgggggaagatggaaaaggatgaaaaaataaatttccactggcccttggataagccaagggtttttgcaaggaagcggtggtgactgagtgtggtctatggtcagagtcagctttgagttgctgggtggaactggagtccagagtttggtgtgatgcatggggggtcctggcttggactgtatcttaagcttgctggtaaaagcccttgacccacatactggggctgggaaagcctgctgtgcggctatgggatgtccccaagggcccagcatgaatctgtcagagggaggctggcaggaggccgtcaggtgagccaccaacatccactgggacaggcgttcaaggcatgaagttagaagcaaggagcaggcgttggtccccctgcatttagtcttcccctcctccagtccccgactttagtcccctcttgtggcttgaagccagatgccagctatcctgagctttgacaagcgctgctttacattaggacctcagttgtatccccctga

SEQ ID NO: 25768 - DNA, 1239 bp, Mus musculus
gcctcctacccttcctgtgacctcacctgccgcgcaacttcccagtagggggaatgaggctggcacctgggcatcccggtatttctgggattgaaggggccttcccagtctctcccatgcatgatttcctggcatctcaaatcacttggatgtcctgtgttttgtgtgtgttttagttgtttgggtaacttgtcctgtgcacaggtccttgaggctcctccctctgcctcccagcctcccacctaagattgttctgtggcttcatgaggtaggagacagcaaacccacccctccacatacattatctgtgactcttacccagtcatatgtctcccttttcctgtgtcagcttgcgtccccatccctgctttgtcttcccacttctgtcatggcagggcagcagaaagaggcccatctccaccaggtctccctccagcagcctccttccctctctcagccatggatgggtcccagacctatctcagcctcctcatcagtgtcttcatgagaggctgaggacacgtgacagagctagcccagcctccatgccctctggcacttcagagcttctctgttgccctctcactgcttcctagcagtgtggcacagaactgcactcagaacatagttttggcattcttcacatccaagactccagcccttcctgctgcccagccctactgtccagagtgtctcttgggcctgagaataagtggggtgggaagactggggccatgttgggttttttcattcaataaactggtgatttcttaccaactgccttgggctcctgcccctcactctgtcactacaaccatccgccctcagcagaagtgactccacttggaataagccagaagcacaggtagaacggagtatacacttctgtgttcctctcttgtggaaacaggcttgaaggtggctgcccagaatgaaacaatcaggagggtgggtgctgttcccatgtcagagcctctttttccccagaacccaccatcctcaagcttgcctcccaaggcagggtcatgctcctcccttctgagtccaagtggtctttgctggtcaaggctggtgggtggttaaaacctggatccatggtccgctgcctgaggttctgcaccgtcacagtcttgcttccttccagctccctgcatctcctgcgtcttcctgaaggttgagaacaaaaagaagatgcacctggactttcctcagagccctctgcatttttaaggcatcggg

SEQ ID NO: 25769 - DNA, 1513 bp, Mus musculus
cccctgaattgcaaggtgtggaagtagcgctggcgcctgaggaattggagttggaccccatggccatgacgcagaagtacgaggagcacgttcgggagcagcaggcacaagtagagaaggaagacttcagcgacatggtggctgagcatgctgctaagcagaaggtgggagcaacctgtgggcctaggaggagggctgtcctttctggtggagggagaggcgggtggactcggtgcctgaaggtctccgagatgctccattggtggcagtctcttaagttcaggaagaggaaggaagtcatttagctctcagggggagaggagagtgtggtttcagtgctttttaccttaattttatgtctgggtcaggctgcctcctgtctggggttgtctaacctattgtaacttctctctctctctctcctacagcaaaagaaacggaaagctcagccccaggacagccgtgggggcagcaagaaatacaaggagttcaaattttaggtcctgctcgcatagctggcctgcctttaggctctttgtatgtctgggctttctctgtggctccctaaagctagatctggactccctaggctcgtcacttcctgttcttattttagacttgttttgtaaataaagctgtttcccaaggaaggatgaatacaggcgctcttgaacctctctctcttttagcttctgcaaaagcatctacttcttgcctgtaatcacagatggcccataggactatgggactgtagttctgaactgaacttgtgggtagttcactatccctacccctcctgtgtgtgaaggctctgctgaaggtacctttgggtctggtctgaccttactgctttgtccgtggggaataaaaatagccagcttagcaccgtggctaggctgggaagtaactgtaggctagggaagtaggccaggtcaggccttcctcattgaccttgtggcagaaaggccgatttcttacctattggagaacatctgtctctaaataaaatctcaattgttccagagtactggctaactacttggatttactagtgtgtgtgtgtgttggtgggtgggtgggtttgaagggcttgttttgtcttcgtcactgagttctgagaagttttttgaaaaactagactaggttggagcacaggattccataacatttgctcaagtactggggagaaggtgtgggtgtaggagagtgcaagagctctaggtagggtgggggtgtgtggggatggcagctgatcaggccttgagagaaatagaattctagaaattgagaaagcaccgaggcactctgggacttttgtaaagaaggctgtgtcgggggcgctgtaccaagaaaggctgttggacctagacaaccttagctcaactggctcctgcccacagtcaagctggaacttaagctccttaggtggtggccggcccctggatctctacctactgcttcttttgcagaagtgggcgaaataaccacagaaggggtcgccacagcgggctat

SEQ ID NO: 25770 - DNA, 1232 bp, Mus musculus
acaccagccatttctgaacataaacacggtgtatcacaagttacacttgtaggtataagcaagaagagcgctgagcatttcagaagcaaatttgccaagtctaggttctgggtcagcctctggtttggtacaggtgcgtcctgaggttgcgaaggcaaacttactccgagttctgtcggacactctgactgaatggaagacagaagaaacactgaagtttttatgtggccaggaccacgattctgtgtgcctgaaaccctcttcagcctctgagcctgatgaagaacttgatgaagatgacataagttgtgacccaggtagtcgtggttctgccctgagtcaagctcagaacaccctggacgcaacactgccctttagaggctcagacacagtcactaagccactgccaagttatgagagcttgaaaaaggaaatggagatgctgaacctgagggccagggagatctacagagggcgcggtgttttaaatgaagacactacggagtctcagggctctaaagagcatgtgcttcagcgtgatcccagcttcccactgatagattcaagttcccagaaccagattagaagacggattgttcttgaaaaattgagcaaagtattgcctggacttttgggtcctcttcagattacaatgggagatatttacactgaacttaaaaacctcattcaggccaggcggtggtggcgcacgcctttaatcccagcacttgggaggcagaggcaagtggatttctgagttcgaggccagcctggtctacagaatgagttccaggacagtcagggctacacagagaaaccctgtctcagaaaaacaaacaaacataaatgcaattttgggctggcgagatggctcagtgggtaagagcactgactgcccttccaaagctcctgagttcaattcccagcaaccacatggtggctcacaaccatccataatgagatctgacgccctcttctggtgtgtctgaagacaactactgtgtacttacatataataaataaataaatcttaaaaaaaaaaaaaaactcattcagactttcagattaccaaatagaaacattatacaaacctgtggaatgacctttcatttctgtggtcttgctgttactattgacaccgattcttggcattcagaagcattctccgaaaaatgtggtttttacacagtttatagccaccctgctgacagaatttcatttaaagtgtgaag

SEQ ID NO: 25771 - DNA, 2373 bp, Mus musculus
ggagtggtgctccggctggcgtgcggtggcggcgcgcagaggcgggagggaggggaatccatcgcggaggcgcgcctttgcagcggggcagcccgagtctgcgggaggggcgatgcgcggtgtgtccgggtggcggcgcgtggagggggcggggcgctcggagcggggcggggcctcagggcggggcctgcgggacctgagaggcgtggaagaggccggcagcccgagtgagggcggcgaggctggcgagagccgcgtgctgttcctaccacgtgttagttcccaacggggtcagtgtctgtgtagccagggtcgcgggctgtgagggcttcagggcggaccttgactactgagtctgggagtcgctctgttgccttaggtgcgccaccagctagtgcaagctgatatatccaatatacccaaaaccaggacccacggaaagtggaaatttccgaatagccggggatgggttggggggactcaagggagcagccacagtagctgtggtaggatattgcccttgggacttgtggtcttcagccctaacctacttttcttttttttttttttttttttttggcgggggggattcccaggttaagcctgatcacgatgacaacctcccaaaagcaccgagacttcgtggcagagcccatgggggaaaagccagtggggagcctggccgggattggtgacgtcctgagcaagaggctggaggaaaggggctttgacaaggtgtgggggggctgcaaatgccagggaggggtaggagcgaaggttggcaacaggtggtaccacgcagattgggagtgaggcccacacatgtttggggggtacctggggaggcatggtgcctccttcatttttgtgttttgttgagacagggcttctcagtgctaggattaaaggtgtggctcactgtcccctgcccttttgtgtgttttaaatatcacgaaaatgaaactaggcatagtggattgtgcttatgaccctaacacttgggaagttgagctaagaggattcccgtgggatttaatgccagccctgacaacaaaggaacaaaccctgtctttctttttttttttttttcgagacagggtttctctgtgtagccctggctgtcctggaactcactctgtagaccaggctggcctcgaactcagaaatccgcctgtctctgcctcccaagtgctgggattaaagtcgtgcgccaccactgcctggcaacaaaccctgtcttaatcaaaataaaaatggccttgccctctgaagtatttaccacctaaccctccctagcttcagagatctggcctcttcggagtggtatcagcgtggacagtcctgttgctttagcccatgagacacttagccacatgcccttttctattctgcaggcttatgtggtccttggccagtttctggtgctaaagaaagatgaagacctcttccgagaatggctgaaggatacatgtggtgccaatgccaagcagtcccgggactgctttgggtgccttcgagaatggtgtgatgccttcttgtagtgttctctggggatccctcataccccagccacagcacagtttccagagtctgcagcagggcagggctcctccctgtcctccataaaggaaaagatggctgttgtcaccctcacctcctatgtactccagggtctatggggagttctctcccctcagcgtttcaatctttctgggatcgtttcccttgcatgcctttcccttccacctccccctgcagttccgtggcagcagttaccaactttcctgaatggattcctggcccccttctccctcactatctgttggatgccctttggctcctttcctttttttggcaaaaacagtcactgtccttataaaagatttttaaattaataaaatcagtggccttcatacttggtgttctgtgtcagagagcagataggctggggagttgtgtattcccagggctgaacacgtctacttcattcgttatcagtgcagaccgaaactggtgccttctatttcccctcccaagagggagccaccctagccatgtgggctctgggcaggtgccctgggtgtcccaattcctaaacattgtgggagagagtgtgggttggcttttttctcctgggagccaggtaggctgaaggcttccagatgtcagcagtcagtctaggcagcacctggtggaaagtcagtgggagtcaaaggtaccaggaagcgggtggatgggatgtgggtaagaggtcacctgccagtcatcatagcatgtgctcttagcgtctggcaagaatgaatgggtgggacttttgctgtttgccaagctaccatagaaaaggaaggaaatggttaaacttgaaagccaaat

SEQ ID NO: 25772 - DNA, 1179 bp, Mus musculus
ctgggtcttcttcatacctgctttcgtttagtcgtgattccaatagttaagcttgttgcctaggacctagtactcacttgcctcttaagcacagctgaggacaaacctcttggtgccttgttgtcccttattgcaacagtgcatactacctgctgccatacaaacaacacccatgcaccctgtctctcttcaccttaggcacctgtcatttccagaatgtgtctgtggtcaggataacctccttaccgtctcatgtttttttaatttttccaatttcctcagggtataaatttcctgtaatcttgagatggtctgtaacgtaggtttgcttgggaatcactgtatagcctaggctgaccaactcaatggctgtcctgcccacaggcatgaacctgtggggctcctaaccttttattagaggctattgcaacgcccttaccccttgtacctcagcatcaaaaggctgatcgtggcaactcagacctctgctcatgactgcctccattcatttactcactctcattgccttagttcacagatccttcagtagcccaggtactcactaaacttcgagcttctgtgaactgtgtctgtcctcgcttgttggaaggcttttgcttctggctatacactgctagcattaacccagcccctgctgaataccattgaaattgacctctcagctcagtattgcccctgctggtcatttgctccatcccacagtggaactcttcaaccctgttgcccactcctaatgtgtgtgtgtgtgtgtgtgtgtgtgtgtgtgtgtgtgtgttttccgtgtgcacttgtactaatggaacttctactttggagcctttctgagggattttgtttttctgttgtgggtagttggttgagtgtggaggcatgtattagcttcatatgctatatagaatctcttatttttgaacaaatcttatgatcataccctctctggctttcatttatgtccgtcatgtttgctttttgtgatagtaaatgtatacttgggtatacacatgtataaaatacagatgtatatacatggaaaaataaactagatgggttaaagatgaacctatctttaacttctctgaattttttttatgaagagttttttttttttgtttttgtttttcgagacagggtttttctgttcttttttgtttttgttta

SEQ ID NO: 25773 - DNA, 1182 bp, Mus musculus
ttgggcgtagtactgaagttcccacaggctggctgtcaggaaggttacacctgtgctgactgccacagctgaagccctgtgccctgagtatgcctaccagcatcccctgctgcttcccatctctgtatgctggttccatgtttgctggcattaactccagctcccagaggcaggctcaccctggaccctggattcttttttggtttttcgagacagggtttctctgtatagccctggctgtcctggaactcactctgtagaccaggctggcctcgaactcagaaatccacccgcctctgcctcccgagtgctgggattaaaggcgtgcgcccacatcccggctgcctggcctttctgatgcctctgctcctgctctgtatcccaggcattccggcagctgtcccaccgcttccacggaaagggctcaggcaagatgaagactgagcggcggatgaagaagctggatgaggaggcggtgggtcttgggagggaggtgggggctctgcatttttgggtgatgtgtgatatgctgggcctgctccccctgttctgacctcctgtggccccacagctcctgaagaaaatgagctccagtgacacgcccctgggcaccgtggcactgctccaggagaagcagaaggcccagaagacaccgtatatcgtgctcagtggcagtggcaagagcatgaatgcgtgagtaggagccggaggggtggggaggcactgcatcccctttccagtctcacagcctcatcgcccaccctcttctccctgcaggaacaccatcaccaaatgaagccgccctcctccctggcccagatgtagtgttaaataaagttccctccttatttttcctcttggttgtgctgctgtctaaggttagacctaggcaaggcctctgtcacggtcagttctgccatctggcaagtcgctgagcctcctcgcccttctgtgttgccttccgagtggtcagaacacctgcttcatgcgtgaggcgccggtgagctctttcgttcactctctggttatccaggagcggatgggcctgatccttgaacctgtgtgatttaaagtctgatctctgcctgtaagactggccatttaatgaacagaggaggtgagaaaccagcctggtccctcagaggacattcctctgtgagctgactccattgtaacagaagc

SEQ ID NO: 25774 - DNA, 1173 bp, Mus musculus
tgtctcctgtgtggcactgatgccgtaggcggtagggagccatttgggtttggacagagtgaactacagaggccgagaggaaatggagcccgcttgggagatccattggggctgtgggagttgcttatttattgccacgagggaggatctgtgggttcttgagtctctgtggtatcaccccagaaacttggggtctgcccacagccactgcctcccccaggtgctggagattgtgaagaaactggagtctcgccagcgcggctgggaggaggaggaggaccctgagaggaaggggaccatcgtgttcaatgccacttctgaattctgccgcacgctgggggagatccccacctacgggttggctggcaaccgcgaggagcaggaagagctcatggtacgtcagcagttccctggctgttgtccttaggctgctgacttctgcttctagtgcttgaatgtagcaggtagggttgaggctgcccaccctgacactgacttgtggtcctaggactttgaaagggatgaggagcgctcggccaacggtggctctgaatcagatggggaagagaacattggctggagcaccgtcaacctggatgaggagaagcagcatcaggatgtgagcaccggtgggcgtgggtgtggggacccaggctagttgtccagtgcctgaaagcctccacccatccatagaaggggcactaacccttccagagccagctgggggtcagttaaaactggtcccacagcctagtgcctggtgaggatgaccgctggatagaagagatggggcagcctgctcacacttctcttttctcacctctagttctctgcttcctctaccaccatcctggatgaggagcccatcgtgaacagagggctggctgctgccctgctcctgtgtcagaacaaaggtgtgggctcagggtgggagccttggcagtgtgggtactatagccgggacgggctggatggttgcctgtgagtactgtatggtgtcctgggtttccactcctcttcccctcagtctcggggcttcaagcagctccctagacgcggagcctctcactgcctctcctgctgcggggtgagaggtctgcttctcttccgtgcctcagaagtgggctaaaccggatacactggggccagatcccagctgtgctgcctccttag

SEQ ID NO: 25775 - DNA, 1161 bp, Mus musculus
ccaccaccccttccctggctaccttgacatgtgcctgctcctgacatttcaataaaacccagctcgggtctgtgtcttgagtgttttttacaaacactgtcctgatggttatctgtgttggctctcgaggaaagatggggccggaagagacagctccagcctgagtgggccgccttctcctcctccctcagtggtgaaagtagtgtgctgctgtgcggaggccaggcaccatcgctgagaacctcttcagagctgttcccctctgtaaccatggatcaaaatcagttttttaagtctttccagaaaggcccaaggccttttttggtatattcttttggtcccaaggtatatttgttttacattttattttattaagaaagagtctctctcccagcacttgggaggcagaggcaggcgggtttctgagttcgaggccagcctggtctacaaagtgagttccaggacagccagggctacacagagaaaccctgtctcgaaaagacaaaaaaaaaaaaaaaaaaaaaaaaaaaagtctctcgatgtagccttgactggcctagaacttactatgtaccttaggttggccagtaactctgggaaatgcatttgtgtttgcctcccaaagttctggatttaaaatcctgcaccaccatctccagcttttaggtttttaaaaatttctgttcatagtggtacatgccttccatcccagcacttgggatgcagtggctgttggatctttgtaagttcaaggttagcctgtttaacaaggtgagtttcagggcagccagagctacctacataaaagtgagaccctgtctcaaaaacattcatagcctttggtctcagtacttgtgagacagttggatctctgagttctaggttagtctggactatacagtgagatcctgtctcaaaagagagatggggttggggcaaggaggctgatgatatggttcagcagttaagagcattaattattcttccagaggacctttagtttggttcccagaattcacatggtggtgattagtaacagcctgtgactccagttccaggggataaaatgacctcttctggcctctgtaagaactgcacacatgctgctctgacatgcatacaggcaaaactcccatacatggaaaaaaatctttacaaagt

SEQ ID NO: 25776 - DNA, 1327 bp, Mus musculus
tgatcccagcacttaggaggcaaaggcagcctgatttctaaaagtccaaggttagcctggtctacctaaagagctccagagcatccaaggctccgttgtaaagccctgtgtcaaaaagctaaaaacagataaatagaatgagtttgccaggtagctcagagattaagaacacttgctgttcttccagagaacaaagatttagttcccagcacccaggtctggcagcctctactgcttccttgggtacctatattcatgtgctcaaacccacaggcacaggtacagaacctattttaaaatcaaatagattaaaaaaaaaacattaaaaaggcaatactggccagtcctggtgtctgagtgattcccagggcccagcaaaaggggaccgagtttccagagccctgaagacaaggggtaacacaccaaaatatggactcatttttcattccaccttcattggccgagcagctgcaaagaacaaaggccgtatctcccgatacctagcaaacaaatgcagtattgcctcaagaattgattgcttctctgaggtccccacaagtgtatttggggaaaaactccgagaacaagttgaggaacggctgtctttctatgagactggagagatcccacggaagaacctggatgtcatgaaggaagctgtggttcagaggaagcggctgctgaaatcaccagaaagctggaaaaacaggagaagaagcgcttgaagaaggaaaagaagcgactggctgcactggccctggcctcgtcagaaaacagcagtaccccagaggagtgtgaggaggtaaatgaaaaatctaagaagaaaaagaagttaaaaccccaggaaaatggaatggaagacccacctgtctctctacctaaatccaagaaaaagaaagctcccaaggaggagttggccagtgaccttgaagagatggccactagcagtgctaagagaaagaagtcctcacctaaggaggaggtggccagtgaaccagaagaggcagcaagccccaccacccctaagaagaaaaggaaattttctgaggagcctgaagttgctgctaacttcacaaagagcagcacaaagaaaaagaaaaagtcccagaaagcacaggaggattagaacggacctgcttggtgggaggggcataccttgtggtggcagctcctgcccatgataaaaccccaataaaaacacaaaaccaggaaaaaaaaaaaaaaaaaaaaaaaaaaaaaaggcaatactgaggattccagaggaaaacagagtgacatggtctcgtgtgacttgtaagacccagccagtagggacgagtcacttctt

SEQ ID NO: 25777 - DNA, 1447 bp, Mus musculus
ctaaaagtttcttttcttgagtcattattccctggatgtagctgcagccttttctttgctttgtctttagggcccccgagaatgcacccctcaagagcaaaatgatctatgccagctccaaggatgccatcaagaagaagctgacaggtaaggatccctccttctgcaaaagtcatgggcgcagtctcctgctagctgctaccttcctcctctcatctgctccgccggctccttcccagatagaactccaccccaccccagtgcttcctgctcactgctctcttttcaccctgtaggaatcaagcatgaattacaagctaactgctacgaggaggtcaaggaccgctgcaccctggcagagaaactaggtggcagcgccgtcatttccctggagggcaagcctttgtgagccacctccagccccctgcctggagcatcttaacagccccagacctgctcttgggtgttgcaggctgcccctttcctgccagaccggaggggctggggggatcccagcagggggagggctatcccttcaccccagttgccaaacatccctcccaccccctggaccgtccttctccctccatccctgacggttctggccttcccaaactgcttttgatcttctgattcctcttgggttgacgcagaccaagtcccgtcctaggcacccagtttggggggagcctgtatttttttttttaacgacacccctactccgtatccctccccatcccatgctgccaacttctaaccacaatagtgactctgtgcttgtctgtttagttctgtgtgtaaatgaaatgtggaaatgaccctccctgccccagctggctgccctcccctttcctttgatcttgaccactcatggaagcaggaccagtaagggaccttcaatttaaaacaaaacaaaacaaaaaaacaataaaaaggctaattaacaacatggcttttgggtttgggattttggggaccctgtggtgggagatggatgggtggtttccctgtgcttcacctctagttcagtccctagtaagcggcatctccttcttgagttggggtgcactgttccaaggcagggcagttgggctccgagtgtgtcacacctgaaacttcttacctttatagtggacagtgaggtaccctgagcccctttccacatgtgggctaaatacagtttacttgggtgacactgctttctaaggttctcttcagctctcccctctcttccctctggggcggttggctcaccccactgccacgttcagaggtgctatgagtagctaagttgagcctttggcctcctgtactgtgactggagtccattcagggtgggtcaggtggattctaggacttcagtctggagccccacctactgttaccccagctaaagcctgagcctttgacttagtgtggattctggcctgagggcaggagagctggt

SEQ ID NO: 25778 - DNA, 1159 bp, Mus musculus
aggcgggggtctgttgtagagaaaatggacagtagagagaggcgggggtctgttgtagagaaaatggacagtagagagaggcgggggtctgttgtagagaaaatggacagtagagagaggcgggggtctatcagagagaagacggacagtgaagagaagcggggatccattagagagaaggcgacagagagtagacagaggcgggggtccatcagagagaaggtatcagacagtggagagaggcggggatccatcagagagaagatgtcagacagtggagagaggcgaggatccatcagagagaagatgtcagacagtggagagaggcgaggatccatcagagagaagatttcagacactagagagaggcgggggtccatcagagagaaggtgtcagacagtggagagaggcgggggtccatcagagagaaggtgtcagacagtggagagaggcgggggtccatcagagagaaggcaaagttgagtagagagaaatttagatccagtggagagaagctgagaactggtgataaaaattcaagatccactgaagatctactggagtcaaatattgaggagttggagtcggctgaggtgcaactgaaagagcactcgagaacaggaagtgcctcggaagagactattgaaagagtggtcagtgttactggtggtgaaggtgagatggaaaatctgagtcaggaaattccttctgaaagtgtagaagggatggatggccacggaggagccaagacaggggcagaaactgatagtcatgtcttggatggaatgagagagattgctgatgcatctgtccctaaggaagagcaagacacacttggagaaagccccaaggagtcaggtggatgaaaaagtgaaagtgaaaaaggagattggagtatctcaagtaaaggagaagctggagccaaggactttgttggtcttgaaagagtgaatatgaatgaggagtgtggacctcaagggagcatgggagcccctgggcatggagccaagcccacagtgaagaatggcagagaggacaatggaaacattttaaggagaaagaaacaatattggggcgaatgctaagaaggacactgtttcctgcttgaagaacagtttgagaaatgggtcaagggtggctggattttgacagacatgt

SEQ ID NO: 25779 - DNA, 1195 bp, Mus musculus
gcctggtctttcccctcttattccttgctgtctagcatcctcctccaggatcatctcacggtcgctctttctcttgtgtcttgtccacagaatgggtcagcccgtagggcagtggcagcccagcctggacggaagcggaaatctaattgcttgggcactgatgaggtgggtcttgaggagcagagggagagggaagccgggaaagggggagtgggcttgggcatggtgttcactcggtgaggccttaggcagggagggtggtggctgggagccaagcagatgaacccctgggcctcttctactctcagtttctcagcctcgctttattttggaagtggaggttggtgctttgcccttagctgatgttagacttgcaggaagaagccaatggcagtgtcgtgcgccacgctctgcttaactgctaccatctagtatttgccatctgccttgggcaggattctcaggacagctcagatggaataccgtcagcaccacgaatgactggcagtctggtgtctgaccggagccacgacgacattgtcacccggatgaagaacattgagtgtattgagcttggccggcaccgcctcaagccgtggtacttctccccgtacccacaagagcttaccacgctacccgtcctctacctgtgcgaattttgcctcaaatatggccgtagcctcaagtgtctgcaacgccacttggtatgaggggtcttgggaggctgcctatccagagtaccctcaccagtccccacctgatcctccttttgtccttagaccaaatgtgatcttcggcaccctccaggcaatgaaatttaccgcaagggcaccatctccttttttgagattgatggacggaaaaacaaggttagtggcttgggcacggctgggctggagtgagtcacatgaacaaccttttcctgctcagaacagttgaccattctgcctatgagcaggtcactgtttttattgaattcttgacacggagcagggaatgtacagaaaactgggatttagagaaattttctttcctgagaggtcactgtcacggcagagcagacatgacagctactcaggttccagtaacagagggggttcagcacagttcacaggaagctgtcatcagagcttggaggtgtgtgtgcctataatcccagcactcagaaaactcccgagttcaagagtagtcaggg

SEQ ID NO: 25780 - DNA, 1200 bp, Mus musculus
cctcgggcctttataaggtgcaggtggggaaccactgacacctttgccatgcctaaatgagggactggggcgggggggggcacaaagctcacctctcatttgcctacctttaacccccagctcctgaggaagcgtcatatcggcaacgatattgtgaccatcgtgttccaggagcccggtagcaagcccttctgccctacgacaatccgctctcacttccagcacgttttcttggtggtgcgtgcgcatgctccctgcaccccacacacctcatacaggtgggtgctagggtgaactcaggtcatgggcaccgatgattggacacattcctcgcccccttccgcccctcgttccctcactacagccttcctccacgcagggtggcagtgagccgcacccaggacactcctgccttcggtcctgcgctgccagaaggcggaggcccctttgcagccaatgccgatttccgggcctttctgttggctaaggcactcaatggtgagcaagcggctggtcatgcacgccagttccacgccatggctacacgcacacgccaacagtacctgcaggacctggctactaatgaagtgaccactacttcgctggactcggcttcgcggtttggcctgccatctctggggggtaggcgccgggcaacccctcggagcccaggcgcggagctacaggcggcgggtgcgctgatgtggggcgtacgcgcggctccaggggcgcgggtcgcagcgggagctgaaacgagcggtccggaggacgccgaggtgccctgcttgttgggcatctcagcagagacactggtgctggtggcacctcgcgacggccgcgtggtcttcaattgtgcctgtcgcgacgtattggcctggaccttctcagagcaccaactcgatctgtaccacgggcgcggggaggcgatcacgctgcggctcgacggggccccagggcaagccgtgggcgaagtcgtggcacgtctgcaggtgaggcagtgtcaaaaactaaggtcccctggtcgggtgcgtatcgggggcggagcctattggaaactccgttaggctgctgtggtggggcggggaaaaggtacttgcacaggtgactctcagagtctccaattcgaatacacaactatcaggtaggtcgctagggctcctggggcatgccgggttaaatcgatcgaggcaggggcgggac

SEQ ID NO: 25781 - DNA, 1137 bp, Mus musculus
tcaggtaaggagcctgtggaagaagacgaccccaggagttctcaggtcggtttgtctgctcatctgtctgtcttctctcccataggcccctctagacctcagcctcagtcctgatgtcagctctgaggcctcacctgccagaaccacccaggaccttccttgcttggacagcagtattcctgagggttgcacaccctccggtgccccaggtgactggcctgtccctgctgaggaacgcgagagcccggctgcccagcccttgctggagcatcagtactgaggagtcagcctggcctctgctggatcgcatcccgggactcagtaactcggactctgctggactacagaactgattggctttggctctggtgtctgcaccctgatatctggctacttcagtgtcacaactcagtgacctagacttctctccctgatccgtggcctggatcccaaactgaggcagcagcctcctagccaggccctaagagccaaacccatgggctggtccctcattggagcccatggccaggactgactttgcctctggggcctgcactgcccccaaggctggcctccttagcctggacctggggcccgatatgtggcaagggtgggttcattcgttcttttgtcatttttctttctttttttttctgtgcttcagagacaccaaattaataacactatttttgattttggttggcagttttattttctgtgggacgaggtgaggttggtagaggtgccggaggcagggaggctgaagtcagaagagtgtgagggataaggggtcagactgctgggctccaggcagacatgaggtgggatgggctgccttcctcacctgcctctgcctttctttttttttttttttttttaatggtttaagagctttattatagaaatgcaggggggaagagaaaaggtagagagagagagtgtgtggggacggggaaggctagagaagaagaaagagaaaggagagaaaagacaaagggaagaggagaaagaagtgagaggataaaggagagagctgagcctctgcttttcaagcagtcctctatgcccaggtggctcacacatccatcagccttgatcttgatcaaagactgctcaacctcatttgttccaagctta

SEQ ID NO: 25782 - DNA, 1182 bp, Mus musculus
caccttcctgggtgctttctggccctgtggtgcctagtcctctgggctccagagaggcgccatgttgcaggccccatgctagctgacggcttgccttcctgttccaggcgctgcccaggtgatgtggtttgagaagctctacgctggcctgcagtgtgctgagaagtacctcatctaccctgccgtggtcctcaacgctctcacagtggacgcccacacagtcgtcagccacccagacaaattctgcctctagtgaggacccccgtatcccacccccgctgttgtgtgtgtatatcctcatgtgattgccactgagggatgggtaggacctaagactggcaaaacccaaagctggatgttggcacttaatgagctgtcagttggggcaaatgtgtcacccttcagctcattcagaggtactgtccacccctgacaaaagggctgttctagtagatagcaggtgctgagggtggcatttaaaccattggtgagaggtgtgtgtctgtgcccaccctccctaaagccctgccatgtctgaatgcctgccccacccacagctgccgggccttgctgatgactgtggcggggctgaagctgctgcgctcggccttctgttgcccaccccagcagtacctgaccttggccttcactgtcctcctcttccacttcgactacccgaggctctcacagggcttcctgcttgactacttcctcatgtctctgctctgcagcaaggtaagctgctggttgactcagacccaggctaatgagcaggcagagcagaagtgttcggtcagaaaggaaagtgtgtcctgaacctgcagccttgtagacccggattgctgtaagtgtgggcttttgccgtggcctgagggagcgatccctccagttcccctgcagagagcaggttgaagctttgaaggggaacttgcttcaggccctcctgggagttggtggccagtcagacttcacagccactttcctcaggatcggccggatctcggcctgacctggtcccctgggtgttctgagctctgcctctctgctcgccagtgtcttgaagctgggttccaagctgagagtgtccccagagctgagagtgtccccagagctgagagtgttccccagagctgagagtgtccccagagctgagagtgtccccagagctgagagtgtccccag

SEQ ID NO: 25783 - DNA, 1143 bp, Mus musculus
agccctgtctcttccagagcgtgcagcctgatgcagcatccccaatgcacgtgagtacctgcggggtgatgctctggccaggaggccctgggagggtctgagaccaaattcgagaccatggtgggagaggggcagagttcctcaccacccgctttgctcccatcttccccagttttccagcttggatgtggtcaagtctggggcatgttgaatgtgtgaacatgccccagggaggtcactggggaaggcccaattcctcactggcccacttcctagggccacaactgggtgattgcatacagccggcctgtctacttctgtatctgctgtctactcatctggctgctggatgccctggggaccgctcagcccttcccacctgtctctctgtacggcctcacactcttctctgcctctttcttcttttgtgcccgagatgtggccactggtaagacagggcaagattgacccaagggagtgagtctgaagggtgggcccaggagaggctggcaggctaactggtccttcacttcctactcctggacagtgttcaccttatgctttccgttcgtcttcctcctgggcctcctgccccaggtcaacacctgcctcatgtacctcctggagcagatagacatgcatggctttggaggcacaggtatggtgcccccaggagggtctgcccacaggagggtctgcccacaggagggtctgcccacaggagggtctgcccacaggagggtctgcagctctggttcttacagagccttttcctgcttctggagtctggctgcaggggccccatcctgcctgtcctcttttatcccctctcgttttctttcctctctcttccccagcaatggtttcagcccagaacactagaagctctgaaggccgagtggaggagggtggtgtcatgggaggtcttgtgggaatggaggaacagtgggacagggtgacagggtgagacccatagatcagagctgggcttcacccatttctccctgcttccagctgccaccagcccactcactgcggtcttcagcctcacgcgaagcctgctggctgctgccctgctttatggcttctgccttggggccatcaaggtatgggtagtctacaggagctgggcatgctgagccc

SEQ ID NO: 25784 - DNA, 2210 bp, Mus musculus
aggagctaagcaagagctttctgaccctgacccggcctgaccgggccctagtgaggaccagtagtcggcgggaacaatgtcggggaactggaggctaccagcccctggaccggaggggctcaggtgaccccatgccccagaaagctggctcttcggattcctgcttcagtggcactgacagggagactctgagcagcttcaagagtgagaagactaactctacacacctcgacagtccccctggtgggcatgctcccgagggcagcgacacagaccctccttctgaggctgagctgcctgcctccccagatgctggggtcccctcagatgacacacttcgttcctttgacacagtcattggagcagggacaccaccgggccaaacggagccgctcctggttgtgcggcccaaggacttggccctgcttcggcctagcaagcggcggccccccatgcgaggacattccccacctggtcgtaccccaagacggcccttgcttgagggctcaggcttctttgaagatgaagataccagtgaaggtagtgagctgagtccagcatccagtctccggtctcagcgccgctatagcactgatagctcctcgtctacttcttgctactcccccgagagctcccagggtgcagcagggggtcctcggaagcggcgggcccctcatggggccgaagaaggaactgctgtgccccctaagcgaccctatgggacccagcggacgcccagtactgccagtgccaaaactcatgcccgtgtgttgagcatggatggggcagggggtgatgtcttacgggcacccctggcgggctccaaggctgagctggaggcccagccaggaatggagctggctgctggtgagcctgctgtgttgcctcctgaagcccggaggggacccgctgccaaccagcctggctggcggggggagctgcaggaggaaggtgctgtagggggaggtgagtgttggccgcaggggtgagggtgaggaagacctgggaggcttgagtttgggtaaagggcagactgcggcagacctagtcagcatcagcttctccatctcgggaggagatggacttgtactcgatggttaaggcacgtgggccacgcctcttggctccaggccccatggttagcactgagcctctgttccctgtggacatcatctgcccagcagtggggcagggcagatgattgtcattctcattttcagatgagaaaactgaggcacggatggctagagatgtgctggcagggctcctgagaccaagtgtcgctgcactcagtctaacctttagctccattctggagcacctgtccccagcccagcccaacccagcccagcttgtcacttatgcttggggcttctttctgacagcacctgaggaaacaggtcagcgggaatgcacaagcaatgtgaggagagctcaagctatccggagacgacacaatgcaggcagcaaccctacgcctccagcctctgtcatgggctcaccacctaggtgagcatctgccccagggctgcagtgtagaaggggcgactggctctacctagtgctgacttaggacttcccctgtccagcagcctgcaggaggctcagcggggccgggctgcttcccactccagggcactgactctgccctccgctctgcactttgcctcttccctgttgctcacccgagctggccccaacgtccatgaagccagcaattttgatgacacctctgagggtgctgtgcactatttctacgacgagagtggtgagcccttccccagccagcccagcacctcttgtgtgcttcccagaggcgtctgtggctgcccacccacccacagcactgttgggtcagtgatccccccccccaccttggccctgtagcaagtgctgtccgacgtcatccttgtagcatctctgaggtgtgggtgttgtcatctctgctctgctgatgaggaaagcggggcacccccgagccacaggctgagctagtggtagagcaagccccacccaaagcaggctgaccgctgaccggaaggcccttcctacctaacacttggtccctaggggctgggctgtcacgacccggaacataccacagggctcctccttgttcgttagccttgatgcccttgtagtctcggaccctgacagtgctgctgtccctctgccccaggtgtacgacggtcgtatacctttggcctagc

SEQ ID NO: 25785 - DNA, 1099 bp, Mus musculus
tcctagttctttacagtggtggcaggtacaccctcaagggagcaagggttttgtgagaaaggatccaacttaactgtcatctccaggtcctgccccccagcctgatggtggctggagtgtactgcctggtggtagctgtcatctttgctaccatcaagactgtgaactatcgcctgcatgccatgttcgaccagggcgagattgtggagaaacgcaactctaccatgggggagcaggaagaagaggctgcccagggggagagcagtctcccaaggtgagtggctgtgggctgtgtcagggattgtcctttctctgtgcttgggattgtggctgtgtcttggaggatagagaaggctgaggggacaatggctctaagtacttgctgtagtcagggttaaagcagtcgaagggagtcttgaggaggaaggggtgttacggatggcgagaagaaaccgtaaagagagcacagctgagagcttctgctcagctcttcttcctgtttgcagggaccctggtgtggagatgacggtgttccggaaggtgagctccacgccccctgtacgctgcagttcccagcattctgtgtttggcttcaaccaggtttcggtgagtaggctcccctcgccgctgtcctgggagtcagcccctggtgtgggcctgctcccagcctgctcctgggagtcagcccctggtgtgggcctgctcccagcctgctcctcggagtcagcccctggtgtgggcctgctcccagcctgctcctgggagtcagcccctggtgtgggcctgctcccagcctgctcctgggagtcagcccctggtgtgggcctgctcccagcctgctcctcggagtcagcccctggtgtgggtctgctcccagcctgctcctgggagtcagcccctggtgtgggcctgctcccagcctgctcctgggagtcagcccctggtgtgggcctgctcccagcctgctcctcggagtcagcccctggtgtgggcctgctcccagcctgctcctcgctcgccccgcttgtttattcgttctctctcccctgtcttatcaggagttgctgccccggatggaggattctgggcccctcagagg

SEQ ID NO: 25786 - DNA, 1217 bp, Mus musculus
ctatgcagtgaaggactgtcaggacagctggctggaggtacagaagagagcacctaagagtgtcagctgaaggcccagagacccttccagacctctcttacataggaccacaaacaaacctgataaggcaaggggtctcttgcaagaagtcacagcgactctgatgaagtgagctgttcagcttggaggattgtcttccacatcagcgacttgcaggcattgctcctgacagttgccctgcccccagacccttctgtttaaaggcagaatgcgtgtgatgggaaggttcagcagaccaggaagagctgcttgacagatagagctaaggaagctgcccttgggaagcagaacttggttcttgttctaaagccacgcaggatgctctcctggcagacacgctagcctcactctaactgtgtcactgatactcgcaggtaatcctccaaggcctagccccgagccagaggagccacggagggccgggcccacggagcgaggcaatagctctgggacgcctaaactgatccaacgtgcattgctacgggggaccgctctgctggcttccctaggccttggccgagatctgcaacctccaggaggcctgagccgtgaacgcggggagtccccgacagcaccaccccctgcacagatgccctcaccctgcccacctgagctgccctccaccccgctcatccgcctctcacaaacaacacctgatgcccatagttcacccactcctggacccttattgctagacctaggtgttccctctggccagccatcagccaagagccctcgacgggaagagacacgtggtgagtgacccaaagactgatggggagataagaggccatcagagaagagtggcagggaactcagaggaccacaggcaggtacagagtcttaggctctgtggctgttgctagagctctaggttcagctgtgagatacagagatctccctcatggtgatagactaatacctattgattggtcgggccaggtactataaccattctatgtagaagttattacattaaattataatctgtatatgaagcttttttttttctcaagacagggtttctctctgtagccctggctgtcctggaactcactttgtagaccaggctggcctcaaactcagaaatctgcctgcctctgcctcccgagtgctgggattaaaggcgtgcaccaccacacctggctatatgaagc

SEQ ID NO: 25787 - DNA, 1184 bp, Mus musculus
tgggtgcttgtgcatgttggacaggcattttaccactgaagggcgggcatcccagtttacaggaatagacttgatgcatagatgaggccaggccatctgtcaagcaactggacctcaagtgtaaatcagtggggcagtgtttggcaagcatgtgtaaggagaaagaagagtagagatgagatgggattggcttaggcagaaaacaccagcagctcagggacatcagtaaagagcacatgactcgggagaggcggacggggcaccctcactcttccaccacttttcttgttctagcactgaatgcacaggcggcgctctctcaagctcgggaacaccagctggcctcatctacagagcctgcctcgagctctcggcccccatcccagccaccagtaccccgtccagagcactgtgaaggcgcagcagccgggctcaaggcagcccaggcgcctcctcttccggctgcacctccaaatacggacgcggtggcttccacacagacggccctcctgcagaagctaacctgggcgtcagtcgagctgggctctagcacctccttggagactagtatccagctctgtgggcttatccgggcttgcgccgaggccctaggcagcctgaaacagctggatcactgagacctctatcctgatccctgttcccctgagaaaaaccctccagaaaaacagtttttcctccgcgtggtttgttctttcttggttctgagtgtgcatgtgagccccagttctcctcgatggttttccttgcttttggcatctcacctttccatggtcttttctacctgaatggtgaagttctgcattcaggacaagaagtaaatggcagagggataagtgacaccttattccaaggactgacctcagtcttcccaaaggctgggccactaatcattgtctctgacccagtaccccctttcctccacttgagtgccatttgaagtttcagtccctttggtggcttcctttccttcctttaaccatcctgactctaccatctttctccatcttctggctgctaggatgttgacaaattgtggggaggggcagtgatgcactgtaagagtcaggcacagtcttaccttcctaccccagactcgggcctcccacatccccgtgcttttagaatccttcccttgggagaggacacattgtataggaatgagg

SEQ ID NO: 25788 - DNA, 1099 bp, Mus musculus
gcctctgtcttctgttctgctagtgagtgtgtgatgtgagaccttgcagtgagtttgtttttcctggaatgtggagggagggggggatggggcttacttgttctagctttttttttacagaccacacagaatgcaggtgtcttgacttcaggtcatgtctgttctttggcaagtaatatgtgcagtactgttccaatctgctgctattagaatgcattgtgacgcgactggagtatgattaaagaaagttgtgtttccccaagtgtttggagtagtggttgttggaggaaaagccatgagtaacaggctgagtgttgaggaaatggctctctgcagctttaagtaacccgtgtttgtgattggagccgagtccctttgctgtgctgccttaggtaaatgtttttgttcatttctggtgaggggggttgggagcactgaagcctttagtctcttccagattcaacttaaaatctgacaagaaataaatcagacaagcaacattcttgaagaaattttaactggcaagtggaaatgttttgaacagttccgtggtctttagtgcattatctttgtgtaggtgttctctctcccctcccttggtcttaattcttacatgcaggaacattgacaacagcagacatctatctattcaaggggccagagaatccagacccagtaaggaaaaatagcccatttactttaaatcgataagtgaagcagacatgccattttcagtgtggggattgggaagccctagttctttcagatgtacttcagactgtagaaggagcttccagttgaattgaaattcaccagtggacaaaatgaggacaacaggtgaacgagccttttcttgtttaagattagctactggtaatctagtgttgaatcctctccagcttcatgctggagcagctagcatgtgatgtaatgttggccttggggtggaggggtgaggtgggcgctaagcctttttttaagatttttcaggtacccctcactaaaggcactgaaggcttaatgtaggacagcggagccttcctgtgtggcaagaatcaagcaagcagtattgtatcgagaccaaagtggtatcatggtc

SEQ ID NO: 25789 - DNA, 1940 bp, Mus musculus
tttccacagatgctatagttgtgttgacacactgggttagagaaggcgtgtactgctatgctgttggcacgacaccttcagggactggagctgccttttgtccttggaagagttttcccagttgccgctgaagtcagcacagtgcggctttggttcacagtcacctcaggagaacctcaggagcttggctaggccagaggttgaagttaagttttacagcaccgtgatttaaaatatttcattaaaggggaggggtaaaacttagttggctgtggccttgtgtttgggtgggtgggggtgttaggtaattgtttagtttatgatttcagataatcataccagagaacttaaatatttggaaaaacaggaaatctcagctttcaagttggcaagtaactcccaatccagtttttgcttcttttttcctttttctttttttgaggcgggcagctaaggaaggttggttcctctgccggtccctcgaaagcgtagggcttgggggttggtctggtccactgggatgatgtgatgctacagtggggactcttctgaagctgttggatgaatatagattgtagtgtgtggttctcttttgaaatttttttcaggtgacttaatgtatcttaataactactataggaacaaaggaagtggctttaatgaccctgaaggaatttcttctggtgatagcttttatattatcaagtaagagatactatctcagttttgtataagcaagtctttttcctagtgtaggagaaatgattttccttgtgactaaacaagatgtaaaggtatgctttttttcttcttgtgcattgtatacttgtgtttatttgtaacttataatttaagaattatgataattcagcctgaatgtcttttagagggtgggcttttgttgatgagggaggggaaacctttttttttctgtagacctttttcagataacaccatctgagtcataaccagcctggcagtgtgatgacgtagatgcagagggagcagctccttggtgaatgagtgataagtaaaggcagaaaaaataatgtcatgtctccatggggaatgagcatgagccagagattgttcctactgatgaaaagctgcatatgcaaaaatttaagcaaatgaaagcaaccagtataaagttatggcaatacctttaaaagttatggcttatctaccaagctttatccacaaaagtaaagaattgatgaaaaacagtgaagatcaaatgttcatctcaaaactgcttttacaaaagcagaatagaaatgaagtgaaaatgctgcattaagcctggagtaaaaagaagctgagcttgttgagatgagtgggatcgagcggctgcgaggcggtgcagtgtgccaatgtttcgtttgcctcagacaggtttctcttcataagcagaagagttgcttcattccatctcggagcaggaaacagcagactgctgttgacagataagtgtaacttggatctgcagtattgcatgttagggatagataagtgccttttttctctttttccaaaaagacctgtagagctgttgaatgtttgcagctggcccctcttaggcagttcagaattttgagtagttttcccatccagcctcttaaaaattcctaagccttgcaccgatgggctttcatgatgggatagctaataggcttttgcatcgtaaacttcaacacaaaagcctacatgattaatgcctactttaattacattgcttacaagattaaggaatctttatcttgaagaccccatgaaagggatcattatgtgctgaaaattagatgttcatattgctaaaatttaaatgtgctccaatgtacttgtgcttaaaatcattaaattatacaaattaataaaatacttcactagagaatgtatgtatttagaaggctgtctccttatttaaataaagtcttgtt

SEQ ID NO: 25790 - DNA, 1762 bp, Mus musculus
atctaagaagatcttaagagataacatgaaggcttatttaaacagtttgaaaaaggaaatgaggagaaaagtatttgtactgtataatggaggctgaccagagcagtttaggagattgtaaagggaggttttgtgaagttctaaaaggttctagtttgaaggtcggccttgtagattaaaacgaaggttacctaaatagaatctaagtggcatttaaaacagtaaagttgtagagaatagtttgaaaatgaggtgtagttttaaaagattgagaaaagtaggttaagttgacggccgttataaaaatccttcgactggcgcatgtacgtttgaaggcatgagttggaaacagggaagatggaagtgttaggctagccgggcgatggtggcgcacgcctttaatcctagcacttgggaggcagaggcaggcggatttctgagttcgaggccagcctggtctacagagtgagttccaggacagccagggctacacagagaaaccctgtcttgaaaaaacaaaaaggttaggctagtatttggagaaagaagattagaaaatggaagtgaaagacgaagaagacatacaggaaggtgaagaaaaagctgttagagaagataggaaaatagaagacaaagcatctttagaagacagaaaaggtacttaaaggcacaggtagtaggaagccgaagaatagaagatagaaagaagcaagatagaaaaacaaaatggaagttaagacaactttggatgccagcattcaagataggcaaagaagataagattgaggccaaaaggttggataagatataaagtcagaaggaaattatctttaaagccataagttcaaatttctgatggagcgagcagtttagaagagtctttagacagccacatacaagattgaagctagcaatcaaagctactaggactgaagtaaaaagttaaggcagaatgcctttgaagagttagaagaatattaaaagccttaacttgtagcttaattttgcttgatgacaaaaggacttttgataacagtttcaagattgtcagcattttgcattggacttgagctgaggtgcttttaaaatcctaacgactagcattggcagctgacccaggtctacacagaagtgcattcagtgaactaggaagacaggagcggcagacaggagtcccgaagccagtttggtgaagctaggaaggactgaggagccagcagcagcagtgcatggtgaagatagcccaggaaagagtgcggttcggtggaggaagctaggaagaaggagccatacggatgtggtggtgaagctgggaaagggttccaggatggtggagcgagagcgagttggtgatgaagctagctggcggcttggcttgtcaactgcgcggaggaggcgagcaggcattgtggagaggatagatagcggctcctagaccagcatgccagtgtgcaagaaaggctgcagggagagcatgcggtgcggtaacattccttgaggtcggcaacatggtggtggttttctgtaacttggatggtaacttgtttactttgtcttaatagttatgggggagttgtaggcttctgtgtaaagagatatatctggggctgtatgtaggcctttgcgggtgttgtaggtttttctttttcagggttatgtcctcttgcatcttgtcagaagcttttgagggctgactgccaaggcccagaaagaagaatggtagatggcaagttgtctttaaccgctcagaggggaatgaatg

SEQ ID NO: 25791 - DNA, 1103 bp, Mus musculus
gtgctcttaacagctaaatgatctccacaccaccaccaccccagctgcattttttaaatcctcaacaatgaagtgaggatgagtatattgtaagtgaggggcacgatatggggcaggggagggctgcccacacctttgtgacacttctcttcatcctacagagtacacagctatggtgtcccatgacacccgggtgtttggtgcgcctcactggaggctcagttactctcagaagtcattgttctagggttactggactgtgtgatatttctctctcactgtaagtcataatgtgttaagacttttcaggaaaattactagtgtagaggctttcctgttttttgtttttttgtgggtattttatttttttgttgtttgttttggttttaatataacttgacatcctcattaagaattgcctttcccctggtttaattcctggtttttttctctcgaatagactctgaagacatccagtctgacctttaacaagaagctttagatgacgcaagcagctctctctgggttctgttttgttttggtgctggaatgaaaccctgtacacgaaaggccgaccctctcctgctcagctctgtccccacacctctgctaatgtggagagttagtgccacctgagtttcatgaatctttctccctggtctccttggattctgtgttcttatgttcaacctacttatgcccacccaggttatccactcctgtcagcaggaacaggaggtggcggttggagtcttgctctgcttctgccctttggctacaggcaaggtcctcggttgctgatagcgaagcgtgtttgaggaggccacttgaaacccctgaggagtgagtgttttgcaaagcacgtggggtttccagcaaaggaaaacagtgaactattggccatggtttcaaagcagacccatgaacaaacaaagtgactggccctgtcctgcttttcactggaacaggcctcagaaggtgatggcacaagccaggaggtaactacagaagaatgtagcatagccaggagtgagaatagaaatcactccgaggctcaggaggctgggggcctgccacagcggtgagggcggcaggtgagcagg

SEQ ID NO: 25792 - DNA, 1144 bp, Mus musculus
cataactcaagtcacagccaccaggcagcagctggtatgtttctatgtcacagccaccaggcagcggctggtgggtttctatgtcacagccaccaggcagcggctggtgggtttctatgtcagttccaggccaagtgctgcagttggagctttgctatatggtgagggcggtcctacctcctacctcaactcttctctagtttcctggttactcgtgtgagtattcaactgtcccaagtcgtcttgattttcttcctgtacaacaataaggtatcttattccgttttccaccagtggcttaacctaacctgactgaaatgtttcttacacttgtgcatgtgtgccggcgcaggggaggggcagagggcagtgttgttggattgggtctccttctaccactcggctctggggattattgagctgaggttggcaagcttggcagccagcactttgaccagctgagccatatcagtcagtgccctgagatggtgtgtgaccgggtcaggtgtggtagtgcaagtctttcatcccggtactcaggaggcagaggcaggtagatctctgagttcatgtaaagagactctgtctcaaaaaataaacaagccaggcgtggtggcacacgcctttaatcccagcacttgggagacagaggcaggcggatttctgagttcgaggacagcctggtctacaaagtgagtttcaggacagccagggctacacagagaaatcctgtctcaaacaaacaaacaaaacaagaacaaaaaacaaagaaaaaaccaagtatgtaaagtctgtggtcagtagcgttagcctgtgcagttagaggaccttgaccgacatccagaccacgggacccgactggatgtctcaccctgcccctgcaggccctgtcccttccaaaacaggcacttctgtcacaggatacttttttttttaacttaaatttgcttgggggaggggagcagttctagttccatgaggcacaaatggaggtcaaagagcaacttgccgatgtctcttctctcctcccactgtgtgggtagtaggaattgaatcaggttatcgatcttggggctgagccatctctgtggcccacagagcacttatatgtggttacttgttgctctcacattgtcagtgtaca

SEQ ID NO: 25793 - DNA, 2729 bp, Mus musculus
tcgttccgtttagcagtgtttgggtgacgcgacacaagagtataaaagcaaaagttgtaacctccacctgtaggagttagtgacaaggagggctcgctcttggggctagtggtggggaggcagtggccagttcagggctcagatgagagaggtggcagaattagaggcagccactaggatgggggtgcgaggagaagcggggctaagtataaaggagactagattttgggacagtggacgtgtggaaggcagcttccaaagcgcctttaacaatccacaaagaaccagcagctttcaagaccaggctatccctgctgtctgctggcacttgacgtccaggagggcacaagtttcacaggcctacatgggggcagtgtcctaacttgagtggcagagcagcagttgatggagacgggtggactgggggcccttgaaggccccggaaatcatagaggacaggcagtggggcaggactaggtgcgtagtggaggtcgcctttgatcttgacaaaaccagcagacccctttttttccagataaggggttgtgaacccacctggggatgaggcctggtcttatggaaggtggacttagcttcgctgggcggacagctctggcccagggtggtatgtaatttgggtgtggcctgtctgcacccacttcggggtgcgaggggaggccggaggaggctgcagagacaagttgtttttactgtcaggtctgccaggcggggaccatggagattgaaggcgcaagtcttggggccacattaatcacaactttatttttcagatagcagtgccctctctggactttgcctaggttccgtgcttcctcttctgtggtctcactcttccctactcttgcccctcactctgaggttaaggggtcacttaaaaccttgcccctgggtcgtccggtaagcctgtggaggatgtagagtcggtgctggagtcttgggcacggcattttggtaaaggtggaggacaccctgactgggcggggagggatggtgttgattcacagagggcgggacgtgagtgtggaccctggggtgggctcacagccatgtttccggtcacccaaatgcttcatggacgtggtttatcactatagtgttcaccatggcaagcagatggcaccaggagatatggagcccctgccagtgtgagtcgtagcagtgcaggagggctcaccctggaggagacagcggcctcggttgacgcctacacagtgaattccagaggcttaggaagcgcgtccctgccctgggtccaggcctttctcaggaagccctgtgctcaggaggccatcgttgaagtcagcttgtagggggtgggcaggtgcttccagccggaggggccgtcggctgtgaatgttccagatgaatgtcttgttctgggagcatcattctttgcggatgcatgaatggcagcaggcaccctttttcatgggggtagaggcgttcgactgctgcatcttctaaacaagcctccatccagcctttgtagttctgtgctgcgaacttggcctcgagaagattgcgtaaggtgtaggacactttaacgtctgcgcagcgtgctgcactgtagatcgggaccccagtgacctcgcccaccttccctgcttctgcagcctgcctgcctctgcattggtcagagggattcttaactgaaaacttgtgggtgttggggaaagctgttgggttgtaaatgactggtgtggaggaatcttccttagatggagctggttgtaaaatgggtagggtttgtggtttaacagtgggaaggcgcaagttagccacaaattctgccgacttggtagatgccgtatctaatttgggctttgggacgtcttctggactaaaagggatccgtgggcccgaagtggtccctgggaatggtctctcccagggtgtggatttgatactgggtggttgagtggcaacagtggttctggccccttttgttcattagcttttatgacttagggcctggctgtgtataccaggctggcctgggttcacagccctgctcagatgacagtgtcctgaaacaatggccttccaaggtgaaacctgagttatggatcaagcttgggaataatacttttggcaccagatatgggacttgtgggagaaagcagggctcagcttggcattggtgggttgaaggagtcggggtgcgggtgaggattgtgcctggaaccgtgggttgatgggaataacagtttgggaactaaatagttcacatgaaaatctaaaggctgatggtaaatccctgcaggtggcactactttgagatgcagttgcttggaaaataccaaaatcctacaaggggaagagcaaaattgttttgcttcactgttgaatggggaagggtgacattgaaaagcttttcttagttgctcaatagatggttgtcactaccctgacctaggcaggccacaggggtggagcctggtggggggaagctgattgccaagaagtgaagctggggaggggcttgtaaacgcctcccgttgtgggctctgaaaccatagtatggggaggttggcagactcttctgggtctctattgaaattctgtcatactgtgtgattaagaattccaatgctgctatctaaaggaatttcatatgggagtcatgccttatacaacacatacaggaatttaatgtgtgagccatgccttcaaaacacatcttgaatttctggaattggccagaagac

SEQ ID NO: 25794 - DNA, 1216 bp, Mus musculus
ctgccaccttttcccctaagttatgttggaactggagggcacctctgcaggctaacccctttcttgttggcctttactgatgtctctgtgctgaatggtggctctcctaggaaccggttccatgctgcacataggaaaagcccttacatgtccctgggctggattggctgtcccataccaaccagttcctttgttttcctgtgatctgggtttaagggttagattttgccttgtctcctgtgctctgagctgataaagcctggggcgtggcaactccgaattgcactgcactgtgggattccctgaggccagccacagcggctcaagccacctctctccgaaggacatcgcaaaggcctatctgtccccagctctgcacccctggcagccttgactgctcctgggaagagctagttctgggagtggagctgtcctggcccttaagccctttgtactccctgggaatccccactggatcccagagacatagcttagctttgtcttcttggtggaaagccacagaaatggaaaccatcatctctgaaaatgaaaccagtttgcctgccagtgagctccagaagttttggcagcagagagaaagaaaaggctgacctcactataaggcattgtctgtaagatgatgtcacctgccactgtagttaaccctttaggagccttgtgtgttccctgagctaccagcccactcttggcaacctttaggtcatcttgactgctgttgatggcttcagatcattatgtgaggggcccagatgcgtgtgcacaggtacacaaactctacatttccatttgagcctttgagttttttaattaccacatgtgccttaaccctctaggacagagcactgttttactaaataaatgtcttgagtgttcccagtctttcctatcactggacttaataaaatcatcacctagcacactttggaatggttataatatggaatagccagagtatggtaaccacacgtgtcctgtgtgcccatggtatagcctcaggtcttcaccccagtaaaatctcatctggtagctcctggggaccggtctccaggtctccataggaaccaggtctgggaagacttgggctcacttctgtctgggaggaacctgtacttcccccactgcaagctgtggcagcagcgatgtttggagctttggccctatggaataaagaccagaggttgcaggttcagtctca

SEQ ID NO: 25795 - DNA, 1099 bp, Mus musculus
tgtgttgacataaaactagccagaacgtagagtcgcaccatttgtattattttggatggagaaagttgcattcatttagaaagctcagctgtccagcctcaggggtgctgctctgatacccgctccagccaggctcttcctctgccgcctttttctggcttcccatcccgacccaagcacatcccaggcccctctgccatccccgggtcctgagtgtcggccagacctcatctgatgggaaaggggttctccatagtgcctcgcatgcaccatggtggtgaagattggtcttgatgacactgtctgccctctgcccgcgtggagcactctctgcagggagggaggttttgtgtgtggtgcagcaggagagagcaggatccgagtgcgccttcagtgggaaccctatttggcctttatgtgcgaggtgtccttcccgtcctaggcttgcagagctttactgtgtcttagtgtcagggtgatctgtccctgctctgcagataggtaggtgccccttgctggtctcacggctggctatgacagacagaaggcccgcagaagggctctgatctgaccacacccgggccttctcccctctgctcccccatgtatactctagggtctctctctctctttcaagatttattttttttatgtatatgagtacactgtagctgtcttcagacacaccatctgataccattacagatggttgtgagccaccacgtagtagctgggaattgaacacaggacctcttgaagaacaatcaatgctcttaactgctgagccatctctccagccctctttcttttttgcgagacagggtttctctgtgtaaaagtcctgcctgtgctggaactcgctctgttgaccaggctggccttgaaccctcagagatcacctgtccctgcctcctctgggaacctcatttttctcttaagaggaagaacaccccacccccagctcagtagtgggccttgcatatcaggcagggttggcgctgagccgagcaagccacagctgcttgggggcagtggaaatttgtctgcagtctgtgtttaggacccctgtcaccctccagcgcatacacacacacactca

SEQ ID NO: 25796 - DNA, 1206 bp, Mus musculus
tggggccagagacttggtgctaatgactgtttggagcccagcaaggactgccctgggttcaaagtcccccgaaggcttatagctgagctctctaaggctggtggccatggccatggtatcccggacctcaggatgggcgtgtctggttttcttgggcctgacaagctcagctcgtttgcacaggaggtccccttgctcactcatgtgacatgcaaggccagacagtcagggtgccttggactgcactcagctgtgtcccagaccctgttctccttcttagtcagcccttgtctcgttggccagcacaaggtcagacatggaagcccagtggccggtgtctgcagcaactgtctgttgcagaggagagtcccctcttaccttgcaggcttgctctcatggcacatagcttagtccccaggtccatccagaggttggaagtccagtggctctgcccttgatgggctgcagctcagtctcagggacaccgaatctgcacacacccaaagccgagacaggcttttccatgacaagtggaaactgctgtcaaacacaggacttgggtaggggtgggacacagacggtgaaatgggcacagctgccctgagaagggagggcagccagccctccaagacccctcctgcaccctgtgactcaggctgacaacttcctgcccttcgccttctctccccttgctgcctctcccagcagcctggttgtttaggctccagacaccctagcaggactcctctctggaaaaggtggcaccatgaaggtttaccaagttaacccgaagccaagggccgtgttggggtctctctctctctctctctctctctctctctctctctctgtgcccttgggacttgtggtcctcttgtagacagggcctggatatagacactgactttgaggcctcagacccagaactcctgatgttgtctgttggagtggttgaatccctgccagcagaagcccaggtggcctaaggtagaaagcagtcatgttttagctgagagcccccctgttctccgagtgaatgggccttttcccactcaaaaatggcatgatactccgtgtgagctacttttttttagggtttttaaaaatattttatgtgcgttggtgttctgcctgcgtgtatgtctgtgtgagggtgtcagatcccctgcaactagaattaaagacagttgtgagctgccatgcgag

SEQ ID NO: 25797 - DNA, 1119 bp, Mus musculus
ccacagcagaatcatggctaatagcagcttggaaaaccaagctaaagcacccagttttccggtgcaaaagcacgaggcaccttttatcatcaagagagttaaggagccaatgtgcaagaaaccaatgaacaagaaaccctgtgcagactccaagacacaccccacctcaccagacacttctgtccaggcagcaggggcacgaagtccataaaaatcaccaaggccaccatgccatagccacccctctgaaggagcactcagagaccagccactgtgctggcatcacccagctcttgagttcaaaccactccctgaacaggaggatgacttctgtcttcttcatgtccagaatccttcaggggtttccattaccttcagggaaacccaggtcctaggctcctggctggcctgccccaccaggtggccttctcttggttacttcctggtgtaggccctcaagtcccaggaatgccatgggtggtgtcattgtcctccagtggcccactctcctcaagatccaggcagagctcttcatttaggggtccttccaacctcatctgtgctgattatggggtacccaagcaccccagccctcctgcctacctcagtcatacctctgtgtgcagtgcttcatggttagttttgttttgtttttcctcctttgagtagttagtttgtgccagtcttgtgctcaaggctgtacttctgtcccttgaacagatacatgaaataaagtttcatctgatgcagtactgatgatccctttctgtctctgttcccatccatcacacacagctgtgagccttccaacccccatgtccatgccctggcccctctccaagttgtctcttcctcgatcacatctttccttacatttgtctgattatctatctcaattgctaaattagattttaaaactgcctgaggggctggagagatagctcagtgattaagatcactgactgctcttccagaggaaccaggttcaaatcccaacatccacacggcagcccactcatctgtaactctgagggatctgatgccatcttctggcttatatgggaattgcatgcacgtggaggcaaaaatacccatacacacaaaataatttaaaaaaat

SEQ ID NO: 25798 - DNA, 2026 bp, Mus musculus
tgtctgctcagattgtcctgtgagcccatgggccactgaagtgacaagagggtctggcattgtttggggactgtccttgcactcagtgtgctcatagagaatggttttcatgtgtatttttagtgtatgttaagagtattttgtctacatgtatgtcagtctactgcatgagtagctgatgcctttgggggtcagaggagggatcatcaggtccctgtagatggagttgtgggtggctgtgaaccaccaagtgggtgctgggaaccgaaccacatcttctttgactgctgagccatctctggttcgaattttcatggttttgaagactaagcagttccctcagctcaggagaacaatgaagttgctgctgcagaactccccctgtcctacctggagtgaggtctgaggaggattctgtgggatctaccctgacccctctgcttctctgtaggaagttggagttgccacctgtgtctggatctgctgaaggagaaagcatccatctaccagaaccagaactcctcctgatgtgccacccagctcccctgcatctaaggccgttgctctcctctctaccttggtttccattgcccctctctcctctttcactctgtagtcctgccaacctccgttggcaacagcacagggaggtggcagctctgactgcctctagccccgagccctcagggagtaaggagcagcgtgctgctccagggctgacctgtgggtccaacttctctctgctctccaagaagtgcattcactctgcctgccttgggcctaagaccctggtgattacagggctcaaatggggtcctctgagaaggaatatgagagcagctcacttgtctcaagccttgcccacccctcttcccccaaaccccctttggtttccagggttttgccccagagatgagccaggctgggcctttcctggaagcagctggagtgagctggctgagtggcacttgccaggaccttttcataccctagttctgcttccctttgcctcctgccaaagcagtcccctgtcctctgtcatgctacatggggttctgtgcttgagctagaatgttctcgggcacctcctggctctgccctgtcccacaaagggacgagcagcttcaaacctgtcctccctgtgcttggtggcttgctcacaggtgcgctctggctacccagacatttcctatcctcagaacttcccatcttctgcccccatccttagtccctttgcttttgtagggagagggatagtgtcaggggctgggccagcagcttgggggccacagggagaagttggataatgtgcctgttttttaactcgataaaaaagcctacctccaaaattccctttttgttcttcctgaacctgggcattcagcctcctgtccttaactaaattaggagcctctgcctcctgcctgtgtatcctggctcccaggacacaggatggtcccctttccttgcacgctagctagtagctggtaaggtcttcacaccctgagttttctgtttcctgcttagtggcactgacattaagtaggaggggacagtcctctgcagtactctagagagtgggcttcccccttggctgtgggcaggccctaactgttttctgcaaagttgagggccccccctcgcatatttagttcctgtattcaaaacattagtaaaaataaacatttttacagagtcttctgctggacagtttgtctcttgactccttgttgaaaggttgtttcatttcaaacttacgacaatagggttttttgttggtggtggttggttgttttaaattgaaacaactttttctcccaaaatcaaagtttttgttaaactccaccatgtaaaattattttgttagttttgttatgtaaattcagatttataacaatttagtggtataaaggatgaagctaattaatacaaaaattgggttaaaatcaactttagcattttctctgtatctgtgcttttggctggttggaaagactttactcggtgtgaatatgtaggcggaggt

SEQ ID NO: 25799 - DNA, 1238 bp, Mus musculus
actcacaagtgaacttgtctgcccgagtggttgcctttgtttctattttctagaactcgctgtaagagtctgactatggggggctggtgagatggctcagtgggtaagagcacccgactgctcttccgaaggtccagagttcaaatcccagcaaccacatggtggctcacaaccatccgtacacacagtgtacttacatataataataaataaatctttaaaaaaaaaaaaaaaaaaaaaaaaaaaagagtctgactatgttgcacccacttgagggcctctaaacccagtgtcctttctttcccaggacatctttggctgtgtctgtgtgaatcctgggcggctcaccaaaggacaagtgggcggcacctttggccgcctctacctcaggaggcagcccaaggccatggacggtgggggcaggcagggcctgagcgtggcagcgcaggtggtcagaatctgagtcctcagcctggttgcctggcctcacaaacaccaagagcccaggtatggctctctggtggccaaactgttggagtacctgacaaggatctggccacagggacaggactgtagggctgggccgtccagtcacggcttcccactgtccctcacccccatgcagcgtggctctgatctgaattacgccctgcttctctcctgcttcatgaggtagatgtacagacgtgaaccatctatggacacaaaggcaggaaaactgactttttttgtatgaatcaaatacagcgtgtggagaaataaaaatttttttagtataactgattttaatcttttttttttccccctgagtagtgtcctaggaatgttgtctacttgacctatgtccagagaaggcagagctttggtccagccctttggaactctcccaagccttaccctgcatcctcccaaagtccccaggctacagttgctgaggaggaaactgggctgcagagcgagcagctggcagcctgcctggctctccctgtgccgagtctcatataccaggtctcacattgcatgctgaggtctcagccccacctctccatctggaggaggcagccgtgttgagcccttccatagctgtagtctctggtcaatctgacactctgctgggaccagcggtaacttggacttacctgtagcccagagctctcgtgtaaggtcaggcttcctaggacacacgcacaccgtgtcgatttgttctggtatctggggatagactgcagaattacgtt

SEQ ID NO: 25800 - DNA, 1221 bp, Mus musculus
acattggtcagtgtctcacagagcctgtacctccagctccaggcgatctcacgccctcttctgccctctgtgggtactgcactcgtgtgcacatacccacccctacatgcatcattagaaacaagacaaatgtgtatgtgtgtgtgcatatgtgttcatatgtgccatcatgaccagcctgggtgaatgactggtctaaggcaccagactcaaagtttcttcttgtaaaggcactgagaaaaccaggcactggctactccactagggctcagcttgctgccacaatcccaggtcaactagcttgcttctttttagaacccaggaccttgagcacgccagtgctcattgagttatcataaatctgcacctcctccagcttacttctttgtaattatcctgataattcacctactgccccttctggaagaggcgtctcgtccatctgctttcctgtcttctgacactcacagcgcgtctgtaaccacagtattgaatgaataggagtgaggtgtaagggagggttgagaagccctgccctgcttgcctctgatcgtcctctcctctcctcctgcagctaccttctgggtaaacccccagttcaagatccggttggaggaggtggatgacgcagacgactatgacaaccgggagtcgggctgcagcttcttgctggccctcatgcagaaacaccgccgcagggagcgtcgctttggccgggacatggagaccatcggttttgcagtgtaccaggttagccaggggtggacccacctctgcctacggcagcgagcatccaccaggagatgcccaggtgcatcctgagggcctgaaaggctgacagctgaggctctggtgcaggaaggagctcctaaattagctacagagagggcgaaggagtcggttggctacaggaaaggaaggttccagggaagaggtggctgtagctccgtgtgctacagcctctggggtcagactgtgggctcagctttgtaacaaagtggagtactcgtggagcaagcctgtgaacaggcctctggagcagggggaaggtctgctacccagagagaggctgttcaaggacttagtacttctgcctactgctgctgctgcagctgcttcttcattctccttccttcctcctcctcctcctcctcctcttcctccgggttgagccacaccctagctgtcctgtaattcactctgtagaccaggctggcttca

SEQ ID NO: 25801 - DNA, 1201 bp, Mus musculus
gagcatagtggcccactcctacaatcccagaaaattgggagactgaggcaggaagagcatcataaatctgaggccagcgtacagctatagagtgagatcctatctaaaaaaaaaaaagctgggcgtggtggcgcctacctttaatcccagcactcgggaggcagaggcaggcggatttctgagttcgaggccagcctggtctacagagtgagttctaggacagccagggctacacagagaaaccctgtctcgaaaaacaaaataaggtctcttgctgcagcaacgagagtgggagcacctggagcgcaagcttggaaggagaatccacgagttgtaagaaaatggcagacaagccggacataggggaaatcgccagcttcaataagggcaagctgaagaaaaccgagacgcaggagaacaccctgccgaccaaagagaccactgaacaggaaaagaggagtgaaatctcctaaaagcctaggaagacttccccatcccaccccaccccaccccctcgtgatttggaggaagagccacctgtaagatggacccgagccacaagctgcactgtgaaacctgggcactccgagccgatgccaccggcccacgggtctctgaaggggacccctccgctaatcggtctgccaaatttcaccggtttgccctgggatattatagaaaattatttgtatgattgatgaaaataaaaacacctcgtggcaaaaaaagaaaacaaaacaaaacaaaaaaatcgggggttgggcagtctaatgagaagagcaatcaccaggacccatatggtggaaggagacaactgactcataacaaacttctctggcctctacaacctatttaatcatttctcagctagagggtgctcttcccatatatatgagcagactcgcatacaaatgtaattttaaaaacaatgtcaagaggcaggcggatttctctctctctttctttctttctttctctctctctctcttccttcctttctttctttctttctttctttctttctttctttctttctttttttgggttttggttttctgagacagggtttctctgtatagccctggctgtcctagaactcactctgtagaccaggctggcctcgaactcagacatctgcctgcctctgcttcctaagtgctgggattaaaggcgtgcaccaccacacccggctaagcaggtg

SEQ ID NO: 25802 - DNA, 1134 bp, Mus musculus
agctcctgagtcagtgggcattgtagaggagcttcccgaggatggagagcctgatgctgcagaactccgccggcgtcgcctgcagaagctggagtcccctgttgcccactgacactgcccagacctggccctgttctcttgagtggccctcactggaacacgtcctgccatcaagtgccagctccctctctgcttgcaccagggagtaatagccccagttgagaaagacttggcaggatctctgaggatcaaggagaagtgtctgggcttccagtcgatccatccccagtgcccctggcagccatggagatactggtcagctctaacctccctccacttctgccatgttcaactggggccttcaaagtagaagctgaatctctggtaagccttctcttccatgctttctgggagaaggtgaagcccctccaagccctgcttgtgagtatgggaccatgctgcagtgccgaacagtattagcttctgttcccaactgtggaaacccagaggggctgaagacagaccaggaccttgccccaccctcctgccaagactggtaccagtctctttcctctagcccagtcttcccagaacccctttgtgatggtggctgtgccccccgaagccctgtggcatttccatgtcttactggcaaccacacaactcagggaaaggagtgcctgggggtggggcacaggcgggcagcaccgagggaccctgccctgcccctccccagctctttccccatatcacccagcagccactgcctggtgggcctggctaagggtgtgtgctgctccttaaaccactgctccccagaacccaaggcaggccacctccaacctgtgggatgtcgtcaggattggaactattctgtacctactggctttgggcttaaattttgtcttctgaatttgaatgcttgaccccaggaaggaggagcaggtgtggggctaggtacctggacttcgcagtttagaacaagctctgggccgggccgggccaggccaggcctagggagccaaggcctagctgctgcttccttcttttggttttgtgttacaggagtttctggagagtttcagatgattatttaatttgtaaatattgtataaattttaatagcttaaattg

SEQ ID NO: 25803 - DNA, 1134 bp, Mus musculus
gaggccatagcaacaatcaagctatcaaaagcagatattaactgctgtatagataatctcttgtgcattgtgtggaagcatcccctgtcaatcaaaagctgatggccagtgagctgaggcaggactagaaggcgggacatctgacagggagattcaccctggacttggaggaagcaggatgtagcaaactgaggagaggaaactcaccagccatgtggcaggcgtagtctcgtttaaatgggttaaatgggttatgaactagtgggagcaagtctagtttacggccataagcattgcacatacaaatgcgcctgtaagtcataattcaggaactgggctgagcaccagtggaaaagcctgagattacaaactgctgtcccattataaacttaatacatttcctattgtttgctgttctggaagcgaccacccaaccctgttctggaggcttcacagcatagacccatcaaggaatcaatccttgacctagagctcctgctataggccgggcgtggtggaagctatggaacagaagacagtacagcaaaaagacatggacgggagtggatgagacaagcaatatcttaggttctgagtgctgtactaggtagggttggggaatcaccctgtgacctgtaatcaactatacaggggtgtgaagacaaaatgcagacctttcacttctggcgcccacctcaccagccacatgtccaacccaccattaaactggctaaacaatgttaaacggtgttcagaacctgcctaccctgtgtgacctcagacctaaggtagctagcggtagcaacctcccagtgctctctagttgctgatctcagcaccctcatcccaggaaccacaggccggtccattcttaggtctgtagactaagagcccagccctaccctaggtgacacgttctaccaatcattaatgcaagtttttattgagctgtatatacaatttaagctattaaaatttatacaatatttacaaattaaataatcatctgaaactctccagaaactcctgtaacacaaaaccaaaagaaggaagcagcagctaggccttggctccctaggcctggcctggcccggcccggcccagagcttgttctaaactgcgaagtccaggtac

SEQ ID NO: 25804 - DNA, 1200 bp, Mus musculus
catcccagcactggccagtctgagccgcagcccggcatcgccgctggtgcgcttccagctgcccaacgtgctgttcgcctacgctcatactctcgccctgtatcatggaggggacgacgacgcgctactctctgacttctgtgccaccctgctcgatgtttctggggccctgggagcccagcaagtctttggctctacagaggaagccctgcaggccgcagcccacgtactggaagcgggcgagcacccacctgggcccctgggtacgcggggtgctatgcaagaagttgcccgaatcctgctgggcgagggtccagtcaatcagaaaggctacactctgacagcactggggcacctagctcagaccctgggacgagcccggaagcaggctgtgattggtggagagcgagatcgactttaccgggctcggaagaagtgccagttcctgctggcttggaccaacgaaaacgaggctgccctcacacccctggcgctagactgtgccagagcccaccgagcccatgctgtgacagctgaggagatggcaacgcttactggagagttagaacggctttggggaggcccagtgccacccactccaaggactctcattgaggaactccctggctgaactgggtatccatgtcattaataaagatgtgtctggtctgcccgaatgtcagcagtgccttttccgtaaagatagtgccctgtcctaggcttctcttgaagttactgtgtagttgaggatgaccctggaactttgatctgtcacccacctggacagtgagaggttacaggggttaaccaccttgctaatgtacacagtgctgaatagccgaggcgtcctgtgtgctacacaagcactctataactgaactacatcacatcccccaggcctgaggtgcccagttgtctctcctcgtcagacttttggacccacaaaccacttctaagctttccttagtcaactagtcacccccaagcctcaagtcactggccccaggatagaagaaaaacacaggaaaggttgaaaacatttattcaacagggaaaaatactttccttctggaagcagtggcttcctcttgctttcaacctcttaggtggacctgcttcagtagacatagggtatgattcggtaaggcacacgcttgcagtactcctgccaggcacggccatacttttggaggcactgct

SEQ ID NO: 25805 - DNA, 1455 bp, Mus musculus
cggctagaacgaaggacttggttccagatagtacgaaggacttggttccggctagaacgctccctggaatctctcccccagttgtgaaagagaaacgaaagaagaaggttcctgaaatcctggtgagtggggccagacttctctgactcttggtgggaaggcaatgtctgaggtgtgggtctagtgctctggccaacatggctgctcttccctcccactcatgtgccctcatttctttccaccagaaatcagagctggataagtgggctgtggccatgaatgctgaatttgaagctgccgagcagtttgagcttctgattgaatgagatgaactgggatgcccgtcattaagtggggtgacctggctggctctcccctcttcctgtacatattgccttttgagtagagcaggatatgtggggtccctttcactagccttgttacccagaaaggtattgctggcctcttgttatattgtgtctccttgccctggactgtctacctctacagcgttggggatgagaatccactgctctgaaccggaactgtcagaaacagggttagccatgggctgtctctgctgttgcattcagccaccaaccagcagagaggttttgtgttctgctttggttctgtagagttgagagatctcaaagaccagggagacagttaaatgcttgagggaggatttttacattgagtctctggagtccaggatatgaacgggaggaagcataattggtttttaacacagtgacttatgtaggaactggtccgtgtctgtgctctgctgttgacattggtgaacggggtgctgctgcttacagcaaagtgggtacacttgatagcgtgggcctcggatgcaccagtgtaagctttatagtctctgctttgacctctttcctcgcccacatctgtttctttgaatacaagctgtgtggcctcagccctagacaccatgtcacctcatctctcacctactagacagcttttgctgtgagcttaaaactattgctctcatgtgagaccaaccattcctgggggttgctgggaacaaaagtggatgtatcatggcttctaaggttccttcctgcctgccacctctcaatcatggtaaaagctgtggtttaaaggccattggccttccaacctttacagttcacgagagcagaagctgtggggaatgagagctcaggtaagctcctgctccaccagggtggcttagtggatcactcctgcaggctcagtcctcacccgttcctgaatcatgctgaattgctaccatcactgcagacctacctgcctgtgaggaactagtgtgcagcctaagggcaaggtggcttgatctcaaataaactgtgtagaagtttctacgtttgcagactgctttttatttggttgaaggcagagccactgctgggaggccagccccagacaccatgtgtccgggctgta

SEQ ID NO: 25806 - DNA, 1183 bp, Mus musculus
aaggatcagatggctgggtctttcttagaagaggagagaggaagtggggtagcctctctgagggaacatgactggagctggcaggtgggcagagccaagctctggaaacgagtttgcctggaactagaggtgtatataaatagcttgggcctggagggggtgggatgggaggtatgcctgacccagaaagcatcaagcatccttgtgtctttctgctgcttgcctttgtaggttctgtggaagccctgcaggaggttctacagctgcctgctgccctgcgtgcctgcccaccccttcaggcggcgttggctgttgacgctgccttccgggaagacaaccatgcccgactgtttcgcctgcttcgcaccttaccctacctacagagctgcgcagtgcaggaacacattgggtatgcccgccgcaaagctctagcccgcctgtcccgtgccctgagcactcctaagggacagaccttgcctttggacttcatagaacactttctggccctggatggactccaggaagcacgggacctgtgccaggcccatggactgaccttggataaagacagagttgtattcctgaggggtcaatactctgaggaaggactcccaccccctggtgcctaccacatattagtggggaataagttgcagggacacaccctggaagatgtggtcatggctgaggaaggtgacattcacagacctggctctgcagcttgagagggtctcgtctcccacaaggcctgggtcagagcacctggcttctttttcataattcccaaacaataaaaggaactcattatgatctccaaacaataacaggaacttttagacttcatttatttgagggttaagaggggagagagaaaccgggcgtagtggcgcacgcctttaaatcccagcactcgggaggcagaggcaggtggatttctgagttcgaggccagcctggtctacagagtgagttccaggacagccagggctacacagagaaaccctgtctcgaaaaaccaaaaaaaaaaaagaggggagagagagtgcaggggaagaagaaagcaggctgaacaatgggctagactctacactactttgggccccagtttcacccactaccgtgagcaggtgtccttaactgcagggaccccagctgttgctttaaaagcttgagtgtttgctgat

SEQ ID NO: 25807 - DNA, 1192 bp, Mus musculus
gtgtgggttcacaggtgtcattcttgaccactgtacaataatctcatgagggaggatctgtcaccttacagagggtgcagcagacaagttaggttgcctgcccaatgtcacatagtaggtaaacaagccaggattgcgtgtcatgttgacccagtctgggaaccatggtgtatcttaactgtcactccagcaggcttagaatcttgagttttgattgtttaatacaggtttgatccctcttgcccccctaccccagtgtactactgtattgtaggtgcacccctccacacctggctttatttagagtctcgctgtcacctttttccctgctgtgtgatcggggaggttgtagagcctctggatcaggatgcctttgcaagagatggaattatttctgtggtccctgcaaaatgcctggtcctgtcacacactcagcagcccatgctggttttatgtcactgacggtggcacgagtatgtagcttcagagccacccactgggtgactggaaaggacaagctgaggcctgctggttccaccggtcctttctgtccccaggccctggagctggactccatccgcagccaccactggcgcatccagggctgcagtgctgtcacaggggaagacctgctgcctggcatcgactggctccttgatgacatttccagtcgtgtctttactgccgactgagcttcttcagtgtccccaggtccctgtcctcatcagacaccagccagagggatgagcaccagctggccagactaacactcccaaccccaccatgacctgctgctgctattactgcccattgctgctcccccgggtgagggctgtcaccctgtctcccaaagtggcctgcagctgccatgccaaaaggaaaggctgggctgggagggactacctgctgctgccagggtcctaggtgtcgcctcgcctcggtccagcagtgagaataaagcactcttcacccagttcctggctgagccatttgtgagtcactgactttagcactcacctggaagctgagtccagaggggacagagcagagcggaggaagaactggtttagtcctcccctgctaaggaatgggcagagcatggaagctcagggcagggctcgctgggtccatctgcaagtaaccaagcagccttcctataggaggaggcattgaaagagggagtcaaggagga

SEQ ID NO: 25808 - DNA, 1198 bp, Mus musculus
agggagatgtagccaagcatgaactggtctctggccagagtgttcagaaggacaaggagccacttgctgagatgagagacgcatgtccctgggaagacaccaaccctgactgttgggcaggtaggtagcagccatcagcctagaaacgatcatgggatggcccagctggggagtgctgagacccaggtgtagacgcttgtgtgaagtcagatgagggtaacaggatggggtctgggagagggccaaggaaagagcagcagcgcccggagcagagcagaagctgggccacccggccagtggagagcagtaagggggtcttcggagacctacctggcaaagtgaggcttcaggaagcatcaggagccagtctgctaacagtagacctgtagaaagcaagaggctaagtaaaactggtgcagtggtgaagaaccagggaacaggggttcagtgcccagtacccacttggtgcttcacagccttgtgtaacttcagtcctgaggtcctcgtgtaggcaaaaactcaaaatattctaagcaaacaaaaaatgagcatggtatcgaacacctcgaatgccagcgttcagaaggtaaaggcaggtgaatctacgggcttgagtccaacccggtctacagagcaagttccaggccggccaaggctacatagaccttgtctcaaaaaaaaaaaaaaccaaaatgcaggaaaagtccaacatggtgttacatgcctgtagttctggcactcaagaggcagaggctggagaactttgacaagtttgaggccagtttgcgttacatagagttccagacaaaaaaaacaaaacaaaagaaaacaaacaaacaaacaaaaacaatacaagccaaaagatggaagttggtacaatggagtataacacctgttcccaggatgcaccccagaggaagctgtggccgactcagcagatggtgggggagtgggtggagacaggttctgctgcagtagtgcgcagcactcgaggcgtgaggcgagagtttggtgatgagaggagaagggatggaagagtggatgttgttggattgacaagacaatctgctggctttccaaggtgagagttgggctgcagaaggtggaaggtattcacccgtgcctctcaaaggtgggagtcacagagccagagtcaagtgagtaggaagaggtcctaaatgtagagcctgtcccttct

SEQ ID NO: 25809 - DNA, 1889 bp, Mus musculus
cgctgaccttcctccacatctcattccaccctccaaacggaggcacgagtgacttccatgcctgagataccctacaacccccagggctgctgccactttctacccaccagctccttgtctgcccaggtgggctggggcctggaggggcagaaattgggggagggaaagggtcaccatttttcaaggtccataaagactgagcggtgtttcctcagctcttgaataggaaaaccaccatctttcttttaaagctgttccggggttcagcgggaggcatgggtgatgcttggatatgaacagtgggattttgtgcacaggaaccatgatatttttaatatataacattagaggcagccttctttcttgcctcttctgtctgacagccccacactcatcctctcccctatccaagccaggcacctctccaccccaccctggcacccctgtgcccgatgccccagggctgtgtaagcaggaggtccctgctccttcagcttgtttttagactggggctccctcaagggcagcaggttgtttcctgctagccgtgttctgtgctccagtcctctgctgtgctgtggggtgcacaccttactctgtccacatcccctgacaccccagccagcacagcagccacaggtagaagacccaaccactgttatttgttgtggaggcaggaggagttgcgagacagtccatgacgtctaggaaaatgcataagctacttagtgttctgtagtgacacttgatacttgaccaagactttgagtaacttacatcactcgttcaaaactgtgatttttgtctcctctttcctatactccagccttggagcatttccaccccagagccagcatagagctgacatcctagggcttgagtttgctttctggctgaggggaggtcatcccagcttctgctcagaggggtctgaaatgtagcccccccacccccgccccaaggtcaacctttatggcagcttcctggagcccctctctgccttgggacaggcagtaggccctgtgacctggggtggtctggggctggtaagaggaagcctgtggctctggcctgggtgtagtgtccatgcagcacgacaggggaaaacccagccccttccctcgccctgtcatttccttcctctcctcctctgctgagccaaggaggtctgggtgtcctgagagccccagactgagcagtaagaagcctgagctagcaaatgaccactttagtcaccccactgtagcctggggacccggacacatcctgtggccagtggttggctgtcagggtgggctttccactgagctgggtagggcattgcagcctgctcctctgacactgtaggtgggcttcagggagctgcctgccaaccccccagcactgttctgggccctgctgagggtgagctccagcctggcctgttacctccctgcctcagccctccactccttggctgagggtgagagagatgtcatcctcagctgtagagggagtggccgaatgaagactggttctcgcattaaaggaagtttaattgtgccaaagcctctcatgctcccttgtcttttcctggccaaggaggcacccctggagccttgcaaggggtcccccaagttgtccataaccacccatctcctgtgcattgttggcgagactatctggaaactgaacttgatggtgcacacccatagtctcagcacttgggatgtgggggggaggaccaagctacatgagagcctgtccccaaaaatctaaacaccagtagagattgatatcagaattatgctgggcccacttccacatctgcacatcatcacctccctcaagaccgccacagctgtagacagacaggatgggctcccctccctagtgtcctcagactgggt

SEQ ID NO: 25810 - DNA, 1400 bp, Mus musculus
tctttgagacctctgtcccttttcccatctaacttcctgttcttccctccaggtctcagaacggccccgaagtctccctccagatcctgagtcagagagctccccctgatgccctctggcagtgcccaccccattcccaagacagaaggaatgaggaagcaaagagcttataggatgccatactccggctggtccgggatgtgctgaaattcagactcagggagagcctgggtggaggggtaagagcacggcacgcctgggtccccaggaatagaggtctgactccttgccccattcctgctattcccttgggcttccaacacgggcctacatgggcctctaggagtgccgtggctctggtgcccagggaagattgtgccaaagttgtgcttcacagggccagtcccagggaagctgttaggagtcaggatgaggaatggaggggcaggtccttgggagtatgctggtgtcttgtctgtgcagcctggcccaggctgaggcagacgtggagcatgcaaggtctccgctcagggtcaggctgggatatgggctctgattgacagggaaggatagaaaagggggagcgaggcaagtgagagaggggagaaggcggcgacggagcaaagggagggaagaggaggtgatgtaatcagaagatggatgctaacccgaaaagaggagagaaggacaaaacatgtgatgaggaggatgcctgagaggggaggggaggagggagagtgaggcaggggagaacccaaacccgagaacttttctctggggtggggcttgggattgagagcaggactgttgctagcttatccgtccagaaaaaatggttcctaggcagggaggggatgggagggtatttataaaggcttcttggtgggagatagtcaccctgtggggaccactaaagatctccaggcacactttggctcttcccagcaaggggggtccttttctggaagcttcgatctaccaagtgtattaggggaacatagggggcattttattattgatcacagtcactattattgttattatattgctatttttattaaacctcaccctgctacagggtggggagtgaaagaagtatttatctctttaaacgccatattcctggaagggataggctctgatgctccaagatgtgacaagaaccaataaagccaactttataagctgctggcttccctgcctaggtctgtcttgctgtgcaaaaatgggagtgtggaaggaggaggagtggtggggatcacggacagttgagagctggcctcttgagagcattgtgtgccctcaacaagaccacagggcaactttggatagtctccaggagctgtgattttgggcgggattttttgttctggcttggctcattggttggtgttggttgc

SEQ ID NO: 25811 - DNA, 1198 bp, Mus musculus
gtagttgtaggggagtgaggttacattgcatgtgtatgagtacagatgagaggacactgctagaggggtggccaggagctgagcctagaggtcccacggatgatcctcagcctttcacttggcttgcgcttttgctcaggtgcggcagaaggtgcacatagttagccgggaagcagaggcggccgaggctgaagaaccatggggggatgaagcccgagaaggccgtcggcgtggtccccgaagagagtccaagcctgaggagccaccaccacccaagaagcctgcattggacaagggcccgggctcaggacaaagtgcagggtcgggaccacctaggaaaacgtcagggactgtcccaggtactacccgcggtggccaggaagtcggcaatgctgctcaggctccagcacctgcagcatcgccacccccagagggcccagtgctcactttccagagtgagaagatgaaaggcatgaaggagctactggtggccaccaagatcaactcgagcgccatcaagctgcaactcacggcacagtcgcaagtgcagatgaagaaacagaaagtgtccacacccagcgactacacactctctttcctaaagcggcagcgcaagggcctctgaactctgattctgtggcaaggccccaggcctgccctcactcccagcaggcttcaccctcatcctctaattcaagcctagactccgccctcagtcctaggggacccagagctgtcctgcagtgactaggagccttcatttagcccctcttcaggccccagagccctggctcagttcttagaatgtaggtgtcatccccaccagccggccaattggaacctcattgtaggtccaatcccccgaaattcagtggaccatgacaggagcccaagtcacgcctgaacagtagggcattcctcccacttgggggctagattgaccttagccccagagcacagttgctacctggaaaccaaggaccattcagtccctaggggtagatttccgcactttatatagagttccatcctttgggaatccaaatcccttaccccaaagaacttacatattgctgcccgaatttggaaatcttcctcgtctccctagcccctgagtacaggacatgaagctccgactcttatctgtgaatactgagcctcgcccccttcctgaccaaactggcgcaagaacagagca

SEQ ID NO: 25812 - DNA, 1293 bp, Mus musculus
gtagggaagaatgtaataaatcagagttctgatgacaagtgtccactggtcaggaaaactgatctttccacgagtaagaatggtcatattgaaggatggcatgtttcccacagtaatgtgtagcaagagatttgttgtgtactcttgtagcttgagttccaatgctttgtgggcctcattccagtttcctcttttctgccctttaaggcattcagaattgataatatgtatctgtacacttctgattctgggtttctgtgcattaagtcttggaagcaagggcatgatggttcatgcttttaatcctagcactctggaggcagaggaaggtggggctttgagtttgatgccagtctacatagtttaagactgccagggttctctaaagggacttctgtctcaaaaaacaaacaaaagatccaaagagttggagatatgcatcagtggtagagctcttacccaatatatgcaaaaactctgatgttaacactacaaaagaaatgtgttccttgttacattctctagtattttcgttttaaaagaactaaatgtgaactgttccttaactttcctgacaggaggatctttaaaatggctgcttgttttctctgacctctgagatttctttctttttaaaaatttaggtgatttcagtttagttttaattatcatgaactgcttgccttctggttcatatttctgcctgatgggctctgtctgtctttagacttcccaagtaagaagaggaagaggagccgatggaaccaagacacaatggagcagaagacagtgattccaggcatgcctacagttataccccctggactgactcgggaacaggaaagagcttacataggtaaatacacgttctacatccaggtgcatcttcagattgttactgcagattgttctgagtgatgaacctgttgaaagtcttaagattttagtcatgggaacaaggtgtgatgagctatgctttcatagctgtgtaatccgtgatttgcttggccagtcctgcatttgcagcttcttgtttgggcctgctcttagctcggcagcccccttctcagctgctgttcttgctcattggtgaggtgaatgctatcttcctctctggacaggccccagtggagaacactgcaggtattgtaaaccagttgcttttttgtagcatggcctttcaccataatgtcatggttccctttccctaaaattgtggtttcgtttttttataggtacaaaatagtttaagcaaaaagtggctcggaaagcatttatagtttacccattttg

SEQ ID NO: 25813 - DNA, 2556 bp, Mus musculus
cggtgtacccccgcgcgtgtgaccttgggcttctttactaccccagatacgacgactaccaccacgagcgctggcacagggtccatcccgccatggcaacagcagcaggcggctgccgcagcttctccaggaacccctcagatgcaaggcaaccccactatggtgcccctgccccccggggtccagccgcctctgccgcccggggcccctccccctccgccgcctccgccacctggttccgccggcatgatgtatgccccaccccctcctcctccgcctcccatggacccttctaactttgtcaccatgatgggcatgggggtggcgggcatgccgcccttcgggatgcctccagctcccccaccgcctccaccacagaactagacttgtttttttttttttaagaaaatatatattatatacatagagagttggtctcttataaacacacgccgaacctcaccatatggagccagacattgggatgcacgcatgtgattgtgtgtgcacgcatgtgtgtgtgtgcacgcactgggctgggccaagtgactggactcgcttgggaaacgggcagtggtagtggggcgccagcttgagctttcctggcacctgtagcatcgagtgtcttctttgtcttctctcctcacccaactccctctgcctctccccaaaccgggccgccaggatccctccccgcggcagcgatggcccgagccatgagagtgaggactttccgcgcccattggtgacccttccaggcagacagcctcagcagcgcccctggtggacaggatggttcggcaaagcagcctgagttatttttgtggacggaatcggaacacactggctccatattgtgaaatttttattaatttttatctttttcctttgttatttccttatcttttcctttcttcagactccgtccaaggagatgctctccccggtcttctgctgcagataggatccttcccttgtctccattcctctcctcccaaagggagaggggcaaatggtttaggtacaggctttggctattaatgtcaggcttggtggtgggagtggggggtcctatggttctaattgttgaagggcttcagccacattcaaaataagtaggtggtttatctttgacatcttttaaagagtctggataaatctgactcgttgctcaatagggtttatttggcagtgggattcacatcttcctgcactcctgccagcagtacagggcacagcccaagccaccataggccagcctggagtctttttcatgctctggtcacccaagctgcctcagaacccatttgcttctctccttcctggaaagcttccctttatgttttattttgaccccagatgtccagatgttttgcagtgtctggggcttgtgtcccttgttcttcgttctgctgctttgccccttccttccctcttcatggagtgattatgttgataataatgtgtaatgcgcgttcttttcactggtttatctacagaaatttctctgggcctttttttctgtgtttgattcaacactgcactaagggggaaatgttccattgaataaaagagcagtgtggttttccgggtccgtttcttttcttttaaaacctttttcctgaccatcagcaccaagttttacctacctaccctggccccagctcctgcatgtgaatggcttcagcccctcactttttctagtttctagttgatagaactgaaaagcaggctcactccacatttcaggagtctttgtcattgtgacagccttttcctggggctccgacccccacccacattgatgagctctagataggatttgtgtctcctagctgctgcccgacttaaggacctggacctggggaggcatcagcactaaaggtcacgctaactaatcctgcttgtcgggcacagagctgctaaaattaaaactgccaagtggctttttttctttctctgctggtggctctcagcctgccaggactgcaggtctaggggagtagtagggacaaaacgtggtgccctgtgctgagtggccacgtctacagagtcttctgcagttctcctgtttagggtactaggaaaatcaccccttgtgtctttgtgagagccacgtctttggcagctcatacagctgctgctgctttgtctagaggcttgagggcagttgctgtctacccttaggcttcctaaccaagccctcaactagaggttttccctattgtctttaaccttacagtgtgggggcagggcctggccaccctcttcgaccttggctttacctcattgcttccctcacaatcttggtttccctggtgggctcattgggcggttaattagctctttgaagctctggaagcggcaaagtggcgctgtgtgggttttagaagtaaaatcaataaatgacttaaccatggctcagccatcctctggtcttgccctcctccctgtgcagtgtgctcttaatggcccctctctcaccctgctgccagcctttgttaagagtttccaagagcaagtttgaaggcccagctacaacaagcacctgtgcat

SEQ ID NO: 25814 - DNA, 1097 bp, Mus musculus
tatccaatttaagtgcttatcaacgtcaactaaattttctcattccagcagccatcaccactgctggcctgcgagtcagcagtgacctcctctgctcactgcctgggaggaggggactgccaggcacccagaagtgaggccatgccatcatttcctccccctacccccaccgctctcccttccccccactgcccagagagccagagaaaaccatgagaaaggactttagctcttggctctgcctcgtgacagcactgtgggtctttgctgacagtctctagggttcctcacaggtggtcagcgacccatccaggaacttggggtagctgtttcaaccttcccttgtttttcctgcatccccacaccccagtgctgacaactgaagcctgctcctgctgagccccaccccagattccttcttcctgtttttgtaatttttcagttgtgttttatatgttgctcttgtgccaggcatatgtgtggaggtccgagggcattctgggagctggttctggccttccactttttgagaaaggatctttcttgtttctgctgcttccctctgtagcctgggctagctggcttcttggcgattgcctgtctccatctctcatctgaccatagggagactggggtcttggccccacgctgcacgtcttcttttctgtgggttcaggggatacagcttgggttctctaccttgcatagccagcaccttgcacactggcctgactctggggtcctcccacattgccttgcttttgtttctttttgaaactgtggcaaatcgcacgtcacacacatttctagtcttcgtcattactcatgattagggctctgactacactcaagtctctgcacagccctcaccaacgtccaggtgcagtttccccatcttcccacactgaagtctctgttaaacataagctctcctctccctgtccccagcctctggccaccatctctgtttgaactactctgggactttagatgagtgacgacacacagtactacttcatgtgttcgcgtacatgcttgcgtgtgtgtggaggcacacatatgtgggtgcacacatgcatgtgcagatccaaggctga

SEQ ID NO: 25815 - DNA, 1153 bp, Mus musculus
ccaaaaacaacaaaacagagagcgccaggcagaaaggctctgatgcccctttgcagacagaggaaccagaggactggagagcagcctccacggcagctcagcctctgagcaagccgagagcccaagcaggggagcaggcctctgcctctaggaacgcttgtgtcccctgggctcttgaccctgttgcagtgtggcctgttcctctcccccaggaagtgctgtgatatctccactcagggcacagtctgagccacagggggtcgtccctcatgtagatttccttttccattcagaagctattggtgtccagagatgcccgtctctgaggtggacattcctctcaccaggcccttcctccttagtgtcctcgggccctcctcagagttctccttgctcctcggttctcactggttttgctcttgtgagccttcctcacgtgttaagtcacagggatgcacatgacatctcagagccctttagctcctggggccacgagagctcactgccttcccaccaggggctggacagtgactgtctataggctgggagcctgagtaaagatggcaccagggcaggtgctctgtgcgatgcctcttgagagatggggctgtgttattgagtttccttgagtggatctggaagctctgcctccactccacctccacccctggagaaacagtaaccggaagagttaacagtaacctggaagtgccttggaccaaaccaggaaccataaccattcatttctctctgtagattgcttctccttcccttcccctcgccttgtcctccccctttcccttaccctcccctcctctccccttgcccatcccctccccttcccctcctcccttcttctcccctccctttccctcctctccctgtccccttccctccccctccctgtccccttccctccctctccccctccccttctcctttcccctccccctcccctctcaggctcacgtcatcagccccatctctatgtccagcatcagcatggccacccattctgtgctcccctcccccttcctcttccattccctccctcccccttccctctcaggctcacaccatcagccccatgtctatgtccagcgtcagcatggccacccattttccactctcgaggcatcggctgctggccggg

SEQ ID NO: 25816 - DNA, 1184 bp, Mus musculus
  misc_feature (85)..(184): n is a, c, g, or t
actgtgacccccttacctttaggagctccgatccgggagcctggtgctgccaccagacttttgccagcggctcccactctgatcnnnnnnnnnnnnnnnnnnnnnnnnnnnnnnnnnnnnnnnnnnnnnnnnnnnnnnnnnnnnnnnnnnnnnnnnnnnnnnnnnnnnnnnnnnnnnnnnnnnntttgccagcggctcccactctgatccctaggaattgccctcccctccacacccacttccagacagagcagaagtatttttataagcagagattttttaaaagtgtcttactagataagagttggggacacagagaagcaactgttgtgagcaaagtggagcttggggctccctcgcccgatcccaatgctgccccatcaggaagagagaaggtcctttccaggagcaactctgctaagaaagggcatcctatcctgttcctaagtacccagttgccatggagaagaaatcaggagcccgtatactgtgcttccctgggactttgcccctaggaggggacacccatcaatgtcactttatggaccgtgtgcaatgatgtccaccaaagacctgtgttgggaatgagagagagagagaccctgagggacctctagagcatttctgagatacatcacttttgtcaacggctcccctagtggggttaaggaagaaggcaggtgctccccagggggagcccctttctcactcacccattcctcatgggcacagctgcttctggctgcaggtggagccttagggttctgggctaggcatccacagtcactgcctcagcccctctaggctgtgcctttgactttaaaataaaactccacccagtgctgcatgtggatctgtggtttgtgttcatggagagggtgtctggaaccagagttggagggacaggtagacctttgagagggtgtcaagaagacagtcacttagctgtatgttggtgtgcacctgtgtatgcaggtatgcgcgcgcgcgtgtgtgtgtgtgtgtgtgtgtgtgtgtgtgtgtgtgtgtagccctgaggtcctcatggctcatctttcctccgttgctctccatttttaattaattaattaattaattccaaaactgggttttctctgtgtaggtctggctgtcctagaacttactctgtagagcagcctggccttgaactcacagatttagcg

SEQ ID NO: 25817 - DNA, 1184 bp, Mus musculus; identical to SEQ ID NO: 25816
  misc_feature (85)..(184): n is a, c, g, or t

SEQ ID NO: 25818 - DNA, 1108 bp, Mus musculus
gggtgtggcccagcgctcactgccactgcaggatgagctggcctttgctgaggacctggtcctagatgaagagggggcacgggcagctggcctgggggatctgggggcagccctgctgcagctggttcggcgactgcaagctcttcggctggagcgggaggagtacgtcctgctgaaagctctggcccttgccaattctggtgagtgatcagggaaaacacacacaggtctccccataaggtcctccaactgtcaatgatggtggtatgaccctttgttgtggatgaggacaactgaggcataattattggaaatcaccaagtaagccaaggtcctgaattatacataggattctgagccctagtggtgtgccaaccaggcagtagtgagaggggcagtgtggaggttgggaggtgtccactggtgagaaaggataggccccggctcacaggcagagcagcgagtgtattagcccacccagagtatccaaacagatgagtcctgccctttagtcatctcagccaatggttctctcccttcctagactctgtgcacattgaagatgctgaggctgtggagcagctgcgcgaagccctgcatgaggccctgctggagtatgaagctggccgggctggccctggagggggtgctgagcggaggcgtgcaggcaggctgctgcttacgctgccactcctccgccagacagcaggcaaagtcctggcccatttctatggggtgaagctggagggcaaggtgcccatgcacaagctgtttttggaaatgcttgaggccatgatggactgaggcaaggggtgggacagggtggggtggctggcaggatctgcccagcatagggtgttagccccaaaggggcaaagctggagtctgggcagtgccatagcctgctggcagggccagggcaatgccatccgcccctgggagaaggcttcatgcccttccctccccactttgtgtgtgtgggggattgtcagaagccaggaaagtgaatgcccaggtgtgggcacagtgctgccccttgcaagccataacgtgccccccaagagtgttgggggcctcgcggaagccatagggggctgcaggggatgtg

SEQ ID NO: 25819 - DNA, 1155 bp, Mus musculus
ttctttccccataccttacagagcaccagtcgaatcctcaatgggcaggtttttggctcccgatcctacttctttgaccgggctggccactgtgaggatgagggctgctcctgggagcatagccggagtgagagcaccaggtaggcgcctctaccctgcctgaagtgcctcgagatccagcctgcctccacgaggcaatgggaaccagtctgttctgagtgaaacccctctgaattcccagtgcccacccctgcccacaaaagcagtttgccctttgacctagggctctctgtttctcagcctctcccatctcaagaatgtggccctgggcactgcctgggactcaccttgtttctctgcccgcagcatgtccggcagcctgggctctggcagttggtatggtgccatcggacgtgagccaggctggggaggggccagccagacgaggaccactcctctgctcttctcccaggtgccaggacctggtagtcaccaccacagcctctattctacaccacagacgtgatctgcttttactccccttagaatacccaggccccagctcccctgatccctggcccctgtgccaagtacgtctgctgcttcttgcccaggttgccaggagactgtggctgcttctctcctctggccggctccttgccgctcctattgtagtgagcttgtgccatccccctaaaatggaaacaaggccccaggataccagatgcccacagtgccctggcatgacctgccacctctgcttccacactggagccggctacctctcctgtgcctaccactcaataaacagaggctgtgccctgtcctccctcctgtcactcgtctgttccttctcaccttgacctgtttggcatcgggataatcagacgctggcccgtgacatgggttgccaggctgggcagctgccattcacctttggcgaaggtagtgagccccgagcagcagggacactgcacgtgcctctgctcttaaagctctcctggttcagagtagccttctctgtgctgcccaacctggcccgaaagtcctggcctcaaatgatcctcctgccttaggctcagctcaaatacctgaagcgagaggtttgtcctggttgaaaagtcacttccacaggctggggatgtggcttaactg

SEQ ID NO: 25820 - DNA, 1103 bp, Mus musculus
agagcggcagtactcagccatcttggcctgctgctttgccctgtggggacaaggtcagaggtcaaaggtccgcaggggtcagaggcctataaagtgggtgagtatcttggattagagctgatgacagtatgagaggactgtgttggggtccatcagactgcctctatcagaggtctctctagagattcccagggcagggccactcacgagtcgacatggttctcaaaggagaggatgacagggtagggcgaggtcttgaaggctgcctcagcgatggcctctagcacatcacgcaatggcacctcagtggtcatggtgaaaccatgagtgatgaaaggctcttcctccggtggccgtcccttccatacatccagctccacacagcggcagccccacagcagtgcctggcggtacatctccaccgatgatggtccagccagctggcccgctgaaggtaaggctgtgtcactacctactggccaccccatcctacctggagccaacccaccctaaggacgaagagacccctgacacacccaatcaattccagggcaatactagtctctcactcctccagtcagtgtggatgcagtaccatctcccccagaagccctcaggaaaggacagacatcctgagccccagtccctggtggcatcaggtggcacagagtagcattcagcagcatctgcagacacagctggtccctcctccaaggctcccagcactgccccactcccttgaactatggaatccccagataccgtctagagctccctaggacctaactagtatccaccacagctattcctgctactcatctttcctgcaccagcctcaccacctcctgcctaggggatcacagcccctccctgcctccaacccaatctccacagaactcctaccaggtcacactgctttccctacttcaagccatacacgctttgccactcacattgaatccagaagccttccagaccggggtcggtcctgccttcccttcccagccttctctccccagccctctcctcctgtatacctgccattaggcccatacacacacacacacacacacacacacacacacacacacacacacggtgga

SEQ ID NO: 25821 - DNA, 1311 bp, Mus musculus
ttggcacagacctgatctgttttccttcccagagcagctgtctttgctgggcaaggagggctgggctggttttgagtgaggcagggagccctctccacaccctctcctggctgagacacttgtctgtgcttctccccgcctctaccccaggaggaggagatcccggagctcgagatagatgtggatgaacttttagacatggagagtgatgatacccgggctgctagggtcaaggtaagctgaggtcacctagtggagggttgtctggagacacggccccttggggaggcttggccctagggccataccttctttggtttgggtcatctgcctctggaaaaataaggctcacggaacttaacttagctatgttcctaagtggcctcagtccctggggagggtataggtgaactgagagcccctgtcctcaagaagtcactatgtgctgtgttctcccttgccaggagctgttagttgactgttacaaacccactgaggtaagctattctccttgcccttagggtgggtgtgtatgtgtgcagcttatcatcgggatcctggcctctctaacagccccctcctatctaggccttcatctctggcctgctggacaagatccggggcatgcagaagctgagcacaccccagaagaaatgagggtcctgactcagacggccgtggctcccacaggacaatcgctgccccccaacctcgtagcaacagcaataccgggggaccctgcagccaggcctggtgccatgagcagggatccccgtgcccctgcctaggggtcatttcccttgccctcagttttccacttttggggttttttattgttattaaactgacgggactttttgtgtttttatattgactctgcggcgcaggccctttaaaaataaagctaggatacagcctttggagcagctaacaggcttggctggtcttttacgggggacacactgctctacaattgtcaccagctcgtctactccccaggtgatcctgggccttcttggagcccatgtagccatggtgataactcaggctgactcccagattgctattccaagcagctggggagcagtgttgctacctacagtcttcagagtttttatccgcactgggtaaggtctctaggctgttgaggctaaacctcaacgctctgcaattatcagggaagatatgatatgagattgaagctggttttattttcccttcccccatgctgggggttcaacttggggaccaacccattcacgttacaccagtgccctgccctaacactgatgctaaggtactaatctaagt

SEQ ID NO: 25822 - DNA, 1195 bp, Mus musculus
ccagcccccttcgccacaatttttaaaagaagttacttatttcatatgcaggtaaaaaccactggcattttacctgtatgtacatctgtgtgagggggccagatcccttggaactaggttataggcagttgtgagctgccatgtgggtgctgggaactgaatctgagtcatctgggagagcagccagtgctcttaaccactgagccatctctccagcccatgtaacaaaaatttaaaaataaaaattagtaatctaaaagaagagcttggggtgaagctccagccagcactgacaccccttttccactccccaggtgccggaagccgcgaaagtgacaagctgctttccagactccacgggcccggctgcttttatggccctgcttcacagggagaagagtggagcacaggcgaacctcctcagtctgggaggtcactgccccaggacctggaccttttagagagctctctcgccatcttttatctcccagagctgccatctaacaattgtcaaggaacctcatgtctcacctcaggggccagggtactctctcacttaaccaccctggtcaagtgagcatcttctggctggctgtctcccctcactatgaaaaccccaaacttctaccaataacgggatttgggttctgttatgataactgtgacacacacacacactcacactctgataaaagagatggaagacactatggctgcttctgtcattgtttgctactctccaggctggccagcttgggcaggaaagcgcaacacagcatcatttcagttttgcttcctatcttactgtgccagtgtgcccaaccccgacagcagttcccaggtaaagccacaaccacagattgttacaaaaagtccttgcctcctgctcaccacaaggattctgactaccctggccagaaattaaggagacctagaccataagaactgcttcccagattcacatggcaagaatagataattgccaccaaacggaaccctcttggctctcaactagtgtgaggtttttttttttgtttttgtttttaatatatataataatatatatatataataggaggtatcacccactttctctgttgagtatacacttgcaatattgttccttgtggctgcccctttcatgcctcaatcctgccttcatatgactggaaagccttttttttttctttctttt

SEQ ID NO: 25823 - DNA, 1386 bp, Mus musculus
ccaggctctgagcgagtaagttgagtggggaagtgagagggaattctatcattctttcaatgtatgatttgaggttatgtgcctgagcattttacctacatgtatgtatgaagagggtgtcagaccctctagaactggatatacagagggttgagagccactgtggatgcagtaagtgctccgagttctctctccatcaataaccactgggccatctctagccctgaatcctatcaatcttaacagaaaatactggtggtacagagagcctgtgagcttgctttttctgttagtctaatagcctaagcttctgttgggaaggccaactatgctaggctttcagctgtgcagacaaacagtagcataggcaggttctttctgtcctgtctggtgaaaaggacttttgcatgtgcagggtctttgagaatgctctgcagccgaggaacttgggtggaaggagacttgttcagttaactgtatcttcttctcctagacacttaaagaatcctgtaatagcgcagaagatccagaagctgatggatgtgggtctcatcgcaattcggtgataacttgcttttccccctcttcccttcgccaatgaggaaggcgagctgggaaggtggcgagcagcactgggcagagggggggagaagaaaggcttatctttatatttatacatgcctacaaggaagacagactcatccagcgccacctcgggccctcccagcacacgcatggtctcttcactgctgccctcaatccgagtgtccttccctgcccagtcctagcctccccgtcactgtctcggctgctcccccatagttggttattttttatttggggcagtgggtgcatacggggaggggagggtgttcttcccaacctagggtcccagctgtcttcacctgttcttacccacgtccctcctcaataaagaagccagtcaggcgtggttatatgttgctacggtctccagtgactttcttctcttaagacacagtagtgctgaattggaagccaacacaaagccttttcttgatggccttgaaagaaaggtcgctgaagagtgagctgtttgctttgtcagggtggccactaggtggaagtgtcgctcaacaactgatgacctacctgcattctgatcagctttgggttgatgttctgtgcagtgcagtcttagagtgaacctgctaggtcaacactagaacctaacctagactcaaggtgggtcagaaagcaggcctgagactaatactgacaacagctcctgctgctccaatcctgagctccacaccactatcttcctcccacactgtgaccaacactgaacttcctcatttgctcccaaaagactgcttcctgggctagcaagatgctgagtccagc

SEQ ID NO: 25824 - DNA, 1648 bp, Mus musculus
gctggcctcaaactcagaaatccgcctgcctctgcctcccgagtgctgggattaaaggcgtgtgccaccactgcccagtttagcttataccttcaatcccaacacttggaaagtagagataggtggaatttgaagccaccttagctacatgagaccctgtcttaggataaaaaggagggctggtgagacaaatcctttgggaacaacactggtagctcttccagaggatctgggtataattttttcagcatccacgtggtgtctttaactccagtctcaggcaccccagtgccatcttctggctttgtagacaccatgcatacatatggtacacatacaggagaacacccttgtgcattaaatgaataaaaacaaaaccctaataggctctttgaattgatctgaatttacttctgtgtgacctctattgactgtaattttggggctgttcagggttattcaagaaaagcagcagcccttgaattcctaaaccggtttgaggaagccaaacgaacctatgaagaaggtttaaaacatgaagccaataatctccagcttaaggagggcttgcagaacatggaggccaggttggcaggtgggtattcattcagcattcccttttttatttagtaggattaatttttttttttttttttttttttttgggttttttggtttttcgagacagggtttctctgtatagccctggctgtcctggagctcactttgtagaccaggctggcctcgaactcagaaattcgcctgcctctgcctcccgagtgctgggattaaaggcgtgcgccaccacgcccggctggattaatttttaaaacagtgctgtcctccccaaagtgaaggtatgtggtaggtgggctatgtttgtcatgaagactcaagttaatatttcatactactgtactgtctttcatttggacagagaggaaattcatgaatccattcaacttgcctaatctataccaaaagttggaaaacgaccccaggacaaggtcgctgctcagtgaccccacctacagggagctcatagaacagctgcagaacaagccgtcagacctgggcacgtgagtacaggccgcaggacagaagctctctgatgtgggccactgaggaggataggttttgtaattgcatttgtaaaaaagaaaagttggtcagcttgtaatagcaagacattcaggagtgttacttccaatcttgcccatgctaggcaaatgccatctctgagcttgtactcctgttagtaggtaaggatcatccaggtataggaatctgttaatgagtgccaaggtaaggagcagttgtagcagccagcattagtagtacacatctctaagtccagctacttcgatgattttcttgctttttgttcttatgttttttgagagtttttctgaattaccctggctattctggaactcactatgtatatcagtccagcctcacagccccatcaacctccgcctgaaataaagggatgcaccatcatagctggcttgattaccttttttaaagtttttgtttttgttttcccctatcttacatccggagttagtgtttgaactacctgatatgggtgctaagatctgaactctggcccttatgagagagccacaggattcttttttctttc

SEQ ID NO: 25825 - DNA, 1152 bp, Mus musculus
cacacgcaccagtcacatcacacatgccattaaaacagaactgaaatcagtcctgggcttcacaatgctagatggccagtagaaagacaagggtgaatgtgaggagtagcaggggagggcactggacctcccctctacacacactccctgactcctataccaagggacagagatgcctacaactcagccagagatccttccctttagcttcccacttctcagcataggaataagatccaagtctccccgtcccctcacaggccccctcggaggcccagggggacacagacagacagacagacacacacacacacacacacacacacacagtggaagccctggtggaacttcaagccccaaccactcccagcccaccctgtgcaccacaggctatcatatgcccacaggccaatgctacccttggcttcaaaaataaaaatttaaaaattcccaccccgagataattgctctctcctctcgcctattgtggtggctctgcggtcggcaatgagaagcaattattcacggctaatgattataatcaagtcaaatagaatttaatggacacgcattctcttcctgcttgaaactttacatatgaattaagcacatatgggtttcacgaggctcggacgcagatttatgcagccctgaaaagccccacattgcctgcgacttttatttcactaataaaggctgatttatgggctcctcggaaacgcgatctctgctgcctcctggtgggcgactctgacagggtgaagccagggcccaaaagatcgcagggggttggggagagaacccaggccactgaggactcctctgactaagaccaatacccgcatcaaacactagggacgcaggctctgcgtggaaaaaccaatgtccaacatctgcttcagctactgcttgccattcacttgcctaacaccaagaggtgttaggtccactaaggcaagcgagaggagggatggctggccatctacaggaagcagcgagtccttggcactcggcatgatgctaatggtgtcacagtgcaggtgtcgaacccttggctcccgtgcaggcggtaagtgagtgtcattcccacctcgtgtccccaacaatccgacagatcactctccctcatccccatcgtgcagagacagaagc

SEQ ID NO: 25826 - DNA, 1206 bp, Mus musculus
aggatgtccctggacctgttccctccagcccagctgcctcacacccaggagtaactatagtctcaacactgcctgccagccagtccgtccatcacagccagctgatggtgcctggggctctcttggaatgctcaccagtttttaggcatttaccgattcttttgaagtgtcccaatcatttatgtgaaatatccacattggcttcttttaaaacaactggcaaaatggctccctttctctcctcccgcctttctttttttccctttttctccaccccactcccacccctgatgttttgagtctggcactggacttctgatgccccatgctacctcctttaattttttttttttttttttttgagacagggtctcacataacccaggttggcttcgaaccctttatgtagctaagaataccataaatttctgatcctcctgtctctacctcttttagattttaatgtatttcccccctgattctgggaatttcattgtccctggggctactcctatcatgaggggcttgcagagtgtgccacacgaggaaagggcaccaactctctccatgtctctcttgacccgtgtgcagacagctttctagcctggggctgctcctgctcctggaagccactctgggctctctgaaaccactgtcagaattccttgctgctgagaggtccagcttgtgccaggagggaattgtgggtatgtggtgggcactgtgcctagcaggcgggtggatcagccccggcttcacacagccccactcccaaaacagagtcaccatcaagtcaacttagcagtagtttggtttccctacccacacacctgggaaccgaggaccagcaggggacctggaaccccttaccaccttctcttcccacctgccatctgtctattcatgggaaaggcctgagggctggcagtgagggtccttctgtcctgcacctggctggtggtctggccaggagagggtctcgcctgggaaactcctcccagaagcctctggccctgctttgcttcgggattggtgtatctctagcagatgggaaatgaagattcagtgagatctggcagcaccacagcctgaatgggtgactcagtttcccttctccaagatttgcatcaagtaggtgaggggggttggcagaaaactagagagacccaggagggcggggtataagaaacaagatccaaggcaaca

SEQ ID NO: 25827 - DNA, 1109 bp, Mus musculus
cttaaacagcctgagtggatctcccaggggtttccacaggactctgagagagacacagttgctaaaggcccacatgccgctagttgcatggaggaatctgaccccttaacctgccactatctctacagagagcctctgcccttacagacccctgagccaaagagcagagccattaaagacctgtagcaagtgcacatgcatttacacagcagtccctgttctccaactaaggtccagggagtagttatagcaggccagctataacaggacagaaacactgaggcacacagagggaggactagcaaggtagagtctgatggatggacccccatcagactagctgcatggactaagccaagtcaggctggccatcatctctgcctgtgggcttctgagcctggcctgtctggcttccactcttcaggggaggttttgcctataatctttctgagaaccaaggtgggatgtgtatacctagtttctccactcccccccccccccgacatcccccctccatacactcaaaaagcaagactgtctcacttcccacttcccacctggcctgtagcccagtcgacctcagctctccctaccctcagacctcccagggaccctcatatccaaccacccccccacccccaggcagcatctcttcccaggcactggccctggcagcctgggccatttccattttaaaccttcggaggaagccctgagcaatcgcccacggcaggcaccagctgacaggtgatgtttgtgcctctcctcctggggctggcaggaagacacgcagttggctttcaactccagaaacctgagcctggagcccctgtgtgcagccgccttcccccgtgcttgcagggaggggagccccaacccacatccctctgccaagagagtcagaggtcttaggtcctcctttgcctacacccactctcccacccagacagcctcccccccccaactcctaagctacctagggttgaaaaagggtggggctggtctccatcccccaaaggatgcaagaacggaggtgaagcaaggctggaccttgtcacccctcacctctgttcccttgccttggctttatttattcacatcagacctct

SEQ ID NO: 25828 - DNA, 1099 bp, Mus musculus
tgtccctgggtggggcagttcatggaccttatcgagcaggtggagaagcagacctcagtagctgacctgctggcctccttcaatgaccagagcacctcagactaccttgtggtctacctgcgactgctcacctcaggctacctacagcgggagagcaagttcttcgagcacttcatcgagggtggccggactgttaaggagttctgccagcaggtgccacctcctctctcactctgctttggggccctccttttctcttttgtgtcagggtggggcatgccagggtgagctgtgggacctgggggagggatcctgggacaggcctgacctgcccctgtgccacaggaggtggaacccatgtgcaaggagagcgaccacatccacatcatagccctggcccaggccctcagtgtgtccatccaagtggagtacatggaccgcggcgagggcggcaccaccaacccacacgtcttccccgagggctccgagcccaaggtctaccttctctaccgacctggacactacgatatcctctacaaataggaccggctggcctgttgtgccccgcctgcctcccctgccaggcgctagacatgtacagagggttttctttctttctcttctttttcttttttttttttttttttttttgtgtgtggttgtaaatggtcatatttcactcctcccttctcctgtcatagaaccttccatgttttattaaaggggatgctggtggtgagcccgagtgtgcgcttccctgctctgccgcccttccctacctgcccgctggctgccttgtgtctggctgtccctttcccgaggatgggtccccagctttccaaccatctaccccaagcattcctgccaagagaagttggaagggaccaggcctctgtgggccccttctggttccttggagttctgctcccataggcctgccctttcttccttagcctcccaagggtttctgtgggaacttgaccagaggtctcaagccacccatacaaagcacttacagacttgctgttctggccagggccccagatacaactctctgccaaccttcaagggcctgcatgattgaggagtactggggtga

SEQ ID NO: 25829 - DNA, 1307 bp, Mus musculus
gtttagtaaaaaaaaacctgtctccaaaaaaaaaagaaagaaagaaagaaagaaagaaaagatggagagctgttagatgagatgccagacatcaagctctggccttcacccacatggaaaacagcacacatacacaccagtgagcatagtggcacttgagtgtatttccaggaccagggcatcaggaacaggagaatctcaagtttaagcccaggtctgggtggggtgcatagtaagactcctgcctgcaccctttccccccacagataaatacatctttttaaaaaccaaagacctttatttcaaggctggaaatggacttgacccagtgtcccctccatccttagagtctctctgtgtctgtatctccccctctcctgtgctggggattgaacctcaggcccaagttgctttctttagtgtgggtctgctggattttctgccttggtctttgccactgagggacttcccatgcctaaggactacctgaactgggagtgcctacagaattcttgccctgagggatccttctttcttgtactctgtgtaggatatcaccattgggctcacttcctgcttcgtgtgttgtcttctgcctgcgggctgggtcctgtcacacctggagagctacaagaagcgggagtgaagggagcagtcttccctcatcctttgactagaccacttttgccagcccaccttgatcatgttgcctgcattcctggctggccttccccgggatcatgttattcaattccagtcacctcttctgcaatcatgacctctcgatgtctccatggtgacaactgggaccacatgtattggctctgcttggtggggtccccctttgtaacaataaagtctatttaaaccttgctccagaaatgcatcatgtccttctgcaccaggcttctgcctccacacagaaacgaggatgctggtggcctggggtccacggaggaacatctggccggtccaggccccagtgctaaggtttgttgggtgtctgggaaacaccagttgttattgagcagtctaccttgatgcttatcccttccagttcccttgcctgtgccaagttattggctccctgtaagtgcatgtgtgccatgccttgtagctggaatcctttaccgagcatctttcctggcttggatgtccgtccacgtgcagtatcttgcaagtagaggtgtggtagtaaccatggcattttacgctgggcactgctaccacttcatgtcaaattcaaggcctcttactttgagcacttgtgaatgcttaccgtctgagtggtcttccttatacttcct

SEQ ID NO: 25830 - DNA, 2171 bp, Mus musculus
gaccgggttgcacaccatgccccatatggacaaatggaatgttgttaatacccacgtttgtaaaaggcctggagtctgctggtccccagaaagaactggatgcaaatctgggcatacaacagaccttggacatcttttctctggggacaaagtgctctttcagagaccatgtagcccttgatgtcaaggtgcaaaggtttgcactgtaatcttatagatccacaggtggtgtctcgggaccagccaacttcaggagggagtctgcctccaccactgtcagtaagacaggatcaggaagagctgtctcttacgtgtttgtcatagggatgtggcatctctgggcctttggactttgctgcattttcatgatcttgacttgacctttttattcaagaaggaagtcaaagtcctgcctgttctcacacctctcttctcagcccagatacctctgttcttagtctcaaggggaacaacatcagggagcctctcgtcttccccagaagaacccttccttcctggtatagctgaatccatttcttcctattcttggtgctgatagctctctgaaggtggggtacttccctgccaccctccctgactgaggggccccagccagcagcaggcccctttgcctgttctcccgagccccacccctcaccgcctcaatgaggcactcgtgccactgtcttggcacccctgggatgcctttcagtggcgtaccactgctttcctgtcatgggtgtcaccctacagtgacaggctagagccagaaggccttcctcctcaggggatacaggcttagaacttgaactcgccctgacctctggatcctgttcttcaaggaagcaaaaccaaatccttacctagaaaaacagacttgccacttccccattgctgcccctgagttccgccttgggaggcgtggcagagagcttgcctttgtgcagttgctttcagagactctgctaccgagctgagtctgttcaccttacccagcctgactcagctgtctgttctggcaagtctccccaaaggagtcacctctcgcccagatccttggcttgtgcagtagcctggactcagagagtcctttcttgcttggtctgtccgctgttgaacactctgtgctgttgttagcccttggccttgcctgggagaaggccttgcagctttacactggaataggtctgcttttgtctggcttgctagcttctgggctatacctctggtgagagttggagctgcccagaagggattggcatgctccttccgagaatcatgagacaggagcatgcttgcaggagttattccctaatctctgtctgtcttagatcatgaatctctgatacctcctacttaggggtccagaaggaacccccagtgtaagccccatgtaaggtgaatagagtgtctcgtctccagttactggacacccagcaccaggactcatggtgctcagtgcctgccctgctccccaccctctgcaggccccatcccaaagggcccttcaggatctctcactggaccagcgggatggtggccaagaccagcagattactcctgtgggtgttaagcccagtggttcatcaggcatcgtctaccgccctcttgttttgagaaacagcaggtctaatctactgtaccaggctcttttgctttttgttccaggagtgttaaaatggttttaaaagttttcgttttgttttagtgaacctattccatttcaggttatttttgttgctgttaaatgtttatggttctttttaaccttttctggagggttggggggttatttttgtttttaagaggaaagttggaaggtaattttgttttatattttttttcctagcagttcattatcactggaatcaaagggaaaaaaaccatctctctttgtatccattttatttgtatgtcattaataaacagatactttgtgcagatgctgggatggcatccagatactgggtgccatgggcagtgggtgtcaggcttgggctttgggaggcgcaaggctgttctggccccacacccttcctgcaaaggaagcctcatggagcccaagtgcatgtgtttgtgccatttcccagaagttgttgggtgaggtaagggatgtcagaataccgtctgcttggcatcctggagcaggcctagagccaggcactgtgact

SEQ ID NO: 25831 - DNA, 2133 bp, Mus musculus
cctgtgttgtggatcttggggatccacaaacaggcttagtggcagaagcctttatctgctgagactatttttcttttgtctcgtgtattagtgtttctctatatctttgtaagtgccccacatacatactcgctgctcatggaggccagaagagggcaccagataccctaggttttagatggttgttagtctgctggagctgtcagtgctcctacctgctggaccatctctccatcccctccctcccttttcatatttttagtttagtttaatggttatttatattccttgctttccaggctaataccaagttcaactcccgctggaccactgatgagcaacttctagctgttcaaggtgggtcaggccatggcgagtcccaagaaccctagagacctttaacctttccaggagctgaaggtggaggggaagcaaacagttctgaggtatatttacagtctgatgccttttttttgacctttacagctattcgtagatacggcaaagactttggggctattgcagaggtgattgggaacaagactctgacccaagtgaagaccttctttgtgagctatcgtcgccgcttcaacctggaagaggtgctgcaggaatgggaggctgagcaggatggggcccccgcagctccggtccccacggaagaggccaggcgaggggctcctgtaccagccacagccctagaagaagatgatgaggtgagaagcagggatgagtctccagggaggaggtgagtctctaaggatgagtgtgtgcaggagcagtctcctcacctttttctctcccctcaggtccagattacatctgtctcaacatcagtaccccgatcagtaccccctgcaccgcccccacctccaccgcccacctcgctttcccagccacccccgctgctgaggccacctctgcccacagctcccacattgctccgccagccgcctcccctgcagcagggccgcttcctgcagcctcggctggcccccaaccagcctccaccaccgctcatccgccctgccctggctgcctctcgccacagtgcccgccctggtcctcagcctccacctaccctggttggagctcctttggagccccctgcaccctcactttgagcctgaatcctccattgcccagaggctcctgaacccctttggctggatctctctggcagcactaaggacagaagggactagggctcttgccaggtctttcaaatacccaaagctgccagttggcacagcttggacctgtgggttctgcatgtgttcctggcagctgagcttgtaaacccccagccaggggctagatctcagggcctgcagggactcttgcttcctggctgtgactggaatggctgcctccttgcctgcctgcctgcagagggcttggcctctgggcctaccctttgtgtgggggtaatgactttagcctgggggatgggggagaggacaggatgttagctggcctcattcacctttccttctttttagcaataagtcaggtgcagtggaaggggattggggtggggatggcagaaatctggtgggaagaatgttgggtagctgtgaggagacccactttgtccacccccaaaagtttggagaaagaagggttggggacttacacagacatgggtttatttttcaacatttttaaaaaataaatgcaaccttgaatgtatgagtcttccatgtgtgctgtgggtggaggcaactgaccacccagcattggcctccaccgggacctagacagtaaccaattctcttctgccaggcaggcaaggccacatcttgcccaggggtggggactgggtccccgcccagcagggagaaggaacagtaggcagcagctcagattccaaacattctctttattacgtatttgatccagaggagaaactaagtgcagggtggggggaagggggctaggcagggaggggccaccttgcctgggtgtcctggccccggaccccttatcttgggagccaagccatgccctcctggcccccttggagcacccgggctgttccatagggcaagaggggagaggaggagcccttggtctgagccatagccagtggagcacgggctggagggttgaggttggcaaggttcctggaac

SEQ ID NO: 25832 - DNA, 1321 bp, Mus musculus
gaaaaagaaaaaaaaaaaaatcccagcggccacctttcctccctgccccattgggacagtcaagactggatctgtggggctcctgggagggtggctcagggctggaacactctcaggcaagagtggtggagttccctggcaggccctccgccaggccctctttgggcttctcccctctccccacttcttccccccttcaagcgacccaccagaggtggccttcccctgcccccaagcccttgggcttacaggcctttacactgaggcccagttgggggtactgcacagccctggagagggtgggcggtgggaccctggctccctccacaccatatcctctgtccttccccagagctgggcacttccttccatgagctgctgtggggacatggttccccttctcagaagtctgtgccatcttcaggcaggctaaacccagtactggtagaggggaggggaatgggccatgggctctcagcccccagggggcagcttgggaacagggacacagcttctccgttctgggagtctttgtctgaaagcacagcccctcaccatccccctactgcttccccttccttggcattaatctgggcaccgttctcatctcacagccttgccttttcttcctggcattgccgcccctcctctcaggagactgtccagggcctccatggctgcctggcggaaggctggattgggcggcagggccaggagtctcttgtcctccacagggtggggcaaagtaactcctgcttgctaacctctgaggccagtgtgtgaatgggtggctgtaggcgcttggctggtggtggccactgcatcccttaatttatttctctgctgtttcagttcttgagaaattggggaagtcctacagaggctgcccctgccctcacctgagttgtacattttttttgtgatgggttattttttatttttattattattgttgttttggttttttttttgtttgtttttgatttatgacaattccactcttggccccagttgtcgtcctgtcactccctcccctgtccatcaccctggctcccagaccaggctcagcaacacattgagtcttgggttccaggaaccttgccaacctcaaccctccagcccgtgctccactggctatggctcagaccaagggctcctcctctcccctcttgccctatggaacagcccgggtgctccaagggggccaggagggcatggcttggctcccaagataaggggtccggggccaggacacccaggcaaggtggcccctccctgcctagcccccttccccccaccctgcacttagtttctcctctgg

SEQ ID NO: 25833 - DNA, 1175 bp, Mus musculus
gcctcccttctcccccctgcatgtgcacctgcttcttagagagtcagaaagggtttgcctgggtatttattcaattggaacttttcccccctgagacagggtctcactacatagacctggctacctagaactagaccaggccggccttaaactcggggatccacttgcctttacttcttaagttctgggatttaagattacaggtgagcactaccaccacacctgaacaacttgggactttttagaagctttctgtcactcatatgcttagccttccatctcaccccaaataaaccaaactaacatttcatgtacagagctgggggcagagttaaacagtgcctcacagtcactgaagggctgagtagtgtttggtgtaggtagctggtttggcatttggttagagatttcttttttatatttgagcaaatggtttcttggcaggagccttctgtactgtgctctcagtgcttgccccatgtccaaggtttgcccctctgctcctctcccctcctcttccccgcaggttgttttaatccttttgcttataaacaagtgcagtagaacgtgtctgcccagctcacatgaccttggctatctctttgtggggaaaccagcatcagcattagatgccacagtcatgtgacctcgtgaagccgtccaggtaaaagaggggagattccaggagggaacgtggatctgccaaggaatgtccgtgggattccttggtaaggtcaggtgggaagtgtcagtgtccacattgcatggcttcgcctgggaggagtttccttctgctctgctcttcttacctcagcattccttcttttagcatttcttatattctgttctcacatcttgtctatagggatccaggcatgacatgcagctgttttagggaactgtctgcgacagatgttggtagctcacaggagagcaatactaatacctctgaatcttatcttcctaaatagatatcctgttagtggtgggcaggcggtgataggagcctgtccctttggaaggggcagtcaggaactgaaagtgtagctgagctgagcattcactatcacacatgcacatacacacaagttctcctcttcaaggctgaagggcagcctgagcttttggtaagtattggagtatacccatgcagcagtgtgtgtgtgcacttgtgt

SEQ ID NO: 25834 - DNA, 1192 bp, Mus musculus
gtgtgtcgggcgcggagcagtgcggctgagggcaggggaggagcgaggcaggcggccggctgcggcggttgagagtaggcggagcggcgcggccgggccgaaaggcggcacaacccagccgggggtcgggggggggggtgcggtccggagccgctcggagccggcgaggcctagcccgagcggtgcatcaccgggctggcgtgagccatcgcccggcctccccgcacccccggccggggcccatgcagcgggtgctcctgctgtgagaagccccgcccggccgggctcctagccttcccttccctatcttcctccaagcttctccattccctcccctgagataccggcgccatgtccagcgctcggacccccctacccacgctgaacgaaagggacacggagcaggtaaggagccctcagggctcccctaattctgtgactgggcccctgcaccttacggaggctccctccctcagttctcctcgtgctcctgctttcttctacaagcctaggctgtcatctggccctgggttccagcccttcacatccctcttccgaatcctgacctgggacccacgtcgtcctgactgaactgcacacttgtatttctgccaaacgcccctcgcctctcaccgccctcctgcgctcttccgtgctatctccccagcttccccctctcttcccttttctctcaggggcctttctggtcttcctccacccacgcttaaagcagccaccttcctgctcctcgaataataccccgcgatttgccgcggattgttgcccacctctttctgcatctctctagctttgtaccctctctacccgcaccggctctcacaatcctcggttttctccctcaagagtccgtgtctcgggagtgtgttctcggtccctttcccctttcacttccccagctttttctatcctcctttcccgttccaaattgggctctccctgttgcttgcaacccaccagctccaccctcgtcacctttccaaatcgttcgcctactccttgctcatcactttcccttcttttcggcaggagctcccaggctcctggcactggcatgtgtcgcttccgtgtttcccatacagctgtcatgcgcatagttttcccacaggttgcctttggggttccagtcaccgctcccttcagagtctttggatcactcctgttctcttccccc

SEQ ID NO: 25835 - DNA, 1549 bp, Mus musculus
gtttttgtgtttctaccttggcccagctgtagctttgacattctcagtaccttcaccatgttgctaagatatttgactgtgtgagacctatcaactcaaaggatgtggagcctggatgaaggccgcagaacaaagctgggcactaactcagggtgactgtgtgctatatatgctctaccttctcgctcctgtgctgtgcagccaaagccatggttagacttccttgggctttccctaagctatcacttctctgtgcagtcttgaagttagacgttggagagtgacatcatgggccctgtgaacccatatgctgaatgcccagggcagaagctgcatttagtgcttgctctgtgcctaaggctataggccagaccttcctggttgattgaggtgagccttgtgctttctctggacttctcccagcacaagacactgggctgtggaaaagagaaaagccctgttagtctggtatggtttgcagtttcaaggcccattggaaggtctgactgtgctctctgctcccatcccttcccagcctcccctccggggctccgtgggacactggatctccaggttatccgtgttcggatggaggaaccaccagccgtcagcctcttacaggactggtccaagcacccccagggcaccaagggggtgggaacaggtgacaagccagactggcccacagttctgtcagaatccagtgccactgttaagggacaaccaaaggcagggagtggagtataagttttcagttttctagagagggaggggcgggaagaaggaaaggtgggcgggaggaggtagttatcccccattggcttaaatctcagatctgcctagcttggccacctgatggagattttttaaaaccaggtgccaggacaatgtggagggaggaggggtggcatcactgtcacatcgggctactggaaaatgcctgctcttggccaagccggaggtaggcagaggcggcttaggttgttgggtggtaggtaaggcattgggcctgtggagaacaccttccctaatccttcgctgacctaccctctggccccatatctcctcctccctctcagctccccaccattctcccctggcacagtgccttatgcagaggtggtcatgatggggttggaactgagtcccactacctcgggggacacctttcctcccccacttctggctcctacagcaggaggcctccattacctcttaccgccttgtccctgccgagggctcccgttacaacccctttacctgttgtcctgttgcatctattgtcctgttgtatatattgcctttgttgacaataaattattttttttttattaaaagttctgtgtgggctatcattgggaaaggggcatattcttagagcagattgaggggcaggaaaccgaaaagtggtcctgagtgggagccagagacccctgccagggcagagcagcagtgagcccagaacagaggttgcttggacctcagggtctgttttaacttaatgtcagtcgcctgagagacccattttctttacttgacctactgaccc

SEQ ID NO: 25836 - DNA, 1197 bp, Mus musculus
cctgagcccctctgagaagagcaacatcttagaagcctggagtgaaggggttgcccttctgcaagacatccaagctgaccagccatccctgcccagcctaggtagtaagggtgagggctgagggagaagtggggcctgtgggggccctcgagctcagtgggcttttgccccctcagagtcaggccaggatggccagccagaccccatctccaacccggatcctgtcaggatgccagcagagatagtggtcctcttggattccgaggacaacccatcccttcctaagaggctccggcccagaggactccgcccccttgagctgcccggtcagtcaacagggaagctttggtttagtgggacatcctgtgctaaggggctggggtgggcaggtgttatcaggaacctgaggttaaagagtaaacctcgggtaaagagtgagtggcctgaaagtactaaagttgttttcttttgcagttacccctgtcatagagcaagggaataaaaagccccgtggtcagagatggaaagagtcccctgagaatgaacctgctagaaagaagagaagcaggcatatgaccaaaatcttggaccctgacccaggtgaggggacttagggctgctgagcctggctgtaacactggagcatgaagtccatgaggaagtggacaccagagaacttctgcatgagctcggctgaagcttagggcttgagcctttgggatctgtcctcttctactcatacacacttctgtgtggccttcttccagaccccccgtctcctgagtcacccacagagacattcgcagcaccagctgaagtccgacacttcactgatggcagcttccctcctggcttcgtcctccagctcttctcccacactcagctcaggaccactgactgtaaggactcttctaaggacagcagagcagcagagggcctgccccagccacaaaacccctcttcaggtgagccctgctaggaggggccggtgaggaaagctgagtccctggatcacagccagagcccagatagaggtgctgggtgtttaggccttcaagagaaggccaaggacaggggtttgaatgctgaggaagctggcctctaagtggggcatctctggcagtggtcattaagttttgctaggccttccaacgcttggtgctcagctcagaccatgaggctggagctctggaagag

SEQ ID NO: 25837 - DNA, 1197 bp, Mus musculus
agagataagctgtgaggtggtggaggaagaactgagatgggagtgtggtgaggggattgggatatactaggtatctccatgttcccctggcctttttgcctccaggtccagtgtctgctcttcacaaagagaagtcgctgcaggcactgtgccctccctttaaagtcagggtgcggtggtcagggcgtggggcctgggttctggggccagtgcagcccttgtggtgagaaaacaagaaaagaaatcccttctcaccctccagagccggagctcaaggttcaagtgcctcaggcccagttccctagatcgagatggattttataccacggattttataacattttttataattcaagattgtcagtgggaagggaccctggagctcacaaactgattcctttcaaatctcaactcccaactcccagttcagtgagctttgcactatattgccctgcttccaatctggcaagttactaagatttctttacctattaggcctgttaaagtgggtattgggcactgcaggcccacagcacttgtgtactgcacttacgggaatgaggatgcaggcggctttcagcagtgcaggcttgccagtcagaactccaggtggggcccactttccctgccgctgaggtttccccagcagaattaggctgcttatctgtgcttgttttgaggccatcaggtattctggaacagctgctggctcagtgaaattccagttttgaccggccagggttttggagacagtattaaatcttaagaacagagactatggatagtgccaggctgtgcacttacccttttgctttccacctgcatgttttacgctgagggtgattattctcgcccacctctacataaattggagccacagattgtcgtgattgccagagctcactgcagaagttcaggttagctggggcagatttcagcagtcttcagggtagcatcattttagacgcttgctagagacacattcttgggccctcctgataggcctttcccatacagttgcaactcccaaggtggttgtcaagtacctctgcagtgattctgccataatgacctatggcctcaaggggctgctgggtctcctccctctattctgacatgaacaggtgaagttccttcattgttttgttaatgatatgcttgctattatgacccatatgtaaatgttactctggatac

SEQ ID NO: 25838 - DNA, 2631 bp, Mus musculus
caaagggaaagacatgggcgctcacatcatcatcccaagaccttaatactctgattcttcctggatcccagtgaagggcccagggatcactgtagtgagacagaatcaggccctgcagtaagggcagtgtggtgggacccctcaggcttgttccagacagttgagccttacctgacttcagccatccctgagaaacagacctagaacaaacctatattaaaaacaaatattttcagttttctttttctttcctcaataggatccaagcaaagcttcctggaatcgccaaaaaaaaggcagaataagcacgtgaagcaagaagtgcatcagttactaaaacaccatttaatagttataacatcatcacttgtactatgaaggaacttgctcagtgtcagctagagtttggttccaagttgtttgttcattttaatttggtgttctctcccctcctctccctttaccctcagtaccaagcacaagatgtgttagactgaaaaaagaactgatctcttagaaccgtaaagaataaagattgaatcagattactagaattaatcagaccatagtggggtggagctttacatgtaccataaaaggagaaaaagagaagtgtctctagggtcctctctccagttccaaggactcgtatacagctcccatttataattttgcccttatttttaagttaggaaataatgattaacttatgaataaatagtatggggcaagagtgggatttcttccgttgggtttgtatggccctccagtcccaccttcctgccttacacataagcagctactcttactgctcctcttcttccttaatgaaagaactctcagctctgaataacttacagaactcccagaatgccacctgagaaatgggggttggggggacagtgggtggagcagtcagcaggagggcagccaccaccctctctgcggctgctcctagggaaggaagggctctggggctgggagggccgtgtacagcccttggtctgggatccatgtgttggttgagaaatcattccagagtgtgctttcccctctccctgcccaccttacctcacgtttaataaatatggttgtacttttcttattatgaaataaatgtctgtaactgctgtacactgctataaacttgttaaagaaaaataatctgcatgtgggctcccagccattgagttattgtaatcctatctcagtctgtggaggaggaggtacaagaacatgaaaagccttccttctatttcttccctgctgcttcctcctgtgctttgcagtgctttagcctgaggaccaaagccccactgactgcaagtcatgtatctgttggcgtccagaggcctggctgactgaagaggtccatttctagaagcaggacatgcagctgcttggagtcagtgcagttctaaaaggatctccattttcagacatattgatgaaatagttcataccatgatccacagtgctcatttggatcgtgttttccagaacttttaggttgtgggtggccaagcaagaccaggtggtactgatagatacaacagaacttacagtggcatcagtggaggggtccaggatcttaatttctcagaccttgcatctctccttcagcatggaaatccagtcagcttgaaaactggcatccaagagtccttcatttctcaaaccctgcctgccctattgtgaggaagtaggagctggggatttcaaggtatttgatggtcacaaagttctgtgactgtaaaagtaggaattagtcgtctttccagtccttttgggaaacgactcacagactgcgataggtagaatgccttactccatcttctcaagttcctttgcccctgtacattttgaatctttcatttccactgtagacaacactcccatcaccatgctctgccctcccaggaagtgaacgcacccatggtctatggggtctcctaacaagggacctcgttctgcactggaagcctccacagtttgctcttttctttgttgctgctgctgtgttaaaataattggaaaggtttctgtgttacatgagagggttttttcggttttgtttttttaaacaaagactcgtagagatgaaaaaattactaatgaaattgtgtacgtgtctgtgcgtgcaacataaaaacagtagtaccaagaagctcttttggtccctgtaaaactgcaaattgatgtattaattataaataaaaaacacagtgactgtctcatcagtctgcaactttattctttgtacagtttgggtgaagtaagagcaaaggctttcactcactcccaccctcattccaggaattttgagaaagaactcccaagattgcaaggattcccatggcactgagcacaagctgcactacgtttgttttccaaaatgaagttagagacccggtaaaggatgaccttagaagtgactggggtgaaaggcacctgcctggggatgggaaggaaggttccccacttgccacaggaagcagccgaaagctgaaactgaactggtttcatgcatgtctggtctgacatcagaactcctctgacttgctctgcccccaaactaagttggctgtgactcataaggctggattctagatttattcaacatacctctgg

SEQ ID NO: 25839 - DNA, 1099 bp, Mus musculus
ggttctagtactcacgtggttgctcactgcactgactagcctctcctaatcacaggttctactcataattgagaacaagtgggacattctatacaggacacataaaccaagtggcaagtcttaggcaatgccttgggatgttgcccaccagttctaacatcacatggtatacaaaattaattgaaaatcagtcagtaaacataaaaacttttttaaaaatcttacaaagccagggtggtggctaaggttagataagaggacttgggttcagcccaggctgagtaatgagactgttgcaatggaagagaagaaaaaagaaaaaagtatctacattgtatggggctagacaaagggttcttaggtcattggatgtactaatctcagaataacttaattagactttatcaaaaccaaatttttaatttttttttaaatttttgcataatgaaagacatcactaataagtcactgccttaagaaagttcatgccaaaatgtatttattggactatcagaaattggactaaacaaactaattatacttccctgttaatggctagtttttggctatcccactttgtgctcccagctggtcgcaggcgcacacctgcccaggagctatctcagttccacagatgaaagactcacacacattagctcatttttaagctgccttattatagggtctgtggctgggctcttcaaagccttccagcccttccttcaagcccttaccttttactcctagctcaatatttctaaatctgccctcaacttagttgcccagttaccttctgtgaagcccataggtcttgctgcccaagacactttcaagcttccttccctggacctcttttcttttccgcctacgttttggaagatctcccctacagctctgagtctgtctctcttcccctaaattctcctcctcctcctagcctgcgggaacctggaattcctgcctctttctttccactcagccattggccactggcatctttattgatagatcaaaacccaattgtgggcaaggacctccagcatcagtaaacacagattcccaattaaatcaaagcatcagacccactcctctacattta

SEQ ID NO: 25840 - DNA, 1151 bp, Mus musculus
tcctggggttccttggaggaaaaatagtggagaacagaggaagatacctgatgtctgcttctggccccacaaccttgcctatgggcaggtatacctagaatttgcatatttacacataccaacaccacacacacacacattcaagatcataaagccagaaaagtctgagaagctgtcgtcttctgcaagttaaaggagtgatagcaatatgtgatgatgccctgcatgtctttgaggctggtgaaacgggcactgggtctgggaatgtagctcagttggtaaaacgcttggctaggatgcacaaaaccctgtctgtgttcagtccccagcaccatataaaccagtagttgtgacacattcctagaatcccagcacttgagaggctgagtcaggaggattactagtttgaatctagtcttaacatactgatttccgaactaaaccaagtcccaggctaacctgagatacacagtgagatcctgttctaaaccttgaaagagacagaatataagctatcccttgtgttcattagtggcattgagtccttcaggttttttcttttccttctttgcttcctttcctttttgtttttcctccttctctttctaaacaaggtcacattgtgtcatcctggttggcctcaaacttcacagtgattttcctatttctgctttccaagtgccagaattacaggtgtgtaccattatcatttcctccattatctttattatttctctagtttctagcatccaatcaggagattccaagttgtcttcattctgccttgctaaagtagtgattgttttggattttttgtttttgtttttgttttggtactggaattacaggtatgtactatcttgtgtctgacttatgcaggagatttccaatttagatctgagttcttcttaaaacatgtgtgaaaattgggtatagtgcacatggttgggattccaacactctcagaagatgcatagtgagactctgtctccaaacacatacatgctccccccaaaaaacccatatgtgacagtgtcctctttgtacaatgtatcatttagatatttaaaggcatttggaatctgttcagttccttccttccagaagaatgcttgtctccacttcctcccctggccctggttcacctaata

SEQ ID NO: 25841 - DNA, 4016 bp, Mus musculus
tttttactgaattcctgttagtcctaaaataaggcctcaagcccccttctcctcgttaaacttcaactgccggagtgctgggattacaggcctgtgctgccacacctgatgttttaggatatccaatacaactgaccctagtcaacttgacacacaaatcactgtgaagtcataccctttcctttcttccccaagatcacacattaatataaacatcacaggatgaaacattttacaaacttaaaaagtcccataggctggacagtggtggcagatttctgagttcgaggccagcctggtctacagagtgagttccaggacagccagggctacacagagaaaccctgtctcaaaaaacaaaaaaaaaaaacaaaaaaaaaaaaaagaaaaagtcccacagccttacaaattcactcattaagttttcagtctttaaaaaaaaaaaaaatacccagtctcttttaaaatccaaactctctgtaaaactctaaaatctctttttaaaaacgttttaaagtctctcaactgtgggttcctgtaacatcaaaaataagcactttcatactccaagagggaagagctagggcacatgatccagtctgtcataagaccccactacactggtacaactttgttagggttcctgttgctgcatcaaaacagtgacaaaaacaaaacaaaacaaaacaaaaaacaaaaaacaaacatgggaaggaaaaggtttattctacttacttctgaaggaagtcagaactggaactcaaacagggcaggaacttggaggcaggagctgatgcagaggccgtggagagtgctgtttactggcttgctctctagcttgttcagcctgctttgttatagagcccagaatcttcagcccagggatgctcctacccacaatgggctgggccctttcccattgatcactgattaagaaaaatatcctttaggcttgctcaccacctgatcttatggagtcattttctttttcttttcttttttttttaaagatttatttattttatttatatgagtacactgtaacggtcttcaaacacacaccagaagagtacatcagatcccagtacagatggttgtgagccaccatgtggttgctgggatttgaactcaggacctctggaagagcagtcagtgctcttaaccactgagccatctcaccagccctggagtcatttttttttttttttttccagagacagggtttctctgttgtagccctggctgtcctggaactcactctgtagaccaggatggtcttgaactcagaaatccacctgcctctacctcccaagtgctgggattaaaggtgtgtgccaccactgcctggctggagtcattttcttaatcaaggttccctcttttcagatttcaaggtaacatagaactatccagcatgcctgactttaacatagactttaagaaaaaaatacttaagcattcaccaaaataagtaattggattcctgattactggcatacagttccctttgccatcgttctctggcactcaacagcatcgggggacagtttgctgcactatcaattgatgcctgccgttgagtgacagagtaagatattttccagagtcattttgggaaatatcctggatcgttttcagaacactgcaacaaccaagatgctatctgagctttatttgaccttaaaaaactgtctaggacagatgcggtccacagcttgttccccatctgcagcagcctgcttgcctagcgctccctctgtgagttagcatctttacagaatttgctgaatctgcaattgcactttgggtcatagattgctacttagcaacatcaaatcccacagctttatcatcattatgtacttaaaatttaaaaagaacaaaatttgacataaattgatgtccagtttcaaatgtcattttttgggggactcatcttaggacatgaataaaattcagtattatgagtatctgtgcctcatttttaatacctcatttcatgtccactccattcccccagtcccaaccaagacgttttctcctggttttcctttcctcggcagcttcttttttattttccaaagtatgttttttgtagctcagaacatagctcagagaaaagacaacctgaagcctctttgggaagaaaaacaagataaaaatatgaagccgattctgtgcctgcattgcaatgtgattggaatgagtaatagtttctcattctgtttagcatctttctccacctatcaaacatgggactgtaccatgcctgcctcggtggggcgatattacgacacgaccagataattcaaaaagaacattacagagggggggtctttaaatattgtactctttggagtcacaggctggtacgtatcaggcaaagacatcaattaggatttataataaaaaatttgtagcttatgaaggcataaagaaacataatctgccagctagaaaacattcacataaacaagtggaaggtggggagactgggcacggttaatctgtagcaggggctgcagtggcgggccggttctagagtttagccacgccccttacgtcaggctttcccccattcccccaccccctacccctcacccccgagaggcctgccccacccgcgggcccagtcactgcgtcctttcctgcgggagcgcagagggacagttcttgcgcctgcgcattgcgtcgctgcgcgcctccgaggccgccgcccgcgcgtccaggctctttgtgcgcatgcgcgctcgcactccttctctccctgcggagctcggctgagtcagtcagtctgtcggagtcagtcttccgaacaggcgtcgccgggaacttcggagagccagctgctggattattctgtgtcccctcccactctcccgccctacgtctctcttcacccttctcccgcccttgctcgtacagccatggcggagtcgtcagcggccactcagtccccgtcagtctcctcgtcgtcctccggggccgagccgtcagctctcggcggcggcggcgggagccctggagcctgccccgccctgggggcgaagagctgcggctcctcgtgtgcgggtgaggcgcgcgtggggcttggtccctggggagcgcgagctactgggtctccgggaaggggcgagcgacctgtctgggccgtgggcggctttagtctcttggcgggcatttgaggaacaggctaagggggaggggagcgaaggaccgaggtgaggaaataacggggtgtgaagaaaacaggttgggggcggggtggtgaactagagtgggcgttgacgctgaccccctgcaagggagggcaccgcagtggggtgaaaacggagaaaggctatgtgcacccaatggatcgagtgctggaggcccgagagccctagggtgggtcggggggtgggggtgacttagagcaggattagcgagcctcaggggattgtgacaggtgggacgtaggagaaatgaagtcgctaggattttgagaggggtagtggtggaaaaggtggcgttgcaggtttgcagaccggttgacacaatcttaaatggatgatatagccttccaaaaaaaaatttttttttttttttgttcgccagaaggatcaggaagttctgttactgtttttggctaaactgaatgccagatttttttttttttttttttttttttctgagactctgaggtagatgaggcgtgatgagaatagcatgggaagatttgggagggagctgctgatagtccaagatggatccttggctgcatctgcaacacagccggctcttcaccggtggtgcatcgtgggggtggggacacgcagtcagttgctatattctagaagataataaatacagtcttgccaagccatcaccatgttttgatttcttgttttcgatggcctattctcaatagcagcataacaaaagggaacgattgctgcaggggaaagaattcagacaaagcctgggctgcttgaacccccttctctcttgtgtgtgaaaagactaggagggacgct

SEQ ID NO: 25842 - DNA, 5955 bp, Mus musculus
ccaacaagagcccagtcagcttctggatttctgccaatgccatcacgggtccaattccagaggaatggcagatctgagaccattctggaagatctgagacagggcactgtaataaatgaactgacttctgctctggtttccaactccacttggcttggaagcagttctttttcttgctgttacagactcaaggctactcttttctctgttctctgctttttgcactttaaggggtgggggtggggctaaaaggaaaacagaaatgcagcttttgagtctttgatgtgccacatagtgccttttcagaccagtgcatccctctgcagccatggaggctaaggaacggagggcaacctcatgaaatgtggttttggatcaatgtggttttagttcttttgtacctttgaagatttgtctttttaaaagtttacaccacttgaaaaaggctcagaaagaaaggcccactgaaatgatgctttattatccttcaaaagttttctcccagtactggtgattgaacctgttgcctgagtatgctaagcagttgctctcccctgcagctgcccccagcccacttgactgtgcagactcagggcttgcaattactcgattctccgcggctgagcttcccatcgtcctctctccctaaggtcctgagtagttgaatacagacttgtggtgccatccttgcttcaaaagccatatttatatgagttctctttgctatgcagcatgaaagacgttaagtcacttagtactctgtttcagattgtaaggccttacaccgaggaggctggcagttttgtcgacattgctttcttatttttatttctatagcttctttctagaaaagaggcaaactattcttaaaaagtcagtggttcataataaaaggaactagatactccatggaaattgtagtttgaatgaaccatgagacctctgataaagtcaccttgaatttgtgtcttggttagattcactgtacatttatgtcactgtacatttatgccacaaaaatagtcattttcaacagagaaaaggcatgaccaaatattactccttttaattaatgttcactttcattttgcctagcggtaataccaaatgatctaatctaaagtctctacctaaactctgtgtatgtgtgtgtgtgtatgtgtcgcatggtgtttccctggcgtgtagaccaggctagccttgaactcatagagatatttgtgcctctgtgtaccattgtgcctggccctaaactgctttttattctatatactatctaatgttcataatatcaaagctagactgttaattttatttagtaagttttcccttttttttcctccatcgaagaagaaagtgtactcagtctagccaaactatttaaaatatctcttaagccaggtggcattagcacacacctttagtcccaacacttcagaggcagaggcaggtagatcatctctgtgagtttgaggccaacctggtctacagagttaaattccaggatggccagggctatccagagaaactgtctcaaaaaaccagaaaacaaattccctctcgattcttcttttggttagtctagcagtttgaaaataattggcttaggaaggataattgctaagactctcatatttatttttttacatttaccttgattatgtgataaagttttatctattgctttttttctttgacttgtagtagtgaattattgtggacctaaaccttctgaaggtatagaagccttgattttggagataatgtgagattttgttgcaggaaggagatacagggttttggcaaagcctagtgtaccttttatgtacatggagtatgagaggaaggtaagagaaaaggaagtcttcatttcatttctctttaatgcacaactttcttgttagtaacggctttccagtcaaacatttaatgaatcctgaattaatattaagtattttatatattttcataccatctcatcctgaaaatgttagtagtttttccttttgctgtgacatttgggaatggttccaacttgttttaaaactactcactgctcgtgagtgatggctgactgtaaggggcttgaaactcactcctggcgtagtgcagagtttttaggtaatgtcccctatccgaacgcttgtattgagttaagtactcctgatactgagataaggtcagagagggttttggggacagggttttgttatatagtctaggtcagcctttaacttactttgtagtttagactggctttgaatttgaggttttgctgcctcagactccccaagtgctgagcttgtaggagtgtgtccccatgcccacctctggttctcttaatgatgaggaagacgatgtggggaaactttgccattgcttcagtattacatctgtgtgtgtgtttaaagtgagtgttccattaattagcttactctgctcctgggacatgtatataaagtttctttgagggttggcctgttttctaactttaaattgtggattttctattacaattttcaacacaaaatgcctttttatgactggctggaaatagttctgaggagactcataactggttgaaagagtctcagcctttgctttgtggctctgggacatggtgaaggagtcagatcagtgtccctataggtgttctgtacaggcaatattcgtgcacttctgtcactaagtgtagcacatttatatgatataatggagatttcattaaaaataactcactttaggaaaagctagttgttgccaagatgtccttgtttttgttttgggtgctgggggtgcattcacagggctctgtgtatgccaggggctagctctatgcaccaggtgtagcgctttagtgtgcctcttatcaaatggataaaattacaactttgattctttcactgagaaatctctcatgatttattgcttactgataaattttgagcatctcttttgaagaataccaaaaatctgtctcatagatgcttgtgacatttctgtcctctttccctccctctacccctttctctttttctttttctatgcagctccagccagaggtttgtgtttgatacctgctgtatactgggtcaggcctctgaatgtttatgcttgattcactttctctcactcattaagacagacacgcattgtattttccatgtagtttctttagtaggtcacacacagtggttggtacctggaatatgtgaatgagacaaaaattcagtaggttaatataagcccaagcaaaaggaacccccctcccatctcccaagtgccatggaaatatcaaaaagacctattttgtttgtgtaagttttttggaatatagttgagtatgattttatttattttttttaatcaggtggccaacatctctgtattttgcaacctagcaagtggaaccagtgtgttttttgtcaggagtgaggccataagcaagcctcatttagcaaagtgaaaagtattcttgtctcatgtggcctgccgtagtgtctacggttattttcatcaggagttgtactgtggctccatcttggacactggttcttatctaccttttcatgctttagattaatgtacagggtgtactaaaagaaaatgggactctgctttgtagctagggattgctgaagtggctttgtgctgtggccctgggatcatcatttataaacatcagtaggtgaaaggtgggtgggtgggggtggggtgaatgatggagactgagctgacccatggactggaagtacccagacaggagggctcttcagcatttctagcagctttacctgagctctgcctccaggtctgctccccctagagtttgctatgtttagaaccatcagggtatcctaattcagatgattgtccaagctttttaaagctgtcatagtgccttctcttaatgcctgcctcacacacaaacaggtaattgggaaaacattttaaaatttttgagagtgtcctctttctcactctaaaaaagccccattgggcactgtgacttgaattcctacatcttttgctgttttgttttgagaaagggtctcagtgtaaccttgtctgttctggaactcaccatatatatagaccacgctggccttaagctcacagagatcaacttgtctctgcgaatcccgaaacctttaacacacagaaaaccctaatgtattaaatacctaatgaataaaaaggatgagatcataactatgaaagtcgttacctatgtactccacagcaggaaccagaacgctttcttacaggaaagaatttcatgtgccagagctggtgtaatgctcttacaaagtgaaggtcacattaatgcccaaaccttatagtcaggtgatcaaaattgttatgaatgtaaaccttacaagaggtaaatcttgaatatacacagttgttctcaattttattttaaaaatggtttgttatgctttctgctaggtcatttgcctttgaatggctttaagactatagttttctttaaagcacaatgggaatcaatgatgctgtacatttaatggattaaagatcacaccaccgtgtcacctgtgtgtgttgttactgtactttcttgtggaaggatctatagaacagagtggggattggtcaggggagttggtgacctggtcagagatgggaccacagtgacattgagcctggttagcggtgatctagtaaggctgttgtccaatgccttgaaagcagtgactagacaggagagttgtggactcactatgcagccttgtcactcattggctggactcagagtggagttcaggctggctttgaactcatagcaatcaccagcctctgccttaagagcactgggagtgggcagtggtggcgcatgccttaatcccagcacttgggaggcagaggcaggccgatttctgagtttgaggccagcctggtctacagagtgagttccaggacagccaggctatacagagaaaccttgttttgaaaaaacaaaaacaaaaacacccccccccaccccaccccccccaagaaaaaaggatcactgtgattagaggagtttgccactacactgggctcctttttttttccttgtcagaacgtggtcatggtgcatggtgaacaatgccttggagaactgtgaaagagtctccagtaatacaggcagagagccttttacctcaagtgaattttgttccccttgattgtttacaaacatgattttgtgcctcctgcgacaaaaatttgcaatcaacttttaagacatgtttctttttggatgttggaagatagctgtagagctcaatttggtgaaaggctatgctgaatgctgtcctcagtgtgctctgaatctggatatagtcttcttctgccttgcttttgtgctttcccagacataatctatagtacttgccaggcaattgtgttatatttgttctctcctgagaaaagtttttaaattgggctgttctgagaaagggctgctctgttaatatttagtatgtgcttactggcatttatttacatttttttctgaactcaaccttcgttgaatcattacttttttttttttttttattacatttgtgtataaaatgcactgaaactgaagtaaagttgtctgcagcattgaattgtggtcctcattctttaaagtcttcaaatcccaggtctctgacagatctacataggtcgatgaaggtcagcagttgctcagattgtcctcacactatttatctgatgatacacttgattctgcttccacctgtcttgtctgggattatagactaagttgtgctacatccaattcatgtggtgctggaaatatgaacaaatagaagagtactcgtaacagggcaaggcagtgcagagattcctccatcttatattattgctgaggctattctgtaggtttagctagattttgatcttgatggagaatctgtggaaaataacccaactctattc

SEQ ID NO: 25843 - DNA, 1159 bp, Mus musculus
gaaggcaaatagagtgtgaacaagatgagccccaaatctgtgatcaacacacaccatctacactcaccttttcatctacacttgttttatctacagtcactcactagtttgtgaagcctttgcccaaagtgaacaaaatatcacagctgctttcatggttttggccaaagggaaccagccacatcctaggaaaacacactgattatgggaccttttggtcacccaaccatgtaaacaacaataatctctcataaaattaatctataatatagtctgggtgggccagggattattcagtctatgtttctacagcataccctgcaatatctatacaatggccaaatggtcaaacaatgcatttcccagaatttgtccttgtcatgaaatgatacatgactgtatctagcagagcaggtagaccaggaaaaaggaagctgtagagtgtttgatttgaactattcctggaaatgaagtctgggctcactttaaatctaaagtgacttaagactctgtctcctgggaatgtttctgtaatcccatctacctgcccagagctgtgcccgggtacacactgtagaagatactgatgaaggatttgctgtgttctaacattatactctaagcaaagagccgttttcttcccttgtccatttaccaagattgatcatgtacctttcataaaggaaaaaaaaaccctcaaatttccaaggggaaagtttttactgcaaatatatgtctttattgtaatccagggaaactagaggtcagaaaaagaggtggctgagaggcatcccctagacaccaaagcccggaactctaggaagaatctatgtcaaagaagagatggcaggttggtggttgaggttacttagttaaccttctaatgaaataaactatattgagaatctctaatatatatcttagtatactatactaaatttagggaataaaatttatttggtgttgattaatcttaataaaaatacagtgtacattttatccactgatattatgtatcttatgttcataaattaaattggcttgtcattctacttactcatatgttagtggtttttccattattgtgataaatactgtgaccaaggcagcttagacaaggcaaggtttatctaggtttatagttccagaggtgagtctc

SEQ ID NO: 25844 - DNA, 1566 bp, Mus musculus
aacatgattacaggcacatcccaggctgactgtgctatcctgattgttactgctggtgttggtgaatttgaagctggtatctccaagaacgggcagacccttgagcatgctcttctggcttacaccctgggtgtgaaacagttgattgttggtgtcaacaaaatgaattccaccaagccacaatacagtcagaagagatacgaggaaattcttaaggaagtcagcaccttgaagaaaattggctacaaccctgacacagtagcatttgtgccaatttctggttggaatggtgacaacatgctggagccaagtgctaatatgccttggttcaagggatggaaagtcacacgcaaagatggcagtgccagtggcaccacactgctagaagctttggattgtatcctaccaccaattcgtccaactgacaagcttctgcgactgcccctccaggatgtctataaaattggaggaattggaactgtccccgtgggcccagtagagactggtgttctcaaacctggcatggtggtttgctccagtcaacgtaacaactgaagtcaagtctgttgaaatgcaccatgaagctttgagtgaagctcttcctggggacaatgtgggtttcaatataaagaacgtgttggtcaaagatgttagacgaggcaatgttgctggtgacagaaaaaacgacccaccaatggaagcagctggcttcactgctcaggtgattatcctgaaccatccaggccaaatcagtgctggctatgctcctgttctggattgtcacatagcatgcaagtttgttgagcttaaagaaaagatcgatcattattctggtaagaagctggaagatggccccaatatcctgaagtctggtgatgctgccattgttgatataatccctgtcaagcccatgtgtgttgagagcttctctgactaccctccacttggtcattttgctgttcgtgacatgaggcagacagttgctgtgggtgtcatcaaagctgtggacaagaaggctgcttgagttggcaaagtcaccaagtctgcccagaaaactcaaaaggctaaatgaatattacccctaatacctgccaccccagtcttaatcatttgtggaagaatggtctcagaactgtttgcctcaattggccatttaagtttaatagtaaaagactggttaatgataacaatgcatcataaaaccttcagaaagaaagactgttttgtggaccattgttttgtgtgtggcagttttaagttattagttttcaaaatcagtgcttttttaatggaaacaacttgaccaaaaatctgtcacagaattttgagaccattaaaacaagtttaatgagaaaaatttttttctttgatcattgtatctaaatcttttaatgtatcttctacacctgagattctatcttccatctcatgtattctgttggtattacatcttttctgtaattcctgacttctttcctaggttttccattttaagtgttgcttccatatgttttctttattgtttctacttccacttttaggttttggactgctttgttcaattcc

SEQ ID NO: 25845 - DNA, 1578 bp, Mus musculus
ggacacagagacttcatcaaaaacatgattacaggtacatcccaggctgactgtgctatcctgattgttgctgctggtgttggtgaatttgaacctggtatctccaagaacgggcagaccctcgagcatgctcttctggcttacaccctgggtgtgaaacagttgattgttgatgtcaacaaaatggattccaccgagccaccatacagtcagaagagatacaaggaaatcgttaaggaagtcagcacctacatgaagaaaattggctacaaccctgacacaatagcatttgtgccaatttctggttggaatggtgacaacatgctggagccaagtgctaatatgccttggttcaagggatgggaagtcacacgcaaagatggccgtgccagtggcaccacactgctagaagctttggattgtatcctaccaccaactcgtccaactgacaagcttctgcgactgcccctccagggtgtctataaaattggaagcattggcactgtccccgtgggccgagtggagactggtgttctcaaacctggcatggtgtttacctttgctccagtcaacgtaaaaactgaagtcaagtctgttgaaatgcaccatgaagctttgagtgaagctcttcctggggacaatgtgggtttcaatataaagaacgtgttggtcaaagatgttagacgaggcaatgttgctggtgacagcaaaaatgacccatcaaaggaagcagctggcttcactgctcaggtgattatcctgaaccatccaggccaaatcagtgctggctatgctcctgttctggattgtcacatagcatgcaagtttgttgagcttaaagaaaagatcgatcgtcgttctggtaagaagctggaagatggccccaaattcctgacgtctggtgatgctgccattgttgatataatccctgtcaagcccatgtgtgttgagagcttctctgactaccctccacttggtcattctgctgttcgtgacatgaggcagacagttgctgtgggtgtcatcaaagctgtggacaagaaggctccttgagttggcaaagtcaccaagtcggcccagaaagctcagaaggctaaatgaatattacccctaatacctgccaccccagtcttaatcagctgtggaagaatggtctcagaactgtttgtctcaattggccatttaagtttaatactaaaagacttgttaatgataagaatgcatcataaaaccttcagaaggaaagaatgttttgtggaacattgttttgtgtttggcagttttaagttattagttttcaaaatcagtccttttttaatggaaacaacttgaccaaaaatctgtcacagaattttgagaccattaaaacaagtttaatgagaaaaatttttttctttgatcattgtatctaaatcttttaatgtatcttctacacctgagattctatcttccatctcatgtattctgttggtgttacatcttttctgtaattcctgacttctttcctagtttttccattttaagtgttgcttccatatgttttctttattgtttctacttccacttttaggttttgga

SEQ ID NO: 25846 - DNA, 1102 bp, Mus musculus
acagggaagggggtctacatggtatgttgtgaaggcaaagggggaaacagagtatatcaggaggtgacagcatacaggagggagagaagcatggtggggtgtctagagaggcttcggctactgtatgacattctgtcttaagcttttcaggaaaatttaaagagaagacctgctggttaaatattaaaaataaagtgaactgcaattatactgtaaactgctttcagagatttcatcggtgacaaaactcatcagaagcaaaaaatgtggctgtcactgccctgcagagcagcacaaaccgtggggtgcagatctaagaactacagccattgtgggttgattgggttccctcaaagaatacaccgaagctctagcctcctagaatggaaatgaagttgtttagatgtaagtagctgagttacagtgaggtcatcatactgggcatggtggacccttgtaggaagaaaaggacaggcagggcaggatggaggcagagcttagagtgatggacactcaagccaagtaatgctgaggcttgtcgctagaagagataagggaggattctttgtagagaacatactgatgttgtgggctttggaattctagtctccaaatctgtgagataataaaatctgtgttgttttaagctacccgatctgggggatttttatggaaatgaataaactggttctgctgtgtgtgaaacatctactggcttggtaggcagtgatgagaaaggaattggggatagatgagggaagcaggtgtggagcaaacagggtgggtttttttaaaggcaccccatgtttctgagagaggaagattttagagagcatcctggatgctttctgtgggacttcctgtgcaaagcccctgagagggtcctgctatagcctgtagcagaaggcttgaatattcaagacaccaggaatggtttctgagcagcctttgactgggactccaaaggctggggcagcccttggatttaaccatgttttaccccgagtctataagaacaaatgattcctttgctgttttccatgtgttagaatccccttactcaggaatgttgcctgtcctttgataatcttttctgagtatc

SEQ ID NO: 25847 - DNA, 1527 bp, Mus musculus
gcttttccccattgaatcaactccccagaccccaaagccctattttcaaaggaaatgtctggtatctggtaagatgttcagaacatttctttgttggacggtagtattttacacccattggctagaggctttgagcgctctgggaactgaagcttggtgagagtctggacaagcagaaaggtacatcttgtagtggtgaccagatgaggtcctgtcccggggccatgccacaaaggcatcatacctgcagaaccagcagagaacaacacaaaatgatgaaatggaaagagaatgggaggaaggggaatggacccaccctttttttttttttaagtcccacattctctgtttgttagcctgcgaaggccccactcatgccgtggaatgagtccagcatctttcacatcccaagacctgtaagcctcaacatgacagtgaaggtaagcagttgaggcctgcccctcagggtgggcaggtgctgtacagatggacagagatccccctcattccttccttctgtgtgtgtctatcattttcagggccagaatgaagaccctggctccctccttacccagttccggcggctgagtgaccttcggggtaaggagcgctctctgttgcacggtgacttccatgcactgtcttcctcacctgacctcttctcctacatacgacactgggaccagaatgagcgttacctggtggtgctcaacttccgagattcgggccggtcagccaggctaggggcctccaacctccctgctggcataagcctgccagccagcgctaaacttttgcttagtaccgacagtgcccggcaaagccgtgaggaggacacctccctgaagctggaaaacctgagcctgaatccttatgagggcttgctgttacagttcccctttgtggcctgatccttcctatgcagaacctaccaccctcctttgttctccccaggccttttggattctagtcttcctctccttgtttttaaacttttgcagattacatacgaattcttatactgggtgtttttgtcttcaaataaaaacatcacccctgcctcatgagattgtgactttcatccttccttccttctagaagaactttctcttgctcctgatctcttttgctcctccctgcccctgccatagtcgcagccagttgtagacagctattccagctctctttttttttttttttttttttttttttttggtttttcgagacagggtttctctgtatagccctggctgtcctggaactcactttgtagaccaggctggcctcgaactcagaaatccacctgcctctgcctcccaagtgctgggattaaaggcgtgcgccaccacgcccggccgctattccagctcttaaattaatcatttagagaccaaggctagagaagggcccttccatggttaacagcaaagtgtcttggctggagtaaccacacctcctcgctctggcccaagaatcttgggaattgccaactcttccttatctctcttagcacagtctttaagaaaa

SEQ ID NO: 25848 - DNA, 1149 bp, Mus musculus
cctcaggaaacaaagagaggagcaagtacatttgcctcagggtcctatctgtgctcttccccagttacaatcttggccgcgtcttctctcagccaatttcttcatctccaatttgagggcattttcaccccacatcctaagtgttaagtgttagagctgtgcgtgcatgttttctcttgggtcatttctgtagctgttaaaaatgaaggtatgtgatttgccaaaggcaagacagaaaatagacaaatgctattacacagtaaatgcatgggtggggcaccaagggctaacctttgacactgggagactgaaccctgtttactctaggtcccagggaaatttgaggtaggtgagggcttgcttgtatgttgatcttgcctgttcttttgtcccctgtaggaagctctgagttcttggttgcaggacggtgtggatggtttccaattccgggatgtgggaaagctgatggtgagtgccctttctgcattgagaggcaaaaagctgtggtgagaagagtgggtctcagccacggcgaggtggtgttccctgttctgactctgcttttctctactagaatgcacccttgtacttggctgagtggcagaatatcaccaagaacttaagtgaggacaggtaggtacccagcacccctgcctggctgagcccattgtgagagcctcgagaggcgagtttcctagtctcgagaactcttctcttttattctttatctcctgacattttctaatcacactcctatccttgctttgtgcaggcttttgattgcagggactgagtcctctgacctgcagcaaattgtcaacatacttgaatccaccagcgacctgctgttgaccagctcctacctgtcaaattccactttcactggggagcgtactgaatccctagtcactaggtttttgaatgccactggcagccaatggtgcagctggagtgtaagtagcatgctggtgggtttaggggaaggtgggaagtggtagatgaagggtggacatgctcaaaggtgtatcctcctgcaggtgtcgcaagcaggactcctcgcagactttataccggaccatcttctccgactctaccagctgctgctcttcactctgccagggactcctgtttttagctacggggatgagc

SEQ ID NO: 25849 - DNA, 2056 bp, Mus musculus
cccgaggagaatccaggaactcagctaagtccggagtatgagaagatgtacgtaaagcagaagtgagatgtagtgccaaggtctgtgtgaagttggggagatcagcctgagccgtgcttggggcgaagggatcacgatgtggatggagactggtgtcatcttgtggagagaaaagaggcctcgcagggtaaggggccggaaggtcggaggaggggctttgaaacctggtcaagacaaattcacgtttgttattctaagggtttctgaccacaagctccccttcccagactcttgcaggaataagcgttagggatagacgggagtattcagcgaggctggaggtgcgaaaagacttctctgcatctctttaagaggcggaccggggcggagtcctgggtcacttccccgccgccacacccgcccagcggcagaagcagttaggaagctctgctagcctcacggccacgggacgcctctctgaacggggatccaggcaggattagagctgcctcactgactacaggccgtgtcgtgtcaccgtttctgcaggcaccatgagccaggacaccgaagtggacatgaaagatgtggagctgaacgagctagaaccggagaagcagcccatgaatgcagcggacggggcggcggccggggagaagaacggtctggtgaagatcaaggtggcggaggacgagacggaggccggggtcaagttcaccggcttatccaaggaggagctactgaaggtagcgggcagccctggctgggtgcgcacccgctgggcgctgctgctgctcttctggctcggttggctgggcatgctggcgggcgccgtggttatcatcgttcgggcgccgcgctgccgtgagctgcctgtacagaggtggtggcacaagggcgccctctaccgcatcggcgaccttcaggcctttgtaggccgggatgcgggaggcatagctggtgagtagggtgtgcaccctcatcccttgcccccatgaatccctcgtttaatcgggcattctgctgcttttttccttcctcctcgtcttctctagaacgctggtgattctttactgcaacctattttttttgggacgactccctggcaaaaatccccccccctttctttaaaaaaaaaaaaaaaaaaacgctagccggacccctacttcttcctaagggtgcctgactcagcacatcatctttctcctctcccctcccccaaccacgcggccctgagccagttcaaaccagtttctgaagtaatgtgtgagactccttgcgtcagctactttgtctcatgatccaacccgcgtcagagggagtcgggaagtggtggagagaatgtggaggctggaggcttttcatgccctattggttaacccaaccctctcctcctaggtctgaagagccatctggagtacttgagcaccctgaaggtgaagggcctggtgttaggcccaattcacaagaaccagaaggatgaaatcaatgaaaccgacctgaaacagattaatcccactttgggctcccaggaagattttaaagaccttctacaaagtgccaagaaaaagagtaggtctttctaaggaactagaaagggtttggcattctggcccagaaacaggatagagtttttgtctgatttttctcctaactggctcagtttttttgtgtcaggcacaagggggaatatgttatgatttacactaaaaaatgtgcttcatgcgtgagcgtaatttttatgtatttattttggttttggttctcaggtagggtctcaccatgtaattggttggcctgtacctgactaccatgaccaggccggatgagagtttacagagctcccctggtcccgagtgctagacttaagtgtgtcaccatggctcgataaaataaatggcttttaaatgtataaagtagatcctatatatagaagagattcaaatgctgctttagagttcactatagagggctgacaacgtagctcagtttgtaagagtgcttgtctaggatccatgaagacctgagtttgattcctcagcacaacacaagcagc

SEQ ID NO: 25850 - DNA, 1232 bp, Mus musculus
tcctctcaccagtgtattcctgctgacttgggtattcctgcaccgttgggcttcagttctcattatggcttcacacaatcaacccatcccagcatatctattgtatttaccccagttttgtctttgctgtttgtttttgagtcagggtcttatgtcgcccaggctggcctcaaacttgtcgcgtggttgagggttactttgaacttttcttttttttttctttttttttttttttaagatttatttatttatttatttgttatatgtaagtacactgtagctgtcctcagacactccagaagagggcgtcagatctcgttacagatggttgtgagccaccatgtggttgctgggatttgaactcctgaccttcggaagagcagtcgggtgctcttacccactgagccatctcaccagcccctactttgaacttttcatgcctccacttcctggggttttaggcctgtgcctcctctgtgcctggtttatgtggtgctaaggatagaactcagggctttcaaatgctaagcaagcactggctgagctccacccccagtccttcatccttcactgctttggtgttgcagattgaaccctgggccttgcacatggtaggaaagcaccggtcttctgaactgcatcgtcagtcctttaagtttatatagtcaactgtgttagttattgtgttctatccctggtaagggaaagcaatctacgtagagcattgagagatgctgtcacttgagtcagagcttgaaggaggaagagtaacttagcaggaagatccaaacagcaggacagcatgcacaggaggcattaagaatggaaacaccctgtgtgtcgtgactctggcaggtgctagaaagctgctgtggctgaacagtagtgattaggaagggtgctgctgaaaagactgatgggagctcacgtctcctctctaagatgcttaggaatagatttctgccacttggaggtgggggcggggagatactgtgttaccttaaattttacttactttgtggagggcagtgcgcatgtgtggagggcagtgcgcatgtgtggagggcagaagacagctcctgggaatcagttctcctttcactgatcttcactgatcactgaggagtgagctcaggtttgctggctaggcaccttcaccagaggaacatcttttttctctttttggtctttttttttttaaagatttatttattcattatatgtaagtacac

SEQ ID NO: 25851 - DNA, 1233 bp, Mus musculus
tcatctcaaagccctttacactttggagccaggcctgttcaattttacaaataacacgttttgcttgtagtcaggtaggtattgatggttggtgcttccttagggaacatatttagatggccacttaatgatgaacaatgtaaatgacaagcatatggctgagttgcaatgatgtcatcttactactgaaatgggctgaagaaagaaggtgctgaggtggctgtgattacatttaaaaatgacattgtttctctgtttccagggtgctgtgacaacatgaagagttcgagctacctcccaggatgagtgcaggtaattgtccaagtagagcttagggtttccctagggaaaatagtcaagacagacattgaagcagcacaacacttttttgctgcttactatttgtatttctagaggacacattatgttaaggcctttgttctcttaaaaactcaactgtcagatgatttgaaatgatgacactgaacactccgtgaaggtgtgaatttatagcatgttagagttctgatggcagttagtgctgacagacagattgtaattctgtcctgatggttgaaaataactacttgttactcttccacaggttttcctggtgacaaatctcaggcattcaaaggttagttagattattttggatggggtttgttcactaggtttgctgtttctatgatgaatcaaactagctcactatgactgctaatgaaaacacaggaacacctgagaaaccaaagggtagtgtgggggcaagggccttatatccagccttttcaaggtttgttatttttctccaggttctgttagcagtgccatacttgtgggtttacaggtgagtgattccagtgtgtggtgtggtgtatgtgcatagcattggactggggtggggggacctaactgagaacgtactttgtgtatatatgatgactttcatagaatctcgttcggctgatgattgctgttgagacttggaaatctgatttttctcagaatgatgggttagataggaacaagctgttgcaggatttttaacattgctgatgactgtcttgtttttcagagatggtgtgtctggctgagaacaaaggagccgtaccaggtatatgtcttagtaatgctttttgtagtataaggttgaatatataatacttagacctagtgaattcctgctcaccctgatgaactgaataccgccccagtctgatagctgtggagaaa

SEQ ID NO: 25852 - DNA, 1152 bp, Mus musculus
atggtggtggtgtggtaagtcatttctccagcgccttgaggtacattcgcgacccacttatttatttatttgtttgtttgtttgtttgtttgtttgttttttcgagacagggtttctctgtatagctcaggctgtcctcaaactcactctgtagaccaggctggcctcgaactcagaaatccgcctgcctctgccttccaagtgctgggattaaaggcatgtgttaccactgcctggcctcttgacccttttatttcccaacatttctatagttttccaataacttgttcacgatgtggatgtaataaagaaagttctttgctctggctagggcataggcatctctgtgaaggaacctttatagttcatatctgttttttccaagagtacagagtactagaaactggtgctcacaccaaggtaacttagaccattcatgcatttactaatttctgtgtctgtttccaactccagagcatgatgaccgtgttagtttccctcaaagaagaaagaaaggccgggggcctttccgatggaagtgtggtgaggggaatcgtaggtctggaagaggtggttctggtgtacagtcttcccgatttgaggaagatgatggcgatgtagcaatgaatgatccccaggatggcccccgagtaagatagtaagtgaccaattagtctgctttgaatagtgacccactgaattatgtagccctgatgtctttgttgtgtctggtcttaccttgtaaagtgatacttgacagaaccaatttagtagctgtagtttcactagcaggacaggttcctcttccctagtgtttatggaaatttaattctgcttcccaatagcaatccctataccaaccggcctaatcgtcggggagatggttggcatgatcgagatcgaattcatattactgtacggagagacagagctcctgcagagagaggaggggctggcaccagtcaagatgggaccaccaagaactggttcaagattacagtgagtacttggaagaataggtgattcaggaaacaggactagactcattgaaagtgtttgacacctctctcaagctcctcgaatccattttctcgaacatttactcaacagggaagtagcatgctaatccattctttcctcaaatgagtgtct

SEQ ID NO: 25853 - DNA, 1142 bp, Mus musculus
gaaggcgccaaacctaaagaccctaaatctctccggaaacgaagtaagactgacatctagggtgcttttgtttttaatagttaactgactatggaggtggaggtcagactgtgttgggagttgagtctttccttctacgtgggttcttgggctgtgatgcttatgaggtgagagctcctgcccactaagccatcacactgaccctgctgtgtttctgtgatggtggagccaggagagtgtggctggccatagtgggaagcaagaaacaaaacttaggtaggatttagaagtgtgggaatccagctgctattcttagtaaggtctgtttcttcccttttactctcctcatccttcacagttgaagactgagcgggaattagacaagataaaagggctgaagctggaagagctgtggcttgacagaaaccccatgtgtgacaacttcggagaccagtccagctatatcaggtcagttgtagcctctgtctcccctcctggggacattcacccctgggaggctgagctcatgcaccctgaccagtgcccgtctacaggagaacatgcagccctgagctggaaccacctgttctttgggaggaggatcatgtattcctttctgcctgtctgttgtctcctagctctgtcccagatctcttctttcttctcacctgacttctgttctctagttctggcctttctccttctttcttgaacacagccttttctagaatctccctacctgttattccaggaagagcacctccccttttctgttctgatgtggaggtgtcttatatatgccctacctgtgtgtttgtcttcagcaaaagcctggtgtgcttaggctgtgagaaagtcctttcttactggggctgtctactgagacaggccttcctttgtcctttcatggtccctcttgccgttgtaccaagagggactctttattttcatgatccacttagccaaggctgtggcctggtcctttctgcccatgctgatgttgatgcctcttggaggctggtaccatgctattggtctctcttgcccagtgctgtgaactgggcctttcctggagaagaaatctgggtttccctaagatgtgatcaaagccggggccccgccagcaggcgagggggatccca

SEQ ID NO: 25854 - DNA, 1207 bp, Mus musculus
ccatgtggttgctaggatttgaacccaggaccttcggaagagcagttagtgctattaaccactaagccatctcacgatacccttttttttggggtgggggggttggggggcgatagttcgagacagggtttctctgtgagttaccctggctgccctggaactcactctggagaccaggctggcctcgaactcagaaattcacctgcctctgcctcccaagtgctgggattaaaggcatgtgccatcatgcccagctcagcggaatttctgaatcagggcatgaacatttaacatgataatacgtggatcctaacctagcctccagaatggtggcttttcctttattgaggtggttcctttcaggttgccctccaggacctccagacaaactccaagattgcagcactcctgccttactttgtttatgtggtcagtggggtaagtgatcagttctctagcgatctctatgacccttctctgtttagggctcatagcagattcttcgcaagctcctgtctctccatgccaccacaagccatcctctcctaccaacaggtaaaatctgtaagccacgacctggaacaactgcaccgactactgcaggtggcaaggagcctgatacggaacccacacctgtgcttgggaccctatgtccgatccttggtgggcagcgtgctttactgtgtcttggagccactggccgcctccatcaaccctttgaatgaccactggactctgcgagatggggctgcccttctactcagtcacatattctggtagccactgggttcaggctgagcagagggtgggatagcctacagagttgattgggttgtggtagggagctgtaggaagcctttggcttttaaattaaatgttacatgtggaacttttccttagccccctagctgacatgtcatggtacagttataaagatagcaagatattagtcttttgtcccttggatcctgggccagtcacatctggcagcctgtctcagagatgtctacaaatgtccaactctttatgtgtggtacttcattctccttcctgactgttgcttccacaggacgcatggagaccttgtaagtggcctgtatcagcagattctgctgtccctgcagaaggtcctgacagaccctgttcggcctctctgttctcactatggggcagtggtggggctgcatgctctaggctggaaggtgag

SEQ ID NO: 25855 - DNA, 1219 bp, Mus musculus
gttgttagggtaaccttgaactcacttcctagttgacaaggacagttatacaacccaggaaggcctccctgacagtcaaacagggatctaaggaggtagtaggtgatgggtcactgagtcaaagagatttggagagaacaaagaagggacagtgtcaaacaagaaacagaatggcctgaaataaggaaatagaggtggccgtgggtggaagtctagatcacaagagaagaagataaggttttgcagacagatgctggaaaggcacaggcatagcctgcccatcatgggccagtatctttgtttagtacaaaagcaacaggaatcactgggaggatggctacgtgggctacgtagattgcccacttgttctggagataaagaatgaggaacccagccgggcatggtggcgcaggcctttaatcccagctcttgggaggcagaggcaggcagatttctgagttcaaggccagcctggtctacataagtgagttccaggacagcaagggctacacagagaaaccctgtcttgaaaagcaaaacaaaaaaacaaaaacaaaaaaggaatgaggaacccttgctggagtcctgggagtgtcatcttggactagggtcgtgctgtgctgagcctctgggctctgtctttgtggcttttaaagcaagatgagcaggcatggttgagatggtcttgcctgcctcacccttggaggaatctcagatactgggcgggttttcaacctttcttttccacttgcagttccaccggggccatgtcagaacgagaggagaggaggtttgtggagatccctcgggagtcggtccggctcatggcagagagcacaggtctagagctgagtgacgaggtggccgctctgctcgctgaagatgtgtgctaccgtctccgagaggccacacaggtgtgctgctctccgtccacctctctcctccctatgatctcctgttacctcttccccactgacatgcttggcaacaagtgtatatcaggtaccatgtgctttgaggtcagaagacagtgtaggcctgtgcctttgaaagagtctctttctagccagtcaggtgtctagaaaagaaaacactcgctgggcactttctcataacactttctcacagtgtcctgctgcctaggcggaatagctagatagtgacactctgcccatgagtcactgaggcactcggtgggaacatgacatgcggaaggtgt

SEQ ID NO: 25856 - DNA, 2240 bp, Mus musculus
aaaaggagttcaccctttacctctgacccaggtggatttccattttgtttcctgttctgcacaagttctttgctccttagaccatctgcatcgtttattgtctgtcccctagtgtatttgtatggcttacaatctgagaacattcatcgactgtgggtggaatcaactgtatttgtggcatagatttaatggggtgttattaaatgttctcagacacagaggagagggccggtgaagggtgagagagtaaggacaggcaaacaggaatcttctgtagtatcttcagatgcttttgttttgcttagtgggatttttttttcttttaattataaattgagcccaagtatatttacattaaagatttgaaattagctgggtgtggtggcgcacacgtttagtcccagcacttgggggagtcaggcagatttctgagtttgaggctagtctggtctacagagtgagttccaggacagccagggctacacagagaaaccctgtctggaaaaaccaaaaacaaacaaacaaaaaaagatttgaaattaatcattttagggctaaggctgtagctcagtggtagagtgctcgcctagcacgaataaggccctgggtttaattccccagtgctacaaaaccaaccaacgaaataacaagaaatgaatcaaactgttatttaaattaatttcttatactcctttaatatttcagagacattcagattattttcctccataaaagtatcttctttctaggcagacttggtggtagatgcctgcaatcccagcactttggagtctaaaccatgacaatcacaaattcaaggtcagtcagatcttgtctcagaattaaagggctggagataacagctctgtgggaaaaccctgggtttaattcccctttctggtttttggtttgctttgttccctcctggtaatttctagtccttgctattgcttgcactcagatcactgacaaagtacaacttatttgtcattaatttagtctttttttaaaacttctggagtgaatgcctgggatacatgaaaccctgtttttaccttctctctgaccttgtgccaagaaggaacccaagtgctggtgcactttctctgggtgtgtgtgtatgtatggtgtgggagcttaaacccaccttgcacatgcgaggcaagcaccctgtcatcaagctacacagctagtcccacagaatttggtttgtatttcaaaaagtttctctgcgtagctttggctgtccaagtctgaatatttcatagatacattctaaagtgttcacttttctgaaaggcattacttttgtcttcttgaaagtgtaccgtaggggctggagagatggctcagcggttaagagcactgactgctcttccaaaagtcctgagttcaaatgcagcgaccacttggtggctcacaaccatccctaatgagatctgactccctcttctggagtgtctgaagacagcaacagtgtacttacatataataaaccttaaaaaaaagtgtaccctaataaatcatgacagaacctgtttcctcttcagctgtcactctgtcttgtaggtgctcaggaccttacagaggaaagaaagtacaaggaaagatgtttattgtttagtgtgttggaagcacctgatagaatcctgaagaagctgtgtcactcatgggtgcaaacctagggttgtcttgccttgccttgcctcggtggcattcagctactggtggctggtctgtcattctgtttaccctggatcctctttatgtcatggctgacaattagtagctaagaccatgtagtaggcctccacctttataagcagagataataagcatgtgtcgctagccattatataatcaaaaaccaaatatgtttcttggggtgggaccaactagcttattaataatacctaaaactctcctaatactctgtgcttctatgttcctccccataatttaaataatatatccaacaagataaaaagcttttctaccaaacctaaaaaaatacaaggacagaactaagtagaatattttatcttgcagacttcttaaactgctaaagttagcatatgtctgtgatttcagcactcaagagtgctgaggcagaaggattactataaggccagtctggctatatactgaattccagactagccagacttacctaacaaaatcatgtcttaaaaactcagatggataaaatccctatactggtttggcaaaattttgtcata

SEQ ID NO: 25857 - DNA, 2911 bp, Mus musculus
aggacccgctggatggatgagtgtcgtgcctcttcatcgtcagccagctctggctctaagtgatggggtttccctctcttctagtggcagaattactactaccaccaccaacaggacagagaccgatactacaggaattactacggttaccaagggtatcggtgaagcccctgctgttttcgcctgtcagccatgaagctgaatctttgggggtgccaggcaccccctaaaacacaaccaaggaaaacaggggctgtcggggtggggctgagctgccagggaggggtggttggggggagggtgtgcaagtaggggtgggggaggggggagtggaaacaaaactgtacattttttttaaagtttgttgaaaaaaatattgtcttattctataaaacatttcaaacctagttaggttatttgtaatcaaaaaaaccgtttgcacagaaagcagcacttagagctgcctattctgtaccctgcagctggataggaaaagaactaaaaatgacacctccagcattctaagacaggtggattggtagcccagtaagggagagtgttgtggggagaaggggaacagcatgagggaatctgctagcagttaggagcggaaacagaggagacaggagcaggggcagagggggtgcctgtgaacagggcagtggaaataaacaattggctgttatgaatcacttgcaccaactaaccgtttgtattttctttaccaacctttccttcttgggctattgaggtaatagattgtccacttatattgtgcctttgtgctgtctgcctaaggcacagagactgctagttgggtggttctagtatataggattcccaggccaagggggaacgggggctcttggggactgcagagcataatactttgtccctatctatattatattcagtaaattcctataaagtctggaggagggtgggaacacagcccttagtctgaagatggtgatttgccagtccctagtctctgtcttcctagttgatagaggcaagagatctctggaatcatttactaatattgcctgcctcttacaagtgtgagggaaggaatgattctcagggtttcagctcacagaaacgcagcaagacttttgtttactgcgtcaagatatgtatataggtgaatcctgtggtgtgggctgtcaggcccaggtgctgagaattgcaactattttatacaatgtagggggctctgccctgctgctgttttttgtttttgtttttgttttgatacacaggtagagagtagaaaggggttgtggggttaggaggcagctcagttgggctgcagaaacttggaaagactatgtgaatgtgtgtatgggtgtgtgcaaggaaacaccttttcccaacttgttgaaacaggattccttcaagggtgcttcccttcaagtcctcagagaggcctcttatcaagagacttcatttgggatcatatagtttgtaactttaacaacaccctcccagttcttgacagaatagctacaggttgctgggttcaagaatgtgagcaggatatagcaatgcgctttcaatattgatcttcaatttaaatcatcatcttgcttagctaaaagcttactcagcaacagcatcctacaacacttcctggtgagaaaatctctgggctgagttactaggacatacttcacttccacttccttgcctgagcagttctcttgtttaaacttgtgctgagatttgaatcttccctgtcctgatgtccttcccacgcaggcaaggcttctcagggtgtgcagacctcattctgagtcctggtttgttaggacacaccgttctgctcaaggacctctttccaaggctgcagtgggcctgggaggagagaagcgtgctcatactgtgtcttttctattgcacttgtccctatggtgccacagatgggtttgtgtgtggcagtgggtggaatgattgcatgcatcttttgtaactcgctggtattagaaagggagttcaagaaagcattgtttataatgtcagggcaggaagatagaaactggagcccaaagaaatccccttagaagaagattatgttagaataggaaacttaatttccagaggcagaagctgtcccttcagatgtttagtcctccaacaaataatactttgacggtactctgtgatctggattttaggtggtagagccctcaaaagtgcaaaaacttaacactgaagtttgaggcaacatgggtcagagagtatactcgctgttgattttcaacaccagaaaagtcaaagtccttttttttaaaaaaagctgtttttctagtggaatggagaatgacactgccacatccttgttgggtctgttcaggaggtctcctgcatcaaagtggacgtctgcattttgtttctgtcttgtgtttttattatgaaaagaaatgttattgggacgggtgtggggtgtagattatggtaataagaggaatccctggttttgttttccttaaaagagttgtttagtgttttatcagatgtctgttgtagttgtagatggaaaagcttgtaaacaaacaaacaccacatggagcctgtaaatgtttttgcacaacctgtaaagcattcttggaagtggccagtaaaaaaacgggggaggggggttccatttttaaaaatgtaactgtgtcattgtttacatatgtaactcttaccctgttctcattacaccattctggcaaaaaatgtagacacagtagttccagttttagaataaataaccatttggattgaattttcctatctcctgtggctgcactgactggaatgatcatggaggtgtttatttttaaaatgtattttttcaaaataatttcttttgaggcagaatctccttgtatctcagactggcctggaactcttgatcatcatg

SEQ ID NO: 25858 - DNA, 1114 bp, Mus musculus
ttttttttttttggctttgttctgtttttttttttttcttcaagccaagagtctctatccctgactgtcctggaactggctctgtagaccaggctggcctcaaacttgagatttacctgtctctgccttctgaacactgagaataaaggcgtgcactgctaccacctagcttgtcctctttggtttttcaagatagggtttctttgtatagtcctggctgtcctggaactaactctgtagaccaggctggcctcgaactcagaaatctgcctgcctctgccttccaagtgctgggattaaaggcgtgtgtcaccaggtctggccctgcttgtcctctttatattactgttttggttttgtttcctttcctctgtcttggagcccgtattcccttattttgttaatttctcagtctaaactcaccttcccactccatgtccaactttacctctttcttctctgcaaaacagaatgttggaacttgtggcacaaaagcagcgggaacgtgaagaaagagaggagcgagaagctttagaacgagaaaagcagcggaggagacaagggcaagagctgtcagttgcacgacagaaactgcaggaagatgagatgcgccgggctgcggaggagcgcaggagggaaaaggctgaagagttagctgccaggtctgaagtctcattggtcgctaattgggaaagaaatgaagatttgccttgtccatgtctgacctattttcttcctgtctctattctagacaaagggttcgagaaaaaattgaaagggacaaagcagagagagccaagaaggtgggtgattagaaagtctgggtatagtggagtatgtgggttaatttccttaaagtgtgcttagcatgatttttttgaggcaattttactctagcccagactagtgtcagactcatagtattctcctgcgtcagccttccaagtactctaactaaaagctgtgaactgccaaacctctgtgtgtgtgtgtgtgtgtgtgtgtgtgtgtttggcccatgtactggagggtgaccctttatacatgctagactagtgtgctccctctgaggtagtgttccattttgtctttcagtatggtggtagtgtgggtt

SEQ ID NO: 25859 - DNA, 1087 bp, Mus musculus
agtgctcgtgccaacatcacgctgtctgggaagaagcgcaggaaactcttgcagcagatccgacttgcccagaaagaaaaagcagccatggaaggtaagtcttgggcacagaggctacacaacaagaagtctggattttacctgggttttatcttttttttttttttttttttaggatttatttatttatttatttatttacagtgtgtgcactgtagctgtcttcagacactccagaagagggcatcagatttttgttatggatggttgtgagccagcatatggttgttgggatttgaactcaggacctttggaagagcagtcggcgctcttaaccactgagccatctcaccagcccctgggttttatctttaatgctttctttttcctttccttttgttcagtggaagccccctccaagtcaaccaggactagtcagccacagcccaagcaacaaaagaagataaaagctccccaggacgtagctatggaggatcttgaagataagagctaaaatccctgcctcttctaccagaagatggtcaacagcactgagaaagatttggaggaactttggaaaaaatattagcatatttcactttcctagacacctcttctacagcggaccctgacctcccctggaggtgtatattgggaccgaagaggacacagagaaagactggagggccacctctagcagtcaactccttttgtaataaagctttagtgcgttcaccgtgtgggatgaagtgcagcagggatgagccatgtagaaaggcctttgcgtgtgggtggagacacttcagaagaaggacacattgtgcaacaaaggcgacaagaagctacaaagtgaaggcatggtggcgcatgcctttaatcccaacatttgccaggcagagaggcaggcagatctctgttcaaggcctcacattgagttccagggctttataagaccctatctttttttttcttttttttttctttttttttagtttttggtttttcgagacagggtttctctgtgtagccctggctgtcctggaactctctgtagaccaggctggcctcgaacttcagaaatctgcct

SEQ ID NO: 25860 - DNA, 1131 bp, Mus musculus
ctacatcttgagggcctgtatttcccagtcagcactcagtgagatgccagatctgaggactttgttttgttttcgaagattttccttatataggccaggcttggtttgatcacatggtccttctgcttctgcctccatggtgctggggtgatgggtataaaagacatgtccagccccctttcctaacttttaccattgtaaacagctaaatagatacagggaggctagtgatgtaactcaggggtaagggtacttggcccaagcccaacaatctgagttctatccctgttacccaaatagtggaaagagctgactctactcttgtcctctggcttccacacttgaattgtggcaagcacatgtccccatacacacagcaagtgtcaaaacaaaactcaattagacatgggcttgccacatttaggttttcattccttctcaactaaatatccataactgacaaccttgtggttttgagtcctgtgctcaatgtgtgtgtacactatatatgttgtgtatactatatagtgtacactatatagtgtgtgtacactatgtatgtagtgcatgcctggagtcttcagaggccagaagaggctgttggatcccttggaatcagagttatagatatttgtaaactgccacgtaggtgctgggaactgagcctgagcattttgaaagagcaccaagtattcctaacccctgaactatctttccatcctcattgacaattttttattttattttactttatttttgagacgggagatctttgtagcctggctgccctgggacaccctctataaaactggctggcctcaaacttatagagatccacctacccctgtctcaaatgctgtgattgaatgtgtacaataccactggccttaaacttttctttttagatttatcttatggatatgaatattttgccagcatggatgcatgtgtatcatatgcccatggagaccagaatcagaagccctggaattgcaattacagtttgtgaactagctgccatatgggtactaagaattgaactctagtcctctgcaagaatagcagttaagtgctcttaactgctgagccatctctccatctccagactactttataaatgtcacacaactc

SEQ ID NO: 25861 - DNA, 1174 bp, Mus musculus
tgagcagagccagaagccctgaagagttgagtttggcaacccagctatatgcagggctagtggtcagtctctctggccttcttcccctggccttccgaagctgcctggctcgagtgcatgcagggactttacagcctcccttcacagcccggtttcttcgaaatttggccttgttggtggggtgggagcagcagggtggtgagggcccttcagccttaggggcccggtttggggagtctgcctcagctcacctggctgatctggctcctctcctactacacccagaggaggaagtagctgaagctgctgcctccctccttgcaatatgtccctttccttctgaagccctgtccccttcccaactattgggactagtgagagctggagtacaccacttcttctcttctctaaggctgcatggccctcctggtgtggcttcagcctctcagcttcttacccgcctttctcagacttccccagctgggctcaaggctgtcctacagctgcttgtagagggagccttacatcggggcaacacagaactatttggaggggaaatggatggagacaatgagaccctctcaattgtctcaacccctttggcttctgcctcattgttggacattaaccggaggcatactgcagcagtgccgggtcctggagggatctggtcagttttccatgctggagttatcggccgtggcttaaagccacctaaaattgttcaatctcgaaaccatcaagaagtgatctataacacccagagcctcgttagcctcctagtgcactgctgcagcgcatcagggaacagcgagcgtgagggttgctggggggctcccaccctgagcccagaggcagccaaagcagttgcggtgaccttagtggagagcgtgtgtcctgatgcagctggtgctgagctggcctggcccccagaggatcatgcacgagccaccgtggagcgggatctccgaattggtaggcgcttccgggaacaacctctgctgtttgagcttttgaagctggtagcagctgctcccccagccctgtgctactgctccgtgctgctgcgggggctgctggctgccctcttgagccattgggaagcctctcgacaccctgatacaacccactccccctggcatctggaggcatcctgtatcctggtggctgtcat

SEQ ID NO: 25862 - DNA, 1099 bp, Mus musculus
tgcctctgcctcccaagttctaggattacaggggtagagacttgactcttaaattaaattatagtgaggtgttaggagccagctgtgtgagactcaggagaaagtgctgcttttgtttcaagttggcactgaaaagctgacttccctttgtctccttcacagaccctgtttgggaagatgcttgattacctgcagggctctggggagactccacagacagacattcgttggatgtcagagagtggcattattgatgttttcctaatgcttggcccttcggtttttgatgtctttaggcagtatgctagtctcacaggtaggtgatatttccatttctggctagcaagtgctcttaagttttgctatttcttcagctccagtgaccctttcatttaaacctgcagggacccaggcattgcccccactcttctccctcggctatcaccagagtcgctggaactaccgggatgaggctgatgttttggaagtggatcagggttttgatgatcacaacatgccttgtgatgtcatttggttggacattgaacatgctgatggcaagcggtacttcacttgggaccccacccgatttcctcagcccctcaatatgcttgagcacttggcttccaagaggcggaaggtaagggggtcctgtagctgtgtttggtcttcttgcatagggttgaggcatggtagtctccaccatttctccttctgttctttgttcccagctggtggccattgtggacccccacatcaaggtagactctggctaccgagttcacgaagaattgcgaaaccatgggctgtatgttaaaactcgggatggctctgattacgagggctggtgctggccaggtaggcaggcccataattgaaggggaggctatggagcagccaaagaggtagagatattttgttatgttttggttttgcctctttgggaattcagagttggtgttttctctctcaggctcagctagttaccctgacttcactaatccaaggatgagggcctggtggtctaacatgttcagctttgacaattatgaggtaggaaagactatccatatgccttctgtcttttctacttttcctt

SEQ ID NO: 25863 - DNA, 1323 bp, Mus musculus
gagactagagctgtggcagctgtgtgtgggagtaaatgcctgtaatcctagcacttaaggttgctgagtcaggaatagctttagtcgtagggctgcctaaactgtccaggtagtctaggctaccctgatgtgtttagtatgactctgtctccagggaagagtaagcaaatacagaggtgtaacacaaaattatgaagaccagatcagaggagccatagtatctttggagagctgcacactgcaacctccagctgtatattttgacatatgaatggtatatctaaacctcgcttaagccttctggcagggatggagggggagcactgcctagcttatgcaaggcctttgctaagttcctagtaccaaaaaagagttgtgtttaacttcactctcatcagagtgtcctggacacttgtctagtgacagtggcaggtcagaggatacctagataaaggctgagttccttgctctatatcaggctccttcccctttgacccttttaggagctgtgtggacaggggacaacactgccgaatgggatcatttgaagatctctatccctatgtgtctcagcctggcactggtggggctttccttctgtggaggtaagagaaggagacatttggggttttgattgggataaagtcaaaggacctgggcatgaacaaagaatatttatatgaatggctgccagcgcttcttctttgccattttgcaacctgctccttctcctctcccagcggatgtgggtggcttcttcaagaacccagagccagagctgcttgtgcgctggtaccaaatgggtgcctaccagccgttctttcgggctcatgcccacttggacactgggcggcgagagccatggctgttagcgtctcaataccaagatgcaatccgagatgccttgttccagcgatattctttgctgcccttctggtataccctcttctatcaagctcacaaggaagggtttcctgtcatgaggtaaattagtcagtggggtctgtgtagagtcagatagatgactgggagataatgaggtctggtttgcatctctgggcctatttctttccctttccagggccttgtttgtaaggttttaatatgaatatggaagagaggtctgaggatgtaattcagtagtggagttacttgcctcttaatgtagaaagccatgagttccgtcaagccccaatgtcaccaaaaaaagaaacaggcaaatgaaatgggtaaaagcagttgctatcaaatataggagttcagtctctagaacatgatggaagtagagaattgactcctagaaattgcaagtttttttctgac

SEQ ID NO: 25864 - DNA, 1490 bp, Mus musculus
acctcagtgctgatattgcgtaaacctggtgtcagcgtggcatccgactggagtattcatcttcgataacccaaggaacttgttctgagttgggaggaagggcatgatggtattgagttaccttttcttttgccttggagtttgaccctacctagatttcaccttctaattctacgacccagattctgtcaacatctgggcaagatgacagggctgtcctagggctctgaattccacttgtgacctagtctttccttctgtgtgttaccaagcccttcatactcagtatcctgttgctgtaactggagcacagtcatttgtgaagaccaaggggccttgtcgttctttttctcttccttagggtccctaccttctccttagaccccatctattcaagcctcttgtttgttgatgccatttcttggaagaagatgagggcagtgaacattagggttccttttcttcttccctgttccctcctatccaaaatgcccatcctttcattccttcccctgaatgtccccttctctgttccactgatacactgggaccaccccttacttggtaagggacaaatggatcaagattgaggttcctggagaacgtcctcttccttctcatctcaaccttgtcttcctgtttctttccagagctgctgcatttctcccatcttagagggagacgcttccacacaattaggagggcaaggttattaaacttcttttgcccctctggtccccttgggacactcaagatagagacatgagttgtggtttcactgaatcacggtcacctgtatttattgctgggaagaagactgagggtggggggagacgatcatgtgtacccaggggtggcttcaagccctggtaagcgggttgagggaggactcaggaaccaggagaactatttgtgggaattttttttacttcctctgggttcccaactgtgacaagttttgataaaaaggagaaacaataaaaaacgaaacaaaacataaataataattggatgtctgaattatacttgtaaactgaacaaaatcgctccagtaaatagtggcctaccattttattctgtataagctgcttcatttcagcaaaatgagccaacctgagggcggctttagcttgagatgctagtcctttagaagaacccagcaatgggtctcaggaggtgaactggtcagaaaactgctttgtctcgcaaatataggagcctgagtttgatccacagactcactgtaaagaaagctgagtgtgtaagcctaattctttttttgtttttttttgtttttttcgagatagtttctctgtataaccctggctgtcctggaactcactttgtagaccaggctggcctagaactcagaaatccacctgcctctgcctcccgagtgctgggattaaaggtgtgcgccaccaccgccaggctgtaagcctaattcttgggaggcagagacagttggatccttggggctctggccagct

SEQ ID NO: 25865 - DNA, 1220 bp, Mus musculus
taaaaaggctactgagagtcagagtagagcccctgccatttcatcttacagactaatatgaacccatgtatatatcagagagacaaggaacacagctccattttagaggcagtaaagttctcccaccccaatattttatacattgtataccaacactgaatgtagaagaggtggggtggggtggaatccattttagatcttaacaccccagagccctggttatggctggtcctgaccctaaactctccttcacaggtactggtatggcacacccggacagagaaacctaagatgaagcaggaggagcagctacaacggcagggccagggctcagacccagccattgaggtgtgatggcaacctcaccctgacttctaccttattttaggcacataccttgtgggactgggctccaggccagcccaggatgtggttttttttttaaagacctgacccctgagaaccagaggcagcccctccaaccacagggtgtgtcccagttgcttccctcccttcccccagcctgccatgtggcactgcccacatgttggggacaagcagcttctctagtgagccagatcagccccatctggggcggagcaggacagatggactcagaaaggagggtagctgtgggaaaagggtaacttattggggacaagcatgcagtggggggctagaggagctgggctggaccctccccacctgagcatgcgatccccttcctacctctagaataaagaatctcaacccggaggggcttcatggtttccttcatttggcagacctacccaagagatcaggtacatgttcttacataggctgggttcctcctctgcagagtctttcaggctcccagccaagagagagagacagagacagagagaggaagagagcgggagaacagtgatttctgtccacaaactttattgtagaatctggatgctagaaacattctctagtcctttggttgtcacttccctgtcgccctcatctgttctcaaccttggtggtttccaacgagacagctgggttccaggacacctggacttctcattccagcccagctccgcttgctcttaactcctataaccccagggacctttccttccctgagtctgagtaacgaattgtaagttttccacatttgtccatctttccccttcccacccccacctcttcaggtttctaggcctcagctagaacttccttgggaggtt

SEQ ID NO: 25866 - DNA, 1198 bp, Mus musculus
ctggggaggcagaggcaggtggatttctgagttcaaggccagcctggtctacaaagtgagttccaggacagccagggctatacagagaaaccctgtctcggaaaaccaaaaaccaaaccaaaacaacccccccccccaaaaaaaaaaaaccaaaccaaaacaaaccaaaacaaaggaaaaagccggctgcaccaagaagacagtgctttaggatagctccttagggcaagtgggggaggggcagctgatgagaaactgttagtgctttatccagaggctctaggcatgtctaaggctacattctctgtttctgagacagggttccctctgtcacctgcgtttgtagaccagggtggcccccaactcagagatctgtctgccccactaggactgggattaaggatctgcaccatcatgcaggcctaacttaaagccaagccaagtcagtgagaacttgggaagcacacagtggggttcatagtggacgctatgcctatgatcagttcatgtcgtcaagtgagggaagaatgacggctgagtaggcgatttccacctaggggatgtggctggaggctgcaaactgctgaggaaccgctatgagagcagagaccgggagtgggctacctatacctgtgtgctgggcttccacgtctatggtgagccaggatctggaatccgttaggagggctggggaaacaaggaagaacccattctgccctcagaatcctgggcgtgtgccacctcggggtgggggtcatagtggcaaatccaggctaggaggccccttgggattgtctggagcgcagtggcaacctgaagacctgaaacactgcaactctaggttgtggtagcagcctgactcaggccacctgttgtgttaggtgtgtggcctgatggctctgatgggacagacatcaactccctttgccgctcccacaatgaacgggtggtggctgtggcagacgacttctgcaaagtacacctctttcagtacccatgtgctcgagccaaggtgaggcttcaggggaccattgggcccaggtgggtaggtttggtaccctgccattgctgcaaccagttgttttttttttttttttctctcatctaggcgccaagtcgtatgtactcaggccatggcagccatgtgactagtgtccggttcacgcacgacgactcataccttgtctccttaggtggc

SEQ ID NO: 25867 - DNA, 1217 bp, Mus musculus
caggagtctgatgcccttgcttggccttcacaggcattgcgtgcatgtggtgcagacatatatgcaggcaaaaaagcgaagacgtaaaaggaaagggaaaagtcttaaggtcagtctgagctgtgtgtacaccttgtttctcttgtttgtttgagacagggcttctctatgtagtcctaggtgtcctagaactcactatgtagaccatgctggcctccaactcacagagatccttctgcctcctgaatgctgggatcaaaggcatgtaccaccattgcctggcttcaaaggactgtggagaatgagttacataaatgagttatgtaaggctgcagagtaaagcctgtacatagaaggtgaaggaggaggaagaggaggaggaagaggaggaggaggaggaggaggaggaggaggattcattcccttttatctccattacagccagacccaaaggctccaaaggttccagagacttcatccttggactcagcccttgcttcttccctggatcctcaggcgctggcctgcaccccagcttctcctctagactcactgtctccaacttctgttcaagagtctgagtccctggactttgacaccccatcttctctggcaccacagacacccgactctgctttgggctctgacactgtcacctctcctcagtctctgcctccagtttcaccactgcaggaggacaggaaagaggggaaacaggggaaagagctagaattagcagaagaagcctcaaaggacgagaaggaggaggcagcagcagtgttagagctggtgggatctattctccgtggctgtgtccctggagtgtaccgagtccaaactgtgccctctgcccggcgtcctgtggtcaagttctgtcatcggccttcaggtcttcatggagatgtatccctcagtaaccggtacttttgtgtggggttgaaggctggctctaaggtctggggtatatgaggagggggtcctgatgtggacgagcttatgcctgctgaatttgtttttcttctttggttcagtcctcctttcttccacgaatgtcacctcctacctggcttccatttcagtgtttttttttcctttggaatactttgtgcgtttgagtcagagtcttgctccattgtccagactggcctcaagcctgtgattctcctgccttagcttcctaactcctggggttacaggcatgtgctgctatgcttgac

SEQ ID NO: 25868 - DNA, 1202 bp, Mus musculus
aaggttctgatgtggcatggagaggacagtggacctggaggtaaggggcttttgctgtggtttgaaatctgttcatggcctttccattattgatcttgtttctgccattccctcttggcaggtcttagagccttcttttcgccaggccttccccaataccaaccggtggttccttacctgcattaaccagccccagttcagggctatcttgggggaggtgaagctgtgtgagaagatggctcagtttgatggtaagtctgaagagactgggcatgtgatagggtcagggtccagttggcgcctgtcaaccctttgacttgcatagccttgttcacccagagaacgtgggtgtcacccagtaactgacgtttacatcaaactgcagtgctgtgtgacgatgtgtgttttgcttcttgaggcttcttaggctgtccgagccatcactttccctgcctgctgccgggtttgggagaaaaaagaaagaggctgtatgtttactttcttccatcctttgctagctaagaagtttgcagagagccagcctaaaaaagataccccaaggaaagaaaagggttcacgagaggagaaacagaaaccccaggctgagcggaaggaggaaaaaaaggcagctgccccagctcctgaggaagagatggatgagtgtgagcaggcattggctgctgagcccaaggccaaggaccctttcgctcacctgcccaagaggtaagctggtgctcttctcacatctagggctacgatgttaggttgttacaatactgatgggtgtaagtatagtccaggtctcatgtgtccaggttgtgctgagggtctgaactcagttcctcatgcttgcatagcaagcactttacccactgagccatgtcctcagcctcttggaatttttctaacagaaggacaaaagcctgtttaaagtggagtgtagtgggggttgtttttgtttttttcagatagggtcttcctgtggctcaaaggcagtctatagacctgcctgtgcctcccaagcatgatgcatgccaccatgccttcctttgttattgtgcagaccaggctgccttgaacctggaccttgtgcccttgcacctcaagtactagcattacaggtgtgtccccaaagtctagcatctctgcccttcctaaagccaccttcctgtgcacaataatggtctatttcataatacttt

SEQ ID NO: 25869 - DNA, 1321 bp, Mus musculus
gatggctggtccctgtggtatgccgagtaccgcttccctgaagagctgacccagaccttcatgagttgcaacctcatcactggtgagaagaggagtgggtctgggaggaagaggagccaaggtagtgggtgacatgattccagagactagataagtctccctttccccccctccagggatgtttcagcgattggacaaactgaggaagaatgcctttgctagtgttatcctctttggaaccaacaacagcagctccatttctggtgtttgggtcttccgaggccaagagcttgcctttccggtaaggaagatgttggggggagggaggtaataatatgggaaactaggagtcttgagccatggccagtgggtatgaaggaagaattctggactaaatataggaagtatgctcaaatcagtgggaatcctggcatctgctgtcatgtctgagctagaatttggacagaaatggtgcctcgatgtccagtgtctaaccacatgcctttgtactgttttgttttttaaaaatcctcagctgagtccagattggcaggtggactatgagtcgtatacatggcggaaactggatcctgggagcgaggaaacccagaccctggttcgagagtacttttcctgggaggggaccttccagcatgtgggcaaagccgtcaatcaaggcaagatcttcaagtgaacaagtcttgccagtcgcctagctgcctgcacctacccttcaagggagatgggggtcattaaagaaaactgaacattgaactttttcctgtcctgcctcctttgtgattggtggcttcttcaaagtttttgccgatgcctgagacatccttgtggcagggcagaagttttcagaagagcagaagtagaggcctggcctcagttttgtctttattgccctgcttcctacaatgatgctgttctagctggggaagatgagaaacagactgggtggtgacatagggcttaattattaccaaattcttagaagctgtgtctcccagactgtaaccattgaagaaagtgtctgctgagctaaggggtagctcacagtgtgcagaggtgttttctgtcatagctgctgttctctgtctgtctgggttgggttctggagtaacctcgtatgcagtcctcatgctcaggagtcttcatagggcctgcatctctccagtacagttaagtgctctacagaagatggtgggatagggagggctcatttcctcctagatgccttgcggcataggtaggtgagtggctggatggcactgtccagcttaaatgcttcatactctagaagactagccacttg

SEQ ID NO: 25870 - DNA, 1106 bp, Mus musculus
agggagaatatgatgtcacagtgccaagggcagaaggtgagattaaagttcctgatgttgaacttaaaagtgctaaactggacattgatgttccaaatgtggatgttcaaggtcctgaattgcatatgaagatgcccaagataaaaatgcccaagtttggcatgccaggcttcaaggcagagagcccagaaatggaggtgaatctcccaaagtctgacattgatgtctcaggacccaatgtggatgtcaaagttccagatgtgaacattgaaggacctgaaggaaagctgaagggtcctaagctgaagatgcctgagatgaacatcaaggccccaaagatatccatgcctgatgtggatttgcatatgaaaggccccaaagttaaaggagaatatgatgtcacaatgccaaagctggaaggagacttgaaaggccccaaagtagatgtcagtgttccagatgttgatgttcatggtcccgactggaacttgaaaatgccaaagattaaaatgcccaaattcagcatgcctagtctcaaaggtgaaggcccagagttggatgtgaacatgcccaaggctgatgtggacatttctgtaccaaagctagatattagtgctccagatctgaaccttgagggaccagaagggaagttgaaaggccccaaatttaagatgcctgagatgcacttcaaggctccaaaggtgtctctaccagatgtggatctggatctcaaaggacccaaaatgaaaggaaatctagacatgtctgcaccaaaaatagagggagagatgaaagctccagatgtggacattaaaggtccaaatgtagatattaaagcaccagaagtggatgtgcaaggcccagaatggagcctgaagatgccaaagatgaaaatgcccaagttcagtatgcctactctcaaaggtgagggtccagatgtggatgtgagcttgcctaaggctactattgatgtctcaggacctaaacttgacattgaaacctcagatgtgagccttgagggaccagaaggaaagctgaagggccccaagtttaagatgcctgacatgcacttcaaggcacccaagatctccatgcctgatgtggac

SEQ ID NO: 25871 - DNA, 1099 bp, Mus musculus
tcgttttaagcttcctaaatttaatttttctgggtccaaagttcaaacacctgaagtggatgtcaaacttaaaaagccagatgttgatataacagctccaaaagttgatattaatgctccagaagttgaagtccaaggtaaagtgaaaggatccaagtttaaaatgccctttctgagcatttcatctcccaaagtctccatgcccgatgtggagctaaacttgaagggtcctaaagtcaaaggagacctagatgcagcaggcccaaatttagaaggagacttcaaaggacccaaagtggacattaaagcaccagatgttcaacttaatgcaccagatgtggatgttcatggaccagaatggaatctaaaaatgcccaaaatgaaaatgcccaagtttggtgtgtctggcataaaagcagaagggcctgatgtggctgtggatttaccaaaaggagacattaatatagaaggtcccagtatgaatattgagggcccagaactcaatgtagaatgtccagagggaagcttaaaaggccccaaatttaagatgcctgagatgaacatcaaagcccctaagatctccatgcctgatattgacttaaacctgaaaggtcccaaagtgaagggtgatgtggatgtgtctctacccaaagtggaaggtgagattaaagttcctgaagttgacatcaaaggccccaaagtggacattgatgttccagatgtggatgttcatggcccagactggcacctgaagatgcccaaggtgaaaatgcccaagttcagcatgcctggcttcaaaggagagggcccagaagtggatgtgagcctgcctaaggctaacattgatgtctcaggacccaaggtggacattgatgttccagatgtgaacattgaagggccagatgcaaaactgaagggccccaagttcaagatgcctgagatgaacatcaaggctccaaagatctccatgcctgatattgacttaaacctgaaaggccccaaagtgaagggtgatgtggatgtgtctctgcccaaagtggaaggtgagattaaagttcctgaagttgacatcaaaggccccaaagtggacattgatgtt

SEQ ID NO: 25872 - DNA, 1104 bp, Mus musculus
aaggccccaaagtgaagggtgatgtggatgtgtctctgcccaaagtggaaggtgagattaaagttcctgaagttgacatcaaagaccccaaagtggacattgatgttccagatgtggatgtccatggcccagactggcacctgaagatgcccaaaataaaaatgcccaagttcagcatgcctggcttcaaaggagaaggcccagaagtggatgtaaatctgcccaaggctgaccttgatgtctcaggacccaaggtggacattgatgttcctgatgtgaatattgaaggtccagatgcaaagctgaagggccccaagttcaagatgcctgagatgaacatcaaggctccaaagatctccatgccagatttacatcttaagggtcccaaagtgaagggtgatgtagatgtttccctgcccaaagtggaaggtgacctcaaaggcccagatgttgacatcaaaggtcccaaaatggacatcaatgctccagatatggacgtgcagggcccagactggcacctgaagatgcccaaaatgaaaatgcccaagttcagcatgcctggcttcaaagcagagggcccagaagtggatgtgaacctgcccaaggttgaccttgatgtctcaggacccaaggtggacattgatgttcctgatgtgaatattgaaggaccagatgcaaaactgaagggtcccaagttcaagatgcctgagatgaacatcaaggcccccaagatctccatgcctgacattgacttaaacctgaaaggccccaaagtgaagggtgatgtggatatgtctctgcccaaagtggaaggtgagattaaagtccctgaagttgacatcaaaggccccaaagtggacattgatgttccagatgtggatgttcatggcccagactggcacttgaagatgcccaaggtgaaaatgcccaagttcagcatgcctggcttcaagggagaaggccctgaagtagatgtgaacctgcccaaggctgaccttgatgtctcaggacccaaggtggacattgatgttcctgatgtgaatattgaaggtccagatgcaaagctgaagggtcctaagttcaagatgcctgagatgaacatca

SEQ ID NO: 25873 - DNA, 1128 bp, Mus musculus
ccgactgtcttcctcctctagcaacgacagtgggaccaaggttggtatccagcttcctgaggtagaactgtcagtttccacaaagaaagagtagtgggccttcatgcatgtacatatatatatatataaaacatcagccttgggtgtgtttgtatataaactccaaagagaaacaccccaatagcctaagcaataatgcaaagatcttgcccctgccagtggcaagtgccgacaaaccaagtgcctgtaggctcctgggactctgcagctaggtaaagagttctaagttcatctggcccacgtgcaaagtcaacagtattgccttaagatttcagtttttttttttttttttggtttctgttttcttttctttttcctttttctttctttctttttttttttgcattgaacgctgagagctcgtgtttactaagcaagcttttgtgtttatcttccttatttttactgaacatcttcagtacctgggtaatggaaacccactcttttttcattgtaatgactttgggggcttttgtgagtaagggagggtgggataaaaggtggcagagggagcaaggtcttaattgctctgaaggttggacccgtgaagccctggcatagacctgaagaggtggcagccagtgggtggttgtttctcaatctctgtagcatgactttttaatccccaggtgtgttagtcccagcctagtttggtgctcgaggtgagaggggatttgaatctgtttgcaaattgtccaacccaccaggtcaacgtgaggggcttacattctgggtttgataagaaaagtgttcattcatgactgctatgtcctgagaaaagttccgatttcttttaacaaatgtcatcatgattaaggaaatgtctggcactttaatggcaaattaattgagaatgtatgaaagtcatgaatgtacaagccaaataaagctctttattaaccctgatgtatcgtgctcttgtattctttgttgaagggatgaagccaagggaggctgcacacacagccctcatgggtcagacttgatccacctgatgctattgctacttttgttagtgactttaaggcattacctctgcacaggtaccagaaggaagtctttgcttct

SEQ ID NO: 25874 - DNA, 1144 bp, Mus musculus
catctttatccttatcattagaacacggtacaaccttcatccctggactgcaatgaccagaataaacccaaggaagctatcaacaaagctggggcagcatcagactccaccccagatgcaggtgagtgaagtggtggggactgaaaacatgacagccttcattagagaaggagtgtatgcagagataaggctcaggaaagcaccggcaggtgtgctgacttcctgcgctgtggatatggaatccctggcctgctggacccagaaattcaaaaccttctctcctacctcttttaaaaaatatttttattatttttaattatgtgtgtgtgtgtgtctgatgtctgtatgagtatgtacatttgagcacaagtgctggtggaggtcataggcgagaggcgtaagtgccctggagctggcatgataggtagttctgtcctcagcaggagctgcaaattcttttaactgagccatctctccagcccccatgtttttgtttttgttatttttgattcaaggtcttcctctgtactttagaccacccctagactcacagtaacttgaaatcttcctgccttattttcccaagtgctgggtctacagattggggtcactatgtcttagttacccttccatctcatacgagcagagagagtggttttcatctattgctgtgaggggaatatgctgatagaccttctcttgtgagggtctcttctgtgaataacacagtggggtctgagcaaggtgcaacacacatttaatcccaggatttgggggcagaggcaggtagactctgagtcgaaggccagtctgatctacaggatgagttctgggccaaccaaggttaaatagaatctgttcaaaaacaaaacaaaacaacaaccaaaacataaaccgaagtggccatatcacatactgaggacaggttccacggtagcctctctttccccataagctcacaaatgtaataattcctccacagatttgtggatttatcttcaggttctttccctccctcattatctgggtaaccttggggggcctgctgaatcccaagcccatactcctccaagcacttctgaggtgcccagcactggactccatctcttcctgctctgacccccaccctcctgatttctgtgct

SEQ ID NO: 25875 - DNA, 1110 bp, Mus musculus
atcaattagatgtagacatggaaaacttacgcagtctgtccctccttttgttgccttgatcagtaaatcaatgaatgcttggttgagggtcgggttctgaagcgatgagagatgcctgcctgtattaagaccagggaaaatggaagccttgaggagcctacatctccatcatgtaaggctagaaaggaggtgttagattttgacccacggaactgcctctgagctatagaagtgccatttggattgggagaatggcactttgcagaggctaggctaggggagtgtgggaagaaggactgaaaaaaaaaagtgtaagaaagacccaggtccaggtgaagctcaaaatgttacagagttcattcttagtcacaggaacactggacaagatgttcaagaaggttctctttgtctgtgaggggggagtggatctttatccaaaaagctcaaacttctccaacacatatctgggcacttgaagagtctcccttgctgcccgagctgtagactattggagtttcttaatgtctgggatttttcttggctcccaaaagccagccccacctgaaccagccccagttgtcctcattggggcttgatagggcacatgacatttccagcctctccaacagcgggggtggcagatggctggagagatgacaccgtgagtcactaaggagtagctgccagcgctttaggacagtcccaagcgcagtgaatcaaatgttcagggtggtgagcatgacgcagaaagcagtctcctcggtggagagcactctgtgcacctgtcagcactcaggaaatggcatgtctgccgtgatgtgtctgctcagcttcttagtctagcagggatccccttctctctgggaagaaactgattacctttaacgtgccactaataaaatttattttttgaaagaaaagagtgtggttaggtgtcactttgaccaagaccagaacagatacaagctcccttcttggtcctttagcgcaggcagatataatagttgagaggaccttttgcagaaatgtaagtgtggcagtatatcctgcctcgtggagtttagtagggagtgttttagagcattgaactttctctgagtgtgttaaggc

SEQ ID NO: 25876 - DNA, 2441 bp, Mus musculus
tggagacaggcttgtcttcacacttagctctgccattcacctaccatgtgccgtgagacaagtctctttctacaaaatagggagaataaagtattgcctaagacaactcctgggggcctttgggctcagctgctagaagatggagataaaaggataattgttgggtggaggcgagcaggaggttgctagaggagcagataggataggagcaaggcatgctgtcatgaaaaggatgactgggctctgtgggtaggtgcaggggtcagggaagctcccagagagcaccggacagtgatccaggcctctgttttcttcaggcacccaactcagccaggccattgtccaccagtactaccaccctccaaacattctagagctcttcggatctattctcccactggacttggaggacatctttaagaagaggaagactcgctaccacaagcgcactagctctgctgtttggaactcaccacccctgaaagccaccatggtccccagcagtggggactagactatctagcctgaagagtccatgaggcaggccctcagtcattttggagcacagggcccatgtgtgtctttctgtttgtttctctgtctgttttgatgttgggctggtgcacttctgcctgatatgccattgttcaggtggctatcagtgtcctctgtttgtcaggtattcccagacctgttgggaggatgggcttcatgcctggggaagaaccaggttgagcactgatggctctgtaggcagtactctgtaaataaatagattgttacagttcagttgaatgacttttagtttctagggtttgtgaggtagtttaataaagtgtatagcccaaagtctgctgtggatattgtgaagactagaggcttcattggaatattggtctgcagcagtatgtcttgtgcctttaccttcagtgtgtgcctagaccacttggttgggtcagatggggtcccacccagaggttctaatgacagacatgtcagcatgtcctgatagggcatctgaacgtgcttcctgttggtaaatggagcctattccttgggaaaggcctggcccgtgactcagctctgccacattgtccttcagcctcaccacttctcaagctctgccatggttgctgctggggattggaaggacttgaggaagtcctcgtgctgggagctaatcaggaaaggaatgcactcaggctgactttgggacccgtgcttacaaacgggggggggggggggggggggaggtgcggaggtttaaactgcaaaaccaccagctactccataaacgctcagtgaaggatggccttgcttctgatagctcctgatgccatttttcctggaactggggttagccacctgtggcaggaaggacaaatcaaagtatagttattttggatatagctgtagtaaagccaatttgttttcccattacctccaactccgtacgtgatctgagaagctgacaggcttactatggaaacctgttgagaagatttttgccggttgctttaggtcaaaatacaaatgcagtagtgctttaaacagggaacagcggacacagacgtctgaagtctagactcttcccaccaatacagagttcattcagatgtgtacacacagtgcagcttattccgtgtatcctcacatgtaactgtcagggaaactggaaggcatgtctgtcttaagccacaaaatctaactcacttgttagcacatttatctagtgcttagaaaaccaaaggatggcaaataacatggtgaatgcacaggttcttccatgttcaattcaggacaccaactttttaagtaatggatttgtagccagtaccgtaggacaaaaaggaaaaggtaagaattaaaattctccgggggatggggtgtgcctcagtgatcgaaactgtgcttataatgctttgggttcagtaccagcacggcaatcttgagaagatgatgtagagaattgagtatatctagtaaaacgagtgaacttcctgtacaagcctccccaagtgttaggatcatagaatagtagtgtctggagattttaggaatacacttgacaggagtcggaaactcagggaaactcagtgaaaactaaaaacactgttgagagaaattaacaaagacaagtggggggagtgggggcagataccatactcatgggtggaaatccttatgaaaatctcaggctccgcctccagatgccccaccaagtccaataccttttttctggcttatggtgggggcagggtagaagtttatgaaaaatgggttcaaaaatgttagctgcagcagacttacaaaataagacatcacagttgttgagatattgtcaaagtcagcgtgatttttgcataaagacaagtctggaactctgtcttctagaagtagacctatgcttatctgatcgcttggcttttgacagaggcgga

SEQ ID NO: 25877 - DNA, 1053 bp, Mus musculus
gattgcctgaaagggtctcagtatctccagaagcttcatatcctcccttcttccttcctcccgtcctctgtcctccctcacccccccccccccttttttttaaagacaggatttctgtacgtagcccaggctgttctggaactctctatagaccaggctggttttgaactcaagagaacctcctgcttctgcctcctgagtgcaagaattaaaggcgtgcactaccacctcctagttcccctttggttgtctcatcacattgagtctttcacatcagttcagtctccatccaggctttagcctctttaacttggttgtcgcacatgtccttgtttactgtgtaagattatttgatgctggaaggtaaaaagaccagacagtggctttgttggttttccttaccactgaggctgcggcacctggcccggagcccagtacatagtagcagatgaatgtttgttgagtgaataggctgcttgtgtcggggcccgtgtaatgtcagacatttctctttccaaggtattgattcctagcctagtgaagaggtggagctgtgcctgttacgcaagctacataaagctaatagcttcattgaggttctgagggtgaatgaggaagagagccagggcgcagtgagggctgtgtgtctgtgaaaggagcagtgatcgtgctcctgccacaaacttcctgcacctctggcctggctcctgactggtttctgatggcatcttttgtttttgtttgtccttcaggtcacagttacctggagaggctcctgaatgttgaagtgcctcagaatgttgggtaagttccatgctagagcttttacaggggtgctcagggcacattgcaggacccatctctccatggcactgctgacaaccatgctcccttagcttggtccccatgtaaccaggcagcaagcaacatgactgtcaagtccccaggcaacattccatcagcatcacttgttagcctgagtgtgtgaactccatgcttgtaaagaatgtagaacaaccatttaaaatgaggtgtagtagagtggtagtctgg

SEQ ID NO: 25878 - DNA, 1189 bp, Mus musculus
ggggaccacagccccagggcctatttgccttctggatctatgtgaccagaaactcctggactttgtctgcaatgtggacaacaaggacttcatgtggctcaaggagattgaggaggaggctgagcgcatgtttatcaggtaaaggcaggggcatgctggggtgggtgtctccataggtcagggttccttcctaagtgcctcatgtgctggggccaacctggtgcagtgaccagaagaagaggagactgagtctttttcctggctcactgtggtaagctgtgtctgagtgtatggcctgtggtgtcttgtcttggaacttacttccctgctttaagttcacgaggaagttctctgagggcccagctgctgatttcacagagctttggagagcttttctctagcctgacttgtcattgccgagaatggggtggaatgtagtctaataagagaaggggcagcccagtagttcccagggagcctcatgttcaccctccttgtacttacagagaattcagcaatgagccagagctgatgcccaaaactccttctcagaaaaaccgtcggaagaagaggcgggtgtctaacattcaggatgaaaacagagatcccgtgaggaaaaggtaggaaaggactgggaggctgtgctggaggatgtctggagccttggaagctcctcaatgtgctgataggagcagcagctggaggcaatagtgatttgtggcccacgctgactctgacagttgagatgccatgggtaaaatgaactgttaacccagatgagagtacaggtgtagatttctgtgcattggtgctgcgggtggaggcagggagttaggggtttggaagaggggagaggcaccagagttgtggcccaggttgctggttcttacctctgttattggatttgttattattctctgcaggaatggtggtgactgcagcactcagataaagatgctagtcattctaatcaggcagccctggtacataacatcaaccacagctggctcaacagctgtgtgtccttgggatgaaatccgcatctccattttctcatcttccaagctgagtgaatggtgcctgcctcccagggccattatctcagtcctgtagactgagcatgagtgaagtttgcagaaagtgcttagcacagtgtaacaacagttaagaaggtggtgtgaatttagtc

SEQ ID NO: 25879 - DNA, 1059 bp, Mus musculus
tttgtaagacgaagtcgctgtctggtgtatgtcacgactaacaacacgcactttgcctagagtttagggatatcctgtgagaattgaaaatcatcctcatcggtaccctctgtgcccatctgggacccagatgcctctgcagtacggctagatccaactacgcccgccccgggccacagaaacagcgcgcttgttgccaggcaccgctcttgcagaagctcagagccccttgcgtcgcctcacactcacacaggctcctccccgcccgcgccctgcgggtttgggcaacacgcccacaggaagaggcggggcggcgcggcccgctgcgctgattggccagcgctcgcctgacgcaggatcccgctataagtgcggcccgctgtcccctcctgcgccagacgttctcgcccagagtcgccgcggtttcctgcttcaacagtgcttgaacggaacccggtgctcgacccctccgacccccgccggccgcttcgagcctgagccctttgcaacttcgtcgttccgccgctccagcgtcgccaccgcgcctcgccccgccgccaccatgaccaccgcgtctccctcgcaagtgcgccagaactaccaccaggacgcggaggctgccatcaaccgccagatcaacctggagttgtatgcctcctacgtctatctgtctatggtgagtgcggcctcctcagggccacttggggagccggcggagggtgggtcggggcgtggcctgctgcgggcttccccgccttccagcgcccttctggaaaatggagtttgttcggggttctttcctaaggcaggcagccctgccgtggcaagtctgagcacatagcaccttgtggctcctgcatagatcaggcatgtcattacaccacttttttttgaagccttagggcagtacgactgtcagcctggccaatcaaccctgcagttaggtgcattttctgcacgctcgtcccctccgatcacgtggcctacaagcttctctgtttggttatgcatcctgctccagttcctcctggagtatggcgggtctgcttggtcatggtg

SEQ ID NO: 25880 - DNA, 1818 bp, Mus musculus
agtttctgaaaaacaggtttggggaaggcctggactttgaaacaggtccaacttctgtggctgtcattcctggaatatgaatacactgagtgcttaaaactgaaaatcaaagcttctcctaatatatttgtgctaaaatgcaatgccctcaattgttaacagggcatgatgcattaattttataaatcagtggttgtttgtagagctggaagccttgtgaccttgtgttagctactttttacatgattggtgaaggaggagaaaaatggcctcccaatgcaggatactctagcaccctacctcttagacaagtagatttgggcttggcttaaatttttttctctgcactaataccgagccgtagaacacttgataaagccaagtcccaaggtttgccttcccatccttactgaacttttaaaaggccgagtaggatggctcacagcctttgcatacagccattgcggtgccttgcagtggagatcagtaacatgtaccctttccactttcagtcttgttattttgaccgagatgatgtggctctgaagaactttgccaaatactttctccaccaatctcatgaggagagggagcatgccgagaaactgatgaagctgcagaaccagcgaggtggccgaatcttcctgcaggatataaaggtaagtagatcctaggggtgccctaaatgagcggttagactttattcaggaaatgatggtgcactgaggcttctgtccttgtgttgttggcaaatggcagttgtcgagcatcctgcggtgaaagcttagaggaaattgagggcaatcctttgcccagagcatgatggctcagtgtgaggtgtttcctggcttgggttgattggtagatgacttgacccgatgtttcattcagaaaccagaccgtgatgactgggagagcgggctgaatgcaatggagtgtgcactgcacttggaaaagagtgtgaatcagtcactactggaactgcacaaactggctactgacaagaatgatccccacgtgagtatcggaaacgtgggatgagtggaggagatgatttgccgcaggacttgggagagctgaccagtaactttgtcccatgttctctttcctagttatgtgacttcattgagacgtattatctgagtgaacaggtgaaatccattaaagaactgggtgaccacgtgaccaacttacgcaagatgggtgcccctgaagctggcatggcagaatatctctttgacaagcacaccctgggacacggtgatgagagctaagctgacttccccaaagccacgtgactttactggtcactgaggcagtgcatgcatgtcaggctgccttcatcttttctataagttgcaccaaaacatctgcttaagttctttaatttgtaccatttcttcaaataaagaattttggtacccagcttcttttctttgtgattgaggataagcattccagcttccagttgcttcaccgccagttatactaatcacactgaaacacctaaaagaatattcacgtttattaaactccttagtttgggaaagatcgtaaaatacaggtgttttcaggcaggactattaagtactcttggttctgagttacatgctagactgtcgtgggaacacactcctgggtgtcgctgcttgtgtgcctttgactgggtcagtgccctgctgggcatccttgcaagtcagggccaggctgtgaggcatcactcatagagaacaggtttggtgccagcttcatccctgtgggagagtattcatagcatgagttgactgaggacaaaggtggaagcaggtttaaaacaca

SEQ ID NO: 25881 - DNA, 1171 bp, Mus musculus
cagtggagccactgtgaagtcctgagacactgggcaattttatgtttcatttatctgtgaacccagtctgcctagaaatgcgcagtcctgtcagtcaaaagaacaccagtgtccagatcgtacagcaagtcttttcctccagcccattcgcaggtcaccagatgacctgctgggacccactgctgtgtgatctatctcacagcagcagctgtcctctgaacagtactttccaagccagctgagccgcaagaggcccaaggtatggtttcccaagtggctgtaatctccttctgttccatgaccttcttgcctgaggccttctcctccctcccagtggccccgagggctcctccagctatacacacagacagacacgtacagaaacctctgggcttccagttatacacacagatagacacgcacagatgttcaggctgctccaacagccccagagaagcctctgagtctgctgtctggcataagctcatactacctcaaagatagtaggggttttgttttcaatagcacctcattcctgatcatctctttcacctgaactaactgccccactgcctgcctctacccctggggccagcctcccgtacaatatgacatttggtatgatggggtaaaggggaagagatggcccagccaactggtattccccatgtatgctctgattcttctgctgacactgtgctgcctcagggtgagtatcttcccctctctggtgtcagcttcttggcctgtgagatgttagggtttcattaggctgggcttttaaatattagagaagtccatgacttgttaggggacagaacccaccccacaactttggggatattggccaatagcctcagttgagcactgtaacaagagaggagctattcatgtagagagcagggatgtatgtcttctgctctggaccttaggtagcgctcaaggcagaagctaggagtgtatatgagaaaacacaagctcatggatgtgagcctaaatttaccttcacatctgagacacctatccctgccgggttcccttcagtcaccctcccactccccagatctctgggtgtcagctgccatagaccccacattcacagttggcagggtttggcctgaggcattctgggtattggggggccaggtcctgcccaagcagcaagtggaag

SEQ ID NO: 25882 - DNA, 2029 bp, Mus musculus
ctgtctacccagggctagaagaggacctcccctctctcctttcccaggggtttctctggggtgtattagtcagtagcccacagctcctgtggtatcctgtggtaagtggtgagccctagtcagtagctgagaggaagcacctgccgccccaacatgacttcccacaagtctcactgcctggaggccgaggttccttccatctggttcctgagccctgcccccctctctctatttgcagttcactgaagaagtctggggagctgtggctggatgcttacctccataaatgaagctgccgtcctccgggcaccctcgggaaaggggcactgttgggtgacagccagagggaggggagggcttttgttctgaagggttctcatgagactgaagtgtctgctgcctcacattccccgggcttgcatcctttcttgttattcctcttccctcacccctacctactccattctcatggagttccccctttgtcagccctgaccccatcccctctgcctcccagtcccttctcccagagagccggagaggtggttgtctcaggtggttacgcgtctgcctttaacttctgcacctaaagattcctggtatgagattctgctcctggcagcctagtccccacccccttctgtcccacagacactctgggggcctgtggaacaggagtccaggacttggctctacactccctgtcagcattatggtgtagtcatttgggtgaagacatgcttcgttctgagtgtctttcccatggctgggattggtacttgaggcttctttccagctgccaaggaccaccttagactttgaggaccaaggaaaagttctctcatgcccaccatcacaactccagaccatagggtttgtacaggttctatttcatcatctacccaactccagaaaccaaagggagtgttccttgtgcgggctcaggagaggcagtagccaggttgaaggagggactgaccagcctggaactttaacctctcccactacagtcaggtgcttctgagttaaaaggcccaagattctagaaggatcagatctttttccagatcctctggccagttccagatgcttggtctagagaatgtggaccttgcaggagagcccctgagcagctctccccaggatagagctgccaatctagccagcacttggcttctttttggctcatccctgtctttacagatgtttgtttgcttgtttgttttagctgttgtgttaacatttcctacagaattcttcttaataggagagtagcagagggctggctgggtcttaggacaatccatctttactagatgtcccttgcccttcaggtagagctaggcttcgccttcaaggccacagtatacgctgtggcttgaggttgctgctatcagaaaggcaggaaaaacagggtagggtgtgaggtctcaggagggctgttgggggtacccagtgaggctcaagcaggagtgtagagggaagaggaggctgagggcatgagggaaatgtgagggcaggtgggaggggggacgtcggctatagcaggaggggacccacgctatgtcattctgaggtctaactggactaaccaaccaatatgtaaactggaggaaaaggctgggcctgcacagggcaagccctctaggactccatgagccaagagagaccagttggtattgttccacagaggcagagaacccataggagatggcagtcatttgtatcatcttgttccccgcctctacttttttgggaaataaaaaaaaaaaagtaattttattctcacttgcctgtagttcagcaagatcaatggatggctagtgttcctgtatgctgatgtcacaggtgtggtaatgcagggtctgggaggaagggcggtgctgccccacaagagcagggcctgactgttaaggcgagtggtgaacagaaccctccctggtcctctctctaagaggacggtgacgggtctggagactgaggcttttattttgtgttgctgtgcccatgtggagtctctacagcctag

SEQ ID NO: 25883 - DNA, 1117 bp, Mus musculus
catctcacaggcaaaatgtgttcagtccaacttcaacagtttccattgtcttaacagtttcaatactgttcataagtataagtgcaggagctggttaaaatggactgttgctcttctagaagacctagttcctagctgagttcagatcctagccagccatgttgggcagctcacagctgtctgtaactccagctccagaggatctgacaccctcttctggcctccatgggtatcttcacttacacatgtgcacatatacacatacataaatatgaaaaatgcatccttttctaaagtgtaagtgcactcgtctcatctgagactcgggccgcctcttcactgtgaacacctgtaacatcaaagcccaagttccatgctcctaacataaaccggcacagagcaaatacccacatccccagaggatgggcacagcaacagggcagaactgtgatacccagcatggcaaacaccaaaatctaaagctccgttggtagcatctggggattgtgacagaatcgtctgggcttggaggacttaggtagccttgccactgcagcaatgttgcctggaaacctcccagcctctctcttgagctggctcgccttgtacattcagtttccctctgagggtatcacagctacagtctcagcccctgtcactatcacaacccctgttacagtcacagcccctgtcatagccacaggcacaacccctgtgaacagtcacaaccacagtcacagtccctgtcataatcacagccacagtcacagcccatgtcacagtcacagtcagtcacagtcacagccccggtcacagtcacagcccctgtcatagtcacagccacagtcacagcccctgttatagtcacagtccctgtcataatcacagccacagtcacagcccatgtcacagtcacagtcagtcacagtcacagccccggtcacagtcacagcccctgtcatagtcacagccacagtcacagcccctgtcatagccacaggcacaacccctctgaacagtcacaaccacagtcacagccactgtcacagtcacagcccctgtcatagtcacagccactgtcacagcccatgtcacagtcacagcccctgtcacagcc

SEQ ID NO: 25884 - DNA, 1176 bp, Mus musculus
aagctatgactccaatcctttggccagacctccatttagatataagataaagtaattgaaaatatctaagtgtctcacttgaaaacaagatgaacgccagcgtggatgttgaaaggatcataggtgcatctgctggagtgcatgatgtttctcatgccccaggccatgctatgactgcccagctctgctggctgcagctctgctaaggagacttcttgccaggtgtgctgctgctgcactccgtgacccagtgctaggatatgagaggccaaggcagcctggcccagatagtcacatcctctctcggctcaccaccgtctcccctgggcccagcccagcaggcttggagcagataccattcattcagtcttcattctgagaacacggaaggctgatcgttgctcctccggtagatgaggcaccgttgtgccatggaggaggaattgctgattggtagggctttgcctagtgacgaagacagcataaaccaccaaaatatcctggtgcctagtccaaagtttgtgtcccatctccatgactttcactcctcatctcacaaatatctctaggttggtgggctgtccgctggcttgttaacatcctcgttcctcagtgtcgctgtcggggacttttccttctgatgcttttcttggcaattgtgttccttctggctttcggatgtaaacacatcatttgactccgtaagcctgggacctttcccacactctgacatgctgctctttgctgtgagggattttgaagcctgctgcacacaggggccagaggtcgctgcagagaccacagctgttcctaactatctccatccatgctctccaaaacactccacaagtgagaagcttgttttgagcaaatagacctgctcacagatggtcagagccggccatgggccaccgtttcacctgctgaaggggaagaaaagacctgagtcttgcttggaccacttagcaactttgttgagtgacacacctctggggaaggctttgagaacaagtgatagagtagtagcctgtggcattccaattaatacaaagatccccttttcctgtatcgtgggaccacagtgtcatctaaatattggcttttccctggctatcagaccacatttattggaaggggctcagggcaggcaagaactatatcaactgagatacactc

SEQ ID NO: 25885 - DNA, 1145 bp, Mus musculus
ggcgaacgggctggattttgcaaaattcaggtccgcaggggatctagaaggtgaatctaagactggcttggcaacaggtccatctgcctctggggttactatcggacattcaactcaatggccctctgtttttagatcctgccaggatcacccttcccctcttgcactcatggaggttgttgaagtctctgagacctctgtggaacggaggctatcctatattgcacagtaccccataccgtgcctggccccacccccaaccataaagtgattgtgtagtcaggtgggtaagaggagaaacaaagtcaaagaggaaagccagacctttcttggcacctttcttggtgggctgaaagcagaggaaaagatgtagctggagagagcttgggaaagacgagtgggaggaggctgagaagagggataaacttatcagaccgcactccacatcaaagtccaggatgctgacttgagtgtgggcttttcttgtgcaagtttgatagtttcaattcttaccttccatgtcttttctttttgagatcagcctaggtagccataccctaatcaatggactggaggctttggtgaacaggatgcaatcttactccagattgaggagagaactggccacattcatactgcctaaagactattttccttgcttgtggagcctgcttaattatgcccatggggctggcgatgctaaccagaccttaggagagtgtaagcttttcacattccttgagtgtcctagctctcttggaccgcctcacaaccagagaagaccttggtttcccagggagaaaacttcccagcccctatctgggggatctttccactgtttcgggtgctggtgtgtgcatgaatctgtaggtgaattgcagacgactcctcccctttccaggctcttaccaaaaagtttcctaaaaagtaaaacaacaaatgtgattggtttgatccgattattccatattgtgtgataagtgggttttcttgtgtggaagctcagcccaacaacagccttgaactttatagtttatttaagaagccagacgtatttcatccttgttttggaaattcttagggtttccctgactcagttttctccaaatgtctatgttcagatctaacccagcagatacctggat

SEQ ID NO: 25886 - DNA, 2439 bp, Mus musculus
caggaaagattcctggtcatcagcaatggcaccgccaggccaatggcacggtgtgttggtccatgaccagcccgacttcctctaagcaagtgggtaaagcctctgaggggaaggggacctatctgcaggtgagtggctcagcctccctcactatctgctcctattgtccctatagctccctgaaggagtcagggcaactctggttggacgcttaccttcaccaatagcagcagcagacctccatatggaggaggaagaggacacctggagccaaagcaggagttggagggacaatgccactatgaatctaatgtttaaaaggttagggaacatggatattcgtactcacatctgcgcccctcccccttgccttctgggtaccaaacttgagggaggggagagctgttgaagcaggaattcaaaactgttatttcttctactttggcaggggagggggacaaatggtggtacctacagagctctgcatgaagtagggaccccacactagataacccctcttgtaaagtatgagcccatctcactgggctatctgactctccaccctccttgttagtctctgaggaacagtgcaactccttcgaacatgatttagaaagagggcattcatgcatagaattctgaggcctggcacaactccctgcccaggagcacagcttgctgctgagggctgggtgtgaccgtgtctgcctctggctgctgggagaagctgtttttcagtttcagaagcaggcaggacaaaggccaggactgtggtttgggaggcatttggccctggaaggtcctggcacacgcaattcttgggtctcattccatccaggttccagagagaacattagatcttagctcttgacaaaacggatggcagatactggcctttgaaactctgttgattcatctcttctaatcggtccccaaggagaaagaacataaacaaagagtgaggtcttccctcccactgaacactattcccatagtttccttttgctccccagcctgtaattctaagttcaacaaaacagttgtcaacaaaagtgactgaggcttccaccagagtgccagggctctgtgcagactcagaatccctgttccctatgtcacgttccagcattgtatagcacagttccatgtcacaaacaggaaggttagaaacactaaggtctgtgaacatcactgctgcagcgaggcagctcctctgtctactcgttcaagtgtcttactctactggatgctggatagaaatttagggtaacttctgacaaagtgtgccggtctaacaataaaatagggttttgtaatcttctggttggtaaaagatatgttccggagaatataggaacatgcccggagagacctaacctgtatgtccactttcatgctcttgttccccaaacccctgggcattgttgtctgctcaagagattctactggaagcatgatgacccacctgtctgggaagagaaaacctcaagaaggcaaagtgcagtgcgtgtttgtggtcaagatgagggtgttaagggatgttggagtctggtgtagagacaggcaggttgcagaaaagcacagatctttgccagtggttggccctgattgaaaacctgtttgaaacagactgtgtaggaaaaatcaggattaaagagtgctgcctttatggctccttcttcagaataggtgcagacccctccccgtgcccgttccctgccacccggggtaaggaggtggcactaccagtctgtctaacccactcactggctttgaccttcaactgccagtctgggcaaataccagtgagctctgttgtaccaagaccaggtcttcagagcatctgaaccactgtggccttctcttctcagccttcactgtgacacgggggacattgagtgacaagcctcagaatgttacagaggtaaagtgaggcatctcaaatccactgacagataagaaaaccgcgttagagggaaagtcacctctgctattgtagaaagtggcagaatatccaaacttaactctagcttccatgtctgtctttattaccttcatcttcctacttcctgtcccaccggcatctcacttaattgagcctaatgtcagtatctgtgtgtgccaatgctgttaccacatcctggtgaagctaaaaaataaaatttaatttggaccaaaagaatgttgttattcatttgaaatccgcgctgcttgtctgcacatgcctacccgatgccctggtgcagagaaggggagctgcctcagctggtaaggcacttcctatccaagctggtaaggcacttcctatccaagttccgatccccaggacccatgtaaatgccaggggtggagctctataacccagcattagcagaggtgcatccttggagcttgctggccaaccaccttcggcaaattggtaggcttcaggttcagtaa

SEQ ID NO: 25887 - DNA, 1265 bp, Mus musculus
ccagaaacataagagcatcgaggagatcgtgaggcggctggaccccagcaagtaccccgttccagagaactggctccacaaggaagcccagcagctcttcctggagccagaagtactggacccagagtctgtggagctgaagtggagcgagccaaatgaagaagagttggtcaaatttatgtgtggtgaaaagcagttttctgaagagcgaattcgcagtggggtcaagcggctgagtaagagccgccagggcagcacccagggacgcctcgatgatttcttcaaggtgacaggctcactctcctcagctaagcgcaaggagccagaacccaaggggcctgctaagaagaaagcaaagactgggggagcggggaagttccgaaggggaaaataaacctgtccttcccctccactgtccttgaccccaggctgtctatctgttttgtaccctcggctgcagcacatccctcttgtccctcgtcttgaggagagttcattgcttcccagcgctgcccttcagagctttccctctcttgaccctgtggcaggaaggccgtagctctgctttttctcatttttagctcaggaaagatgtcaggctcaaaccacttctcaggttaatggacactgtagtcattgttctgtgcaactgcgagcaatgtcttaaggaagaagaagataaagccgggagcgaggctggagatagtttcccagctggccagctggtggaggagaggtgactagaacctgactgactactgctccttctaatttcactgtgccctgaaagatgcccatcagcctgggattcgctgatggaagaactgcaaagagacgagcagagagaagtctggctgacaacagatttagtactgaccagctgatttttgtgggcagaaatttgaacttgctgcctgctgagtccagtagttgtgcagggagtgagatggcagtgtttaagttttgatttgtagttttttgtttttgtctctcccctctccagtgttggggattgaccccagggcaaaggcattaagtgtgccactgacctgtgcctccaagtgatgttctgacagcctttctgaggcaatcaattgaattgaggttttgggagaagaaactgttgttcataggctatttctattttaaaagatgtgaagagaaaaaaaaaacaataaaattataaaagtgaccagaatgtgtctgaatgtttgaaaacaccctgagtgccttagtttcctgtagaataaatataatggtttcct

SEQ ID NO: 25888 - DNA, 2283 bp, Mus musculus
gcatttgaacccagctctgccatatatgcattttgaaggaggcaagcgactgcagagggtagcagcacctctgcttgcattgcactgtggtcatgggcaccgtaaatgagacactagcacagcctagagcacaagacaaagggaggccttagctcgggaaggcagtctgcagagggtggctacccttgctctcaaagtgcagcgtgctcacccctgggctgtgatggtcatgtggggaggacaatgctggttaggacaaggctgccctgacctctgtcttccctgtctctctagggcacctctcatcagtggccagtaaccatcctgtccttccgtgaattcacataccacttccgggtgacattgctggtgagcacacaggcccgcagaggctgagggcacgtctatgcagtgtggggcttgggagaggaataagggttttgcaaagcatggtagggcttgggacaaccaccttacccatcctcatttccctttcatatagggtcaggccaactgcagctcagaggccatcgttcagccagccaccgactactacttccacttctaccgcctgtgtgactgagctgcctcctgaggcagtgccacagccgggactggagtccctgggccctcaacactggatgcaaatgtgttacactggagcctgctgcaggccagctctctgctcttcactgcttcccttgactggggagactggaagtccttacactggagttgctgggccaactggtcaccctcacacagcacagagggggctagagggaacagcctcctgggtcttccttctggtcatctccttggggcagcacaggaccacttcatggctgtctagttatggtccctggagggctatttgcccaccttcactctccctgccttcccttctgagttgtggtagagcaaagacccacaggggttggacccagacctcttaaaacctggctggacccccatgagtccacgcagagtcaataactcacctgtcatgctgttcccaggagggacagcttggtaggaactttctggggtttgactgttacactagacatggatttctaagctttaagtgtggttggtttaggagagttttccttgggagagctagccctgaggtagtcagggctagctccggatggctggagaagctgaccttgtgccttaagtctactagtgcctgatggagccaccctcatagggctgaaccagtggggctgacgggccaggtcagccttggacccttgatcctggaggaccctggaaggggtggttccctgtaagctcccaagatctatgttcctgggagtttcccaaactcatgatggagttggtgacaagagcagaggagcaagaatccctgcaagcagtagactggtttccactggagggtgaatgcagataccttttattaacgatatacttactaaatgcacttaaaccaggtaccaaggagtaggacagaactggaaagctgagtgggcctcagtgtggagaggtactagtggacaggactttcatggcttgggtccatgctcctcccacacccaagaggagtggtgggtttgagtttggaggttttactcaagtgacagcttcagcatttcttggtagcacctacagcattctgattacatgcaggttcctggaaggagtgtgtcaatcatttagctgcatgtcatcggctcagcagtgggaaggaaagggtactgctctgaccttgtgtattctgactctttggaaaccaggccctgcttttgccaagcctcccatcctgagctctaaatggaaggcctttctatggggtagctaagtttgggaagcctatgaactgtgggtcctgccaaggttctcaaagcacttatcctcaggatagggaaatagcagggacgccttgtccccaagacttctccccaacttggctccattcctgcattctgccataggaatcacaacttcccacatcaggccatgcttgcctaagacctcgttctgttctcccataaggccgtccttcccacagtaccttaagattgcccagcctccctgctctagtggctggggctcccttaccagaggggcaagtctggcccctcagtccttaactggaaagtgaccctcttctacccctggagtccatctggacagagccagcctgaggcccacgggcagctgcctgtttgcatgcctgggaagaggtcctcagtgtgagttggggtcaaacttgggctccaagctgcttgagggggtcaaccttggaccaaagtt

SEQ ID NO: 25889 - DNA, 1168 bp, Mus musculus
ctccccgtgcctgtctgtgtgagcacgtgtctctgtatgtgtgtgtgtgtggtcctgggggggtgggcttgtatgtacctgctactctgtgcactggtgtgtccgcacctctagggtgttcagggagagggcaggcaggtgggtggacatgttatgccctgtctcagcgcaaggccagggtctcaacagcaggtgtatggtgcacctgatggccggctgtccctgcctttcctgcttctgttttgttctaattcacatgcacactttcgcgtggctgggtctcccccgccctccacctttagggatctaagtatgccctcagctgtgtgtgttaccacagaggtgctggctgcactgtgcctgtcgcctttgctgtcttctccctgtcactctagatatctgttgggcttgtgtgagtttttatgtgtatgtatgtgtgtctgtgtgtgcacgccctgctgttggatcctggtgtcttcccagggcctggcatattctgagcatgtatgtatctgcctgctgtggccgcccatgtacttcaagctggtctgtgccaggggatgtggcttgtatccagcctgtgtggctctgtgctctcaaagctgtttaattttagccttccctaagccctacaccatctcttcctcactgcctgttcccaccttttcctcctcatgagacattccagcctggtccctgggcagggtcttagtcgtcccttcctaagtcccagctgaatggagcctgggctaaccacctgactgttaaaccagaaatcccggccccctgaaccagcatggcatcgggtatggacacggttgcctgctaggtggcagcctgcctttctctaactctgggtgagaatcttatcaaatgtgttgtgtgagtggggaacggggtggggactagggctcacggggttatctcttgccctaaatggctgttaaggctgaatgggcacttcttgtgccatgttagaaatagaacatagggtcttgattaatgttggataagcaagcactttatcatacagctacatcttcagctggtaaaagagcttgtattaaatcagattaaagcgttaatgctcagggctggggtgatggctcagtcagtaaaaacacaaggacctgagcctctagagcccatgtaaaaagaaaagctgtgc

SEQ ID NO: 25890 - DNA, 1503 bp, Mus musculus
gctgggtgtaaccccaggaaagggaccctcccaactccctgcagaggctgtgtgggaacagaagagggtaatgtagaaagtctggaaactcgagagaaatcgctgccatccttccttccatctgcctcagtctcctgagtgcttccaccaaggcatccgaggggcccgagcaacctgcaccagcaggtgtaaagttggcagcgggtttatgcagagcgtgctcctgcacctcttagccagtcagctcagcatccccccacatagctgttctcccctcagactactaggaatagtagtgacccagcctgggtggaggggtgggggggccagccagaccttgcaaacagtgggtggagaacagagtgggtttgcacagggtgcagctggatgacacagaggctgggcataagatgttagggcaactgggggaacatggaaatgggggggagggacttgagggtgaggagggcaccagagctctgccaccactgtcctaggatcttgggcaagtcacccacactccctgggcctcagtttctccatctgtaaaatgatggtaataatacttcacctacctcatgggggaggttgtgaggccaccatcacctgacctagggggtcaaggcaggagggctctgaaggtgctacccagagcaaagttgtcagtgaggcctgaaagcaaggcccacctgccagtccaccctaccccacagagcctctagggaccgccagagccaatctgtctcttcactgtgtccccaccccctttatgagcgtcatctgacatcttgtgggcaccctagacttagttgttacattgtttaggtagcttttcttgtgatcatcttctctgtgtaactgctatacaaattccacctgccccagcacacccctccacctgccctccagcaccagaggccagggaagggacaaaggaaaacagccacaaaagaaaaaaaaaaaaaaaaaaagccaaggggactcccagctcagctggggcccccaggggtgggaactggtggcgctgtttgtattgtgtttgagtccttgagcgcaagtgttttataaaaaataaaacaaaaatccactatcacaaaaaaagaaaaaaaatacagcaaagagaactgaagacaaaagggaaaaagaaccatacaatttttttccaccatatgcaccctctaagccagcaaaattttcctctttgcaaaatcatatttttgtgggaatgggccctgctttttgtggcaaggcctgttctgattaataaaggatcgtgaaaaagtagggccttggctgtttcctctgtgggtcccagccctctctctctcttcttccaggggaagcaacagctgggattggagggactggggagtcttgggggtgtctccactcagcttgtcacctgacacttgacttttcattgtggcttgggcctgctggagctgcccgctcactctcagatcaagactaatccctacaattcaccagctgccccaaagtaga

SEQ ID NO: 25891 - DNA, 1198 bp, Mus musculus
tctgtctagagagaggtgctgcctaatttaggagcatgtatctgtggtgtttgggtgactatcctctctaagccttagatttattggctttccgttccttgactataaagggaccaaaatccgcaggactaagtgagatctaatgcatctagcaccttatgtggtgattaaataacggtaacagtaaccattgtctaacgaggttttttgtgatttgtttgtttcaggcactgtcaaagcacagtctgctgtctcccttgcctagtgtgacatcattcagacgcttctacagaggtgacagcccaacagactctcaaaaagacatgattgaaatccctttgcctccgtggcaggagagaactgatgaatccatagaaaccaaaagagcccgcttactctatgagagcagaaagagggggatgctggagaactgcattctccttaggtagtggggcagaaggctctgggtgtcacttctctttgacaagacagtcttgtcaacctcattttccttctcattttagcctgtttgctaaagagtatctgcacaacatgacagagaagcagctgaacctctatgatcgcctgattaacgagcctagcaatgactgggatatttactactgggccacaggtatgccatatgctgagctgcatcttgggataatacgataacaagcccattagagtctaaagtcatatcttcccaagtgtgttcttcctcttcttgtaaactgggactttctgtataagcctggctgtcctgggactctgtatagaccaggctacccctgaagtcacaaaaatctgctgcctctgcctcccgagtattgggattaaaggcctgtaccactaaggtaggccctgttttcatccttattactcatataatagacaccaaacccaaacactgttcaaatttttccagaaggtgcaaaatttgtttaatcagttgtttcttttaaagattttaaaaattattttctttattttgtattcgtgtttaagtgagcatgcatgtgcatgggagttgaggacagaggacaacttagaggggttggttttctccttttcacccagcgtttgaaccaaggtcatcaggccttgcaccaaggccttttctgccttcttttttttggggggggggtttcgagacagggtttctctgtgtagccctggctgtcctggaactcactct

SEQ ID NO: 25892 - DNA, 1129 bp, Mus musculus
agaagagggagtcagatctcgtgatcggatggttgtgagccaccatgtggttgctgggatttgaactcctgaccttcggaagagcagtcgggtgctcttacccactgagccatctcaccagccctaaaatacatttttattaatatatctaagatgtgatctttgagctaacatcactgatctcatatatcatgagatgtatctcattatttatattggtttgtttgcttatttactatttctttgatcctcacaggaggctaaacttaaacttgcccattacaaatacaatcttgaaaatttcataagtaatgctaagagtttcaaatctgaagtcttccatatcctttttcctagagtgagacagggaggtcttgtacattgctttacaaagcatttaactataggttctaaatcaggtagaatggaacagaagaaacaaactggaaagtttgaagactccattatcaatccctcatcttttaggactcggagttcaacaatacagatcagattgacctatatgatgatgtgttgacggctgcctcacagccctcagatgacagaagcagtagcacggaaccaccccctcctgttcgccaggagccagctcccaaaccaaacaacaagacccctgcaattctgtatacatacagtggcctgcggagtcggcgagcagctgtctatgtaggcagcttctcctgggtaagcaaggataaccaaaaatctcaagggtgggctggagggagagcactgggaggtgatggcattttcagaaaccactgttgcactgttttgtgctctgatggggttggatttctttttcctgggatcaggttggattgatctctgaaagagaactatcctgaggacgtactggtgccgaagaaagcattgattaagtgggtagttgccttttctgccatcttattactgcccctgaccctggggctttatgtctagcagggtcatctatgggacgagatatcagagtgaacaccttgaactcttggtggtcattagatggtcctgtgataatggtgggtgatggggatcaaagaccttgatagctgtagtgtatttgggatatgtgctgacaattctgtaaaagttaacagtgtgagatgtt

SEQ ID NO: 25893 - DNA, 1298 bp, Mus musculus
agaggaaggtactgcctttttggacttagggatgtcatgggacctcagtaacgaggacccctaatttataaagtaccagaaatgtggggaagaaagcaatttgagcagtatgtagcctactcacatgggctctttttcaggtttgatgtaagcataggcttgcatattcccaaggtacatactttgacttaaatgtgggataactcagcactaatgggcaggtaaagtcacaactgtggttattttggttttgttttggtttttggtttttttatccttttactccaatactccccctgtcactttgcctggaggtgcttcaagcctttaacaaggagcagagaagaattggagccagactttagtgaactcagctcagagttgtaaggaccagcacactggtggccattttctgcacaagcaaatggaattgctttttttcagcatcccaattgttataggttgctcctgatagaggtagccacagtcctggagtaccatagggtgatgttccttctgcatgcatctgcagggcctgtgagatctggtgtaaaaagagacatgacatgtggagatgggacttagtgtgtgaggcatagggtcattggagattcttcagactcgggggagactgaattggatgcctctctcatcccagcacacttctaatagaccccttcagtcacggagggagtgccccaaggttggacaggcacattccccttggacagagactgcaagttgtggcttattttcctgttccctaaaccgatccctattccatcaacatggcaccctgcctcattggctaagtgttaagtgatgggcttattcttgaaagcagcttggggtgtctttttaaaatgtagaaaaaaatgtaaagtgacagttaaggaaaaacaacatattaaaatatcagaaaaactgtttacccagagaattattttctccccacttttatttttactcagtgacataatttttagttttattcctcatagcaaaaggaaaaaaaaaatcccaatcctcaaaaggtcaaggccccgtcccctgttgtcggtgatttgtttgtctttctgataggttgaaaattgtgtaataaacttgatgacgatgtcaatcttttatactgcattgtatttttttccttttgtaacaaaatatttttaaataataaatggggtgtgagctgtttacggattctgcattgaatagatttgttgaggtgtctggggcatggatacggactgatagaggtcctatgtgatataggaaaacctcaggttcttaagtgtaat

SEQ ID NO: 25894 - DNA, 1189 bp, Mus musculus
catcccaaaccaaagaacattcatcttgaactcatattttcagctacttaaattcgtgtatttacgtaaatgctaatcatttcagaacaaaagtttcttgttcagagagagctacagagggctgggtggtgttggtagattgcttgggagataaaaggacaacactgaaggctctgggaaattttcttcgctttatctttctggatgggaactcaaggaaacacaggctttctccattagcgtcaattacagtctgctgttgtaatttagaaaggaaaacccaacaaccatccgaagaattttcgtggtcatagtttgttgaaggccaggctgttgttgcccagtcgacagtacatttttaaaagtctgattaagactatagctttgttgagtgtgtgaagcaagacattgaggtgcttcatttggtgaggaggcgaggtccttaggtagatttatttagaggtacctgaaaggcctatcctccagcttccaaagttagaggctctcttctttcaggacactttacttcagcggaagatctgaacctgttgattgctaaaaacacaagattagagatctatgtggtcactgcggagggtcttcggccagtcaaagaggtgggaatgtacgggaagattgcagtcatggagctcttcaggcccaaggtaagggacgggccctgaaggaacccttgggtgcagagtttaaatgggatgggtgaaggcttaagtagaaactctttgggaatggcagtctgtaaccagaatcccagaaggagagagttattagggaagagaacctgaaggagcttgtgggttaatgccgcagaggttgtagtgttaatcctagcttcatttcttagtcatctcatgtaaagcacctttgaaagccttgatttccccgtttacaaatgggcgtaacggtgccctctcccgtagagtactgtgaagataaaatgattgattttcacagagtaagcacatcctgttagcttaacagtttcattactattagaacaattgtaattcaactgtatccaaaacaaaaaaaccccaaaaaaccatgaatgtttttgaggactgttagtaaagatctattgtagctttgcttgttattactacagattactttctctccacatacataggtgaaggagaaacatttcattctcttctcaaatcttgaatag

SEQ ID NO: 25895 - DNA, 1132 bp, Mus musculus
gatagttctttagtaaatatgtctggcagagtgaaggtccctatacatttagtgatgaacaagacctcaagtgggtcatggtctaatgtaatggatagatcccttctgtcataggtaaactttggacattcctcctaaaaaaatgcttctattttaatttaattaatttaaatgcatgtttatttgttttattttttgagacacggtctctctaggctgtcctggaactcgctctgtagaccaggctaccttgaattcagagatctgcctgcctctgcctcccgagtattgggattaaaggcatgtgctaccactgcccggcatacattttaagtttttaaaaatttactgcttctctgcctgtgcatgggattctatgttcaaagctttgtttggcagcagtcctgttctagaagtatcgtttgaagtgcaaaagcaggattgagaggttcttttggataatgtggatctatcagggatgttctaggactaacattgttctttttttcctcttagctcaatgtcgacagcaacgaacaaggctcctatgtagtggccatggaaacctttaccaatttaggacccattgtggatatgtgtgtggtggacctggagaggcagggacagggtcaggtaagagggagtcctgggaataaagtcttgcttgcctcttcagctgtccttgcttgcttatctagaatgaggagtgtgcactgaagagcctctttactgattatagtgtgcctatcttggtgtgccggacactgtatattcatttctgtaatttcattagcaccttgttaggtgtattctttggtcatcccaaaagtggggaaacttaggactgagaaaaatggattaatttgccagaggtcaccttgtaagtagcaagttatgtctgactctagttcttttagtatgctaggttccaggatctaagcaagattcctaggaagagtgattgaaagttcttgctttttggactaggatatcttacctgcttagtaaatttgaggggctctggagatcaacaacttaagtttgcagtcccaaatctgattccacagtatgggtcgtgggatttagagctggcatggtataactgcccaagtctcttgaggggttcttgaga

SEQ ID NO: 25896 - DNA, 1351 bp, Mus musculus
ttactgatacatctgcccaactaaatagtctgtgggtacagaaaattagacagtcatttgcattgcatgtattgtaaaattaaaagccaaatacaatttcacatttgtgtttgctgaaaatacaaatcctatttctctaataaaaacagtctgaacaataactcctgctgatttctaatttgggggataggtcagaagaggtgtaaagtgagacttgatgaatacttgaaagttattgctggatttaactggagcttcatattctaggtaaatgttctaccattgagcttcatttcacagcttgaactataaaattttaactttgagtcatggaagtaatactcttatctagagtcaaggtaaaaatagaaaacttcagtctcaagcaaattctaaaatctgacttctttagagtgtaaatatcaggaaggactagaagggatttccgcccccctcgtggcttagggtgagggcacgtcttgggtgctggctcatggtacactttatgctttactccttgttccaggtttatggcctctgcgctctgaccccggtcgggagacggatgacactttggtgctctcttttgtgggccagacaaggtaagggcaggcctgctccttccttatgggatgacggtgcaaggttgggaagctggtcccaggctaacctgaaccttccttttattctgctacagagttctcatgctaaacggagaggaagtggaagagacagaactgatgggctttgtggacgatcagcagactttcttttgtggcaacgtggctcatcagcaacttatccaggtagaggattagaggggacaaatgagcatgacttcactttgacccagaatgcaagagtagctgctactaggcttttaattaacccatttttatggcactaaaaataatgtaaaagttcttagagggtaggagacagtggtttcttattgtgcagaggtaacttttaactttgaagtagatgcttttagctttattttcctctcatcagcatctggatatcaatttatgtttttctatacactgggattatgataaatataatttatggggctggagagatggttcagcaggtaagagcactcactggctgttcttccagaggtcctgagttcaattcccaacaaccacatagtggttcacaaccatctataatgggatctgatgctctcttttggtgtgtctgaagacagtgacagttaactcatttacaaaaaaaataaatctttaaaaagtcatgggttgctataacactgctcaaatgtttaaaaaatatgtaactttgtggcattaattatatcatgctttttgatatactgtttattcct

SEQ ID NO: 25897 - DNA, 1148 bp, Mus musculus
tgcaaatattataccattatatgaggggtttggggatctgcagattttggtattcttgagggtcctagaaccagaggcttgactgtaatggtagaactgtagtttatctgtgttctaactgggagcgggaacggggagcacttttgaatttctgaaaccatccttgcagttgctttgagacgtctaatctttctgtagatcacctcagcatctgtgaggttggtgtctcaagagcccaaagctttggtcagcgagtggaaagagcctcagggcaagaacatcagtgtggcctcctgtaacagcagccaggtggttgttgccgtgggaagggcactatattaccttcagatccaccctcaggagctccggcaaatcaggtacaggagtgtctttatactctgtgtagtattctttgttctgtggggcatcttgggtccctgggtttcttcctctgctatattcattcctctttgttcagccacacagagatggaacatgaagtggcatgcttggatatcaccccattaggggacagcaatggcctctccccactttgtgccattggactttggacagacatctcagctcgtatcctgaagctcccatcctttgaactactacacaaggagatgctgggtggaggtatgtgctattggtattttgggttaaaattccagtcaggatgtggaacgagactttaaagctcctctttcccacagagatcattcctcgatccatcctgatgaccacttttgagagtagccactacctcctttgtgccttgggagatggggctcttttctactttgggctcaacatcgagacaggtgaggaaaaacattgagtgtgggttctttcagaaatagggagtgttggtggctttgagccttaaccaagcagctgttgtcctgttttctttccttcttctcatgctgttctttctgcaggtttactgagtgaccgtaaaaaggtgactttgggcacccagcccacggtgttgaggacattccgttctctttctaccaccaacgtctttgcttgctctgaccggcccactgtcatctatagcagcaatcacaagttggtcttctccaatgtcaacctcaaggaggtgaactatatgtgtcctctcaactcagatggctatc

SEQ ID NO: 25898 - DNA, 1770 bp, Mus musculus
tccagcagtacggctcctcacgagacctcctttggagaagaagtggaggtgcacaacctcctcatcattgaccagcacacctttgaaggtgcagacaagctcctttgtccttttttgcttacatcgtggcctgaatgctctggagcctgacaggatggtaggctctcctgtgagaaaaagccagattggggttggagcagagaaagcaccgctgatagctgtcagttgcgttaaatctagagcattggccatcttgtccttagcccaggctggtggggacggacagtctgaagcggcaagggcagtgagtggctcgtgttcttacactgcctgccacagcctcacagaagcacgtgatcgaggggtggagacaatatctgtaatccgtcccctctctcctctcctagtgcttcacgcccatcagtttctacaaaacgagtatgccctcagcctggtctcctgcaagttgggtaaagaccccaacacttacttcattgtgggcacagccatggtatatcctgaagaggcagagcccaagcagggtcgtattgtggtcttccagtattcagatggtgagtgaacagtctttggattatgaaggatatgaaatccgggggaagcagttagcctcttaagatctcagagcctgaacaggatgacttagagtaggaggcagatcttggtacccattagaggcattcccatcattgcctggggacctacgcttcatctcagtatttgctgactcttttttttttttaataaagatttatttatttattttatgtatatgagtacactgtagctgtacagatggttgtgagccttcatgtggttgttgggaattgaatatttaggacctctgctcgctctggtcaactcagtccctgctcgctctggcccagagatttattattatacataagtacactgtagctgtgtctcaagagagcattctcatacattatatcctgactgcattttaccctctttccacccctcccagtaccttttgtttttttccagagggttaggggcaaaatttaagtcaatggggcaaccaggggatactcttgactagatgaaatgtgagcttataaaaaagactaaggagtatctctccttctccctcccaggaaaactacagactgtggctgaaaaggaagtaaaaggagctgtgtactctatggtggagtttaatgggaagctgcttgccagcatcaatagcacggtgaggtctatgggttgtacatgtttgtagaatgtctctcccttaatgatggtaggggagtttgttttagggatagcagaatagtgggagtagagaatggactctaagctggaatttggggaactgaagttgagctggactttggatggatttggttttggaacctccaaggtttgcttggttttggatttggttttttgagacagggtctctctgtgtagctcatgctgtcctggaacttactatgtagaccaggctgccttgaactcagagatctgtctgccttctccagagtgtttgaattaaaggcatgtattagattttttgagtgctgtggaggttaagcagagggtacaggctgtggcctctgtagtaaggtatgtccatgttaaaagagtatttcattaaaacaaaatgaaccaacctttattttccttagcattcttttttcctttttggttttttcaagacagggtttctctgtatagccctggctgtcctggaactcactctgtagaccaggctagccttgaactcag

SEQ ID NO: 25899 - DNA, 1067 bp, Mus musculus
tgtggggctgagcgtgtgcagtgctgtgtgggttatgcatgcccctcatgggcagaggtttattttgtaaaattgagaggctttggagactgacctccagatggtcttcccagaacactcagcacatggtgtcttgttgaatgtggtcctgttgttgaggcctccttagggagatgggttcagaaagtgacatctcgtgtctttcagtgctgccaccactgatgaggagcggcagcacctacaggaggttggtctcttccacctgggcgagtttgtcaatgtgttctgccatggctccctagttatgcagaatctgggcgaggcttctacccctacacagggctcggtgctctttggcacagtcaacggcatgataggtaaggtcattcctgtagggcacactcagctgcagcaagctcacccctggcttgtcgaggttttgaagtgctctataagctaactgcccctttccttcttcagggctggtgacctcgctgtcagagagctggtataacctcctgttggacatgcagaaccgactcaataaggtcatcaaaagcgtgggcaagattgagcactccttatatcctttctttccagagcattgtctgttgggaagctctttccagcacatgcagagagctttgcttatcatgtgaagaagctgaaactccaaagcctaaagggtcagccatccattcctgtgcaggagcagttgaagccctcccaggcaaggcctggaaaagctgctgcctatgtgactgtcccaggaagagtactcttgagtgttttgctcacttgcagggctttgggcctggtctctctctaagcattggattatttaggactctgagaccagacttgggtggatggtgatatggacatcagatttgcctggaatattttttcaatctattcatatttttctgggctttgccataaccttttaaaggttaccctaattgagaaccattggattaagcagaactttctttcaattccaaaactgtccaaaagtagtatgggttttagtagaagcctattgtttgctgttttacttccgactg

SEQ ID NO: 25900 - DNA, 1546 bp, Mus musculus
aggaagtaacctttcccaattctgtagtttaggagtccagagtgctcactggggaaggtattcctgggagggaatattgagcagtgacagactcaatgctagcttgactaaccaaatccctaagggctatggccaggtttttgttgaaatcctcttccttgctgcagcagtggtggccagtaggtatctctcagcctgctgaggtgagagtaccttcttgtctccatggcccttctccctgtctcgtttcagtatgatgatggcagtggtatgaagcgggaggcaactgcagatgacctcatcaaagtcgtggaggagctaactcggatccattagccaaggacaggatctcttttcctgaccctccctaaaggcgttgccctcctatcctcccctcccttgcccacccttgttttcttggcatgggaggcttttccctaagccacctgcccctagagccacagctgacctgtgtggaaacagggctttttataactaaaaccagttcactagagacctaggaatgggctgggctgaaagtgaaatattttctccctggatttttaccagccatcaccttggaccaccaagccttgaatggtgttgccagttggctcctcctggggaggacttttgtcactcttcagccaagaagcagctctgtgcacctgtgtgtgatacctcacactcgtgctttgtcctccactgtctatgtaggttgtgggtgtggggaggttgaggtagagggaagagggtcgagagggttccactgtcttgagagcttccttttgctttcttctcttgcctctgagaacatcagcctggaggcctgtcaggctacgggctgcctgagtggaaacctgggatggtggagaattcccaagccacagcccttttgtctcggggaactcccttcttcacagagaaggaggtgggggctgtgaattggttgttagtttctgaattttaccaaataaagtagaatctaagaagaaactcttattggtctctgcttttctcctctgcccactgtccatcattcctcatacactgcattgggtgcaaactgaagtggtggctgcagtcacagatcttgcttctcagatagtagatgttcccctccttagttcatgactaatttgagtgggattctagaagcacagcagctattatggttgtttgtgctagcaatgagacagtctggaagccactcgggctacctttactgtcttccttgtacagaccactttgtataatgcacagccagccccaggtaatatccttttctgacgcagtacctgctgcttcttgttgcatcttgttgagacaggattttactatgtaactagggctggctttgaactcacagcgagccacctgcctttgtctcccaagtgttgctataaaggcatgctctaccacacacagctaagattttattttaacctctgtgtgtatgtgtgtctatatacatatgtctgtccatatgtggacttgtacacattagtgcaggtgtctgtgaaggccaaaagagggtgtcagattc

SEQ ID NO: 25901 - DNA, 1206 bp, Mus musculus
ctccctacccaacacaacctcagctcccgggcttcccaggacagccccagcctcctgtgccccctcaacctccataccctcctgggacaaccccttcctatggcttccaccctccagggcctgcctggcctaggtattagtcctggtctgtgtccaccttcttccttctacctgcaccacagcctttggcctccatttgctgagatttgaggttaacactggacgtggtggtgatgcgccctgaaacgctgggacacacagaagccccgagcctcgagttggaagcacataggcctcctgaaaggccctgaagagtgcagcatgagtccttctgggagctccttctgccagggactgctcagcacatcctgagtggcctgctgggagcccagggctctctggtgtctgcatgaacgggtgtgttcatgtctttgcatagctacctgcgcttgatccctgacagctgaaccaatgtagaataatcttgatgcagggtgaccctgggtctcggaccctgctcatccaggctgtcccttggagcttggtatgtttgatgtggaatcacatgccaagtgatgacagagttctgtctgtccactaaaggatgctctaccttatttaccacggtcgggtcgtaggaaggaacagttacgaaaagtggactttgattcctgaaagccatattttagctgccgtgccaatgtcaggcaagcgtgtcctacgtgctggcagagaccatagcagcagtggtatggtgagagagctggggatgccaagggaaacccaggcctcaaattgtatggttggacgtcctagaggtcaccctggagccccgggctggagtggaggaccagggttacctcccagccacttttcactcctagggccctccacttctggctggctctttctgaggttcacccacccctccactcctttagtgccttgaatcttatttgctagcagccccctttctcttgtttatctccttccttttcccagtgtccccgcagaacagacaccagacagaacacccccatggtgcttcccagacatcatcactacattggggttggtttctctacactctcattctcagaatgtaaagggtagggactgtgagtgcagccccggctctgggtgggctggagcctgcttagtaatgaaagtgactacactagtctacaggggttgcagcaggtgatg

SEQ ID NO: 25902 - DNA, 1363 bp, Mus musculus
ttggtcttggccttgctagggaggatcctggggggtctgaaacttgttctttttgtcgctggctttgtggccctggtgaggtctgtgcccgacccatctacccgggccttgatgctcttggccttgttaactctctttgccttgctgagccggctcactggctccaggagctcagggagccacctggaagccaaggtgagagggctggagcgccagatagaagagcttagagggaggcagaggcgagcagccaagatgcccaggagcatggaagaagagtgacaagggcgtccccaagagacaccctcaccgtaccaaagagctgagctgcttctgggtctcacggacctccttgcagcccccttgccctttccttgccttgtgtccggaaccttcacacctttacccctgcgctagcccctggctgagaggagagaacctgtcctctgccggtgctcagtcaagtgatggctccctgcccttctgtgctcccagcctgcctcccccagggcaggttggagccctcagccctggcttctgctctcagccagcaccactgcccgctgatctccgtgatgattaacctgctgcttccttacacaaggcctgcccaggctgaagctcctgtttgaccactccccccccccccccccagctcttttcttcctgctcccagccacactaccatcccaagtcccttgcggccctctctgtcttcctcattgcactgcaatgggcaggggtaggagattggagataaggatgaagggggaggaaagggtccctggaggcctgtgcatctatgctctgttacaagtgccttagcaggagtcagcagcaccctccaggtgccccttgccacactgaatgtgggaaagtgtgctgtggctacttcgtggtcagagtgagccccttgcagaatccccactccagcaaacaaagcaacggccctgctgggattgtcgaatctcccttgagggtttcagggaccttgaaaagggcaggaggacctgctgtcttgcagttttacccctgtccactctctgccatccagaagcaagcgttggtcagtgttgtgtcccagtagctgggaagggcacggctttgccctgatctgttctgcagggctaggagtgagcctgccactaacccctctccaccacttgctcactcttggccttggccttggcctttaggtccctggtggagggagatgacccatgccaggtccagcacaagatgtgaagattaaatgcctattcttactgaaggtttgatgtggaatcatggctgcagtgatatgtttttatcagcgcttggtggttttaaagtgcatgctattttattatcttcttctgaataa

SEQ ID NO: 25903 - DNA, 1269 bp, Mus musculus
tttctccagagtcagcctttatgacttaggacactcattagtcctgtctatctggattctgtaagaagtagaatacaatggacatatttgctttgtgacatcagggactttttcattactgggctctgcatttgctgagggtagccagtaaataaccacagcagtgtagttattgcctttcagagaggtgatgacattaatacccgtgatgtgctggtgaatagcaaaggtgggggtgggaaggagctatcccactctgtgtttgtccagagtatagtgtgggtaggagcctgaatgccgtacagggcattcagggtcactcagagttggcttgggtctctgaatagttcaggttggtttcagtgtagaataggaggtggtgtcctcttctctagggttggccgaattctccggctctcccccagtcctcacagtggcctaccctctcccaggatgcagtcatgctgcacagcttcactcttcgccagcaactgcagacaacccgccaggagctgtcccatgctctgtaccaacacgatgctgcctgccgagtcattgcccggctcaccaaagaggtcactgctgctcgagaaggtctcttgtattccctgctgctccccatcttctggccctgctttgtaatgtcccttttctaacatcatcttttctctcagctctggctactctgaaaccacaggctgggcttattgtacctcaggctgtgccaagctcacagcccagtgttgtggtaagtgttcccttccgggccccagtagctgtcccttcacagaagtttttggtgttgtgagcccctcccactctccctttcttttctgcagggtgcaggagagcccatggatttgggtgagctggtgggaatgacccctgagattatccagaaggtgagtcatgtgcacctctgatgggactgcagtccccccattagtaccacaggcattgggggcccttaagaatctctcacgatgggcaatgtgggagcctgcactgccaatcgagagctttctgatgaagcttactttagtctggctttctatgtctcatttccctggcttctgagtagaatgaggtgtgtgtacttcacaggcttgttgtgggaaagatttcattactgattagggcagtttttagctcttgcggtgattacgatctttgttgatattaagccattttgttacagattttgaaggttttgccttagaataagagttatcttcagatgaggagtcagaagtggcaagtcaagacagc

SEQ ID NO: 25904 - DNA, 1164 bp, Mus musculus
caagatgagggaggaggggggggggggacagggggagggttggtgagttcacagagaaactcttgggaaggaagacctgagaagtgagctatcgcctaaaaggctatggggaagctagggggtcctgataacacaacagaacaactgggtatgttctgtcaggctgtcctgtgggcaaggagattggaatttaccctatctgtgattactatgtagcccactgctccctagaagtgtatccggtaaacctacaggggctggggagacagctccgttagtaaagtgctttctaggtcaccatgagctgaatttaatccccagcacctaatgtagaaaagccaagcatggtgagcccttcctctcagtgctggggaggcagagacacaaggagcccaggagttcacacacaaattgaactgacctaactagtgggccctagactaaaaccctgtttcaaaacaactcctaaggatgatatccaaagtaatcaagcctctgccctctacatgcatatgtacgtatctgtattccccgtacgaatacacaggattacaaagggccaagagatgactgagtgatcatgttcactgtgatggagcttgctctagactgttgtaagcagcagtgagcatgccagggtcggtgggcatcctgggccatgacgctcagtgggttgctgagttgtggtaggtgaccatagaagctggagcggtgaggcagtcagtgctggagtgcgttctcacaagttcctcacactgacatccattctggactgaagaagctgtggcttctcgtgggattgctctagttgaacatgccctcaagcagttttatttcctttttctttgaaggctgggtttctctttatagccctggctgtcctagaactcactctgtctcctgagtgctgggattaaaggcatgtgccaccattgcccagtgaagtgtggtctttaaaaaattgtgtcttacagttcttcggtaacagggtaaatgtgaaatccgtttcaacaactaagtaagagatgggctgatgtctgcaggtgtctgcaggtgctagtgcagtgccagtgaagggagaggggaggttgagggcatggcctgggacatcctgggcataaactggtccccaaagctggccagtacaaagccattgagtggttg

SEQ ID NO: 25905 - DNA, 1192 bp, Mus musculus
tcatggtactccctacttttactctaatggctcttctaggtcgcattcttaaccaaccacatgtctgcttcctctttcagggtccaagaatagtttttaattcatagattgtttaaggataggcactatgcctatctcgaatactaccatgtcccttctcttagcacacagtgcctgccactttcagatgtctgcttacttatagtcaagctttgatttcattcatggatgagtctttgagcttggcttttaactctttaaggtaccattgggaacatgattttttattaatcagaggcacatagaaaaatatggcaacacccctattaccataccatacctgtcacagtgttctgttttgagggatggtgcttatgtagaagctggctttgtattgatggtataaatttctattagtactctcatttgtcagagatgatagttggtctcaggatggaggttcattcaataaattcattcctccaacaaaagaaagaagtttatactatgacccagctcccaaacaagcacaccatgttatctggaacaatggaaggaagccaaggggataaagtgggacgaggctgctgcttcagcctcaccatgtctgtggtagaataggctgcaggtcagtgaaatgtgcaagaaactggtccaaacacatttctaactcaagtgtcactgtgttccactttaaaaataatttactttgagactattacattttacattcattaaaaataaatgaaaatctgcgtctaacttttgaaagtaagtgttaacttacttgaatgctggttcccccagaaaaactgattactcttgttacggacaaatgaagctggcaccatgaagttttggatcacatgggaccctcaattatccagcagtgtgtgtgtgctctacatacactagctcctaaagggacagagagccaagatgcccctccttagctagcttcagatctaggaagggtttcaacttttgttaaagttcttttgctaaattccttgtcatattccatgttttcccttctgagactgacagaagatgggcagctgggcattaataaatatctgttgaacccactagttgttgggtactagttgtactgttgtttttatccttgaattactccaaaaaatacatttgtaataagcaaaatgtcctagactaggtagtgtacatatta

SEQ ID NO: 25906 - DNA, 1153 bp, Mus musculus
ccctgttgagttgggcatgttgtaatgcctgcctcttcaccaccatcctggccttcaggctgtgtgtgtgttgtgctctaaacagggacccgttcgttatgtctctctaccatgcaggccagacctttaagggccatctaaaccaactgtatattgccgtgctccctgttccttcatccctatctctttcaattctacattttcattaatttgttcatttaataaacagttgattggtgccctgtgttgtgagtttcctagtgaaaagagacatagctgaggaagactgaggggagacatgatggcaccacagaggtggaagattgcagatgcccgttgagatcccatctgtaaaagcagaacgaagtaagagaaaatggaaagaaaaatcatattttacacagcacggtgttcatggccaggataccacctcttctctgcaggggtgtgaaactactctcaaaactgtactagcttgtactaaccttgggagcaggggattttaaggcaagtccgatgcaaaaattaattctattaccatttccaggtacaagggctcaagattttacaacagggatggccatccctcactgttgagaaacatgatactgccaggctccgtcacgaggcagactgcgaccttgcctcactaaccacctactcccaatagttctccacctacttctctccaaaacatcccttttccttggttttctccaaaattcagctattcctatacccagccctcaccccctccttattgtgcatcctgctgacacccagagcacccagaatacaagtgtgtcaagtaagtgacagcagagctggccctccccagaaagcttacctttttcaggcaaatatgcccccaatggtagaagccaagatgatggcaaggataatacagcagatcatgatcatgatcttcttctgctcatcacaaggagagagaaatacatgagaatcgacatcactgtgcagatacacactttgacaaaaaggagacagatggggccagacgtggagggacagaagggacagggaatgcagaaggaaaacggatggatctggcttgtgtagagaatgtttccaggttagacacttagaatcagaccatgatgtgagtgtcctctctgccttctgaatagcattc

SEQ ID NO: 25907 - DNA, 1691 bp, Mus musculus
ggcctccctgagaatgagggggtacctgttactttatttccttataaccatccttggacctggctcagcaaacaatctacccccagaagaatctaacctacctgatgcagtcctgagttctcatcaaaaccacctcccatcctagcagctgaagtaccctcttctggactctgtgaagcaaccctgtgtgttggtgtgtaggttatgctttgtgccttggacaatccccgtgagacaagccaaggcactgtatttctacctcatggagtattctcctggaatatactttgtaggggaataactaacaaagtagaggaattctaagtttagtagtaaatgtggcttggaacagagtccctagctggcaggatgccaatccttagtttgttgtttgctgtcctgaaaacatgaaagactaatagatgccattttggtcttacaagttggcttatttgaaatttaccttttaattaagctctaacttcattgtgggtcacattggtttttctctatattcactcttgtttatttagagagaccagggtgacaggtcttctgaagctaccattggcaaagagtaaggttatagaatttgctggctagtcactgttagataattgctctttgtgaagacattactttgaggccaaccagaaccagggatttaaaactggtccagggacaaggtgctacagtctcaggctctggaaatgtcagtcatttgtgtgttccaggtgtacttttgtaattatgtatgtgagagatatgtacataattgtctgcctctcaggaagtaggaaaactagaagatactatgacctcaaaaaaaaaaaaaaaaaaaaagacaaaggtaagcagcagctaaaatcagctagggaatatatgcttacctcaagtgaatcactgtagaaatgtgattttttccccccttgccatcaagcttgttttctggatggctgctgatatgggaatcaaatgagacctttggagtaaggactaaattggttcccatcgaagttttctgcatagcagatagtgtgtaatatttacctccatctgttgcttacaagagggttgtccagagaacctctcacacccgtctgatgttatttacactatccatgtgatgtttctgtctggcggaagaattgggaggctctagagcagttcttcctgctttcttttgtctcctgtaattcttatcatggaggcaatagcctggaaatcgttagtgataagcctcagacctttggtggtccctgccagtatcccggattttgggtatataaccccccaatttaatgtttctatgggatagatgagtagtaatctagtctaggcactgcctatgagctttctttgtaaaggtacctcctcagtcacccagcattcaagatggagcctcagggatgccttcctccctttggctgtgatgtctggcaggactgactccggctaggaggggaaacaacccttagtgcaggccttttctctcctccttcaggccagctgaaagtttgaaatgccacatatgaagggcttttgttgtttgtaattttttaaatgtaaacttgattattttattgctaatttaaaaataaatgactttatactgattgtaaaacagctctggggccatctctctgcaatgttttggtgatttggcgccaccatgtggtaacttttggtgc

SEQ ID NO: 25908 - DNA, 1147 bp, Mus musculus
gtattgtgtgtgacaatacctcagaaaacaacacaagctgagaggcatctaaggtcttgtattatgagaattcttgtaaagaccataacttgaatgcaaaagattgatcctgttttaacttactcatacaaacaagtcgtctttctcttcatatccttaggctggttcaggggatacggtaaaagatctccagagtatcctgtacctcctgttggctgccacctgcactgctgccatcaccaatggagtgtttttaatgagggaggggaggtagcttatgacccaaagcaaagtcttgtgggatccattcctgttttcagaagttagctctgaatgccaggtattcccgctgctctgatacttctgctgggtggtacttctgctggtttcttttaccttctgcgttacacttttgcatgtcctacttttactcaattcttctcaattttgcattttctttgccctagagacacaacaaacgtccctttatcccatcaccactattacaattcaaagtaggttgtagtataccaaaggactccttcccgctttgaagtctttttttcatctccccttattaatatgattataggagagtcaaaattaagtagaagtcaagatataggtaaatatataaacaccctacacaaacattcgtatgatctccagagggtccttaaagaataagtttgtttgaaaaatatttagttaacatatacctctaaaaataaaccagccgatatatttttaatctgtttctgttccatcttgtcatttggtggattctacttttttaatatataaatacagggtatacagcatattacattaaatcaaacttgttagttggctgatgcccagttctaggctgagaggacttttctttctcctaacctgtatttcctttgtttctgacaaccataatagaaacagcacacacacggttaagccttttcctgtgatgactacagcgtgcttgagagtctgtccctcaagtgcattcaagagtacccaagatgagcctcacgtagagcctgcttctgcagtgtagcttttgtgcgcctgcactgtcttcctgacgtgacttctgtaagccatgcttctgctcctcttccccattttcatttagtgtcttgggtagaaacct

SEQ ID NO: 25909 - DNA, 1101 bp, Mus musculus
gggctgctctacactcggatgtggtagtggccccacgattctctccacctttcaaaattcagtcagttgtatttaattaactgctgaattaatagttcatgcaattctagctcagtaaagactgtatttttaaaagctaatagtaagaggaacagtggggcaataaactctgactcacaaacagtgcttacaagctctgaaagcgatttctcattgcttaaatttccaagagttgtttgaaggaaataaaacaagaatttgtttcctaagactacttaattttcaacggcccagagttaataagaggaactaaaggcagagcagggcagatgtctgttacctttctgtttagccttttttgtcttgttatggcaggtccaaggcagagatgagacacacctgccgaggtaccatcaacctcgccacagccaacatcactgtggaggactcttgcaacttcatcatctccaatggcggtgctcagacctaccacttgaaggccagctccgaagtagagcgtcagcgctgggtgacagccttagaactggccaaggccaaggctgtgaagatgctggccgaatcaggtatggaacaaaggaacactgacctgggaaacacaattttttacaaccctgactgcagtgtacattttgattatgttccatgtcttagatatcccaagcttcttgttgtatgttatttcccttgagtagtgattgtgaactgagttcagtcctgcatatacacatatgacatttgataatgtctggagatatttttagttaaaaataaaaagctggggtgttactggcatatagagacgagaagccaaagatagtgctcagtgccctgtgaggtacagaatagcatctccacccttcagctggctgaagttgaaaaaccttggtcctaaagatatgacataccacttatgcttaaaaaaattttgttgtaaattttttgcttcatggtcttactagtagccttggatggcctgtaaccctatcctcctgcctctgcctcctgagtgctaggactaaagacattctctactgtgcctagtgcttgacccgtgcttttatttttaatatcagttaactt

SEQ ID NO: 25910 - DNA, 1451 bp, Mus musculus
taactcaaaggaagagggctgatcggagaagacggcagaggatgtgcgggaaggctggcagttgggactcttaccgagtgctttcctcaaatttgtctgtcttaaccaatcactttttccaaatcaatcaccagaagcagacacccgtggtggtgattggctggttgccttagctgattgacgctgaaatcgacgtagtagatgcccatgtttgtaagggagtggtttagtggctggaagttagtgttcctctacatctcaaaggcaagtaagtgtgcttccctctcggcctcattgagatgatgtcattgaccctcacctgtgtcctgctcagccaagatctgcataagattgggattcaggagcattttggtgctgttcagagcaagaactgattttaaagttcctttaaaaagaaacacataagatttacccagcagaggcatcacgcctaggtctcagtgtatgaagtgtactcacacgtgggattgctgtaacaggtcgtcgcgtgtagataactaaggctttggagcatctgcaggagagagtgttctctagggcttgaatattgaattatgttcttggagattttatcttcacttgcatacaattcccctctgcggttttgtctactttgacagcaaccaggggcctccttggtcgttgataagagggtcacacgctcctcataaaggggttttatggactccctcaggtggagaacctctgcaaacacaggcagggtgggagaagactgctagccacttgtaccttcccagtccctcctcatccgtctttcgttgcctttctggcttctgtttcctggcacagtaccattttgagtttgtgccacagtctggagcaaaacattgcctgacccattctgtatacttcagaatcttagagaagttcctctgcaacaaatgttttcatcttgaaagtcccagtagaatggagccacttctgaaataatgtgttaaatcatctgtatattatatatatatatatatatatgtagagaaaatctaattttttccccctttcccatgaagaatcttggtttttttatatcacctgtctccctgggactctctcaagtgcgcgttaatatgggttggtgcctctgctttccatgtttgagggacattgcaaccccaagcagggtcatgtgtggcagttgctgagcagggacaaggaggaaggtttttgtgcctaccctgcggctgcctcagctcggctttgccgatcacacgtggctcttggaaaggaagtcctggtctttttcctgcctcagtttccttccctaggaggcgtacgggtagaaagtcaagagggtgatttctagcttccttatgtcccagctcaggctaaatcccaaaaacgtttccttccaaggatgagagctaagagcgctcgtgctctgtgggagctgctcctgctggcactggcac

SEQ ID NO: 25911 - DNA, 1156 bp, Mus musculus
tagaaaactttgattaaaaactagtctggtaacaacgaaaagtttgtaatctgcccttaaagaagtatttcaaaataaacacagatttttctaaacgccgaaaacaaacgggtgctttcaaaaggagacttcaaagtaccgtttagatgcgtcagaaacaaaattagataacctagacaggctacagcaataactacctgaaaaaaattaactagcacaccacgtggttccactggggctcgaacccaggaccttctgcgtgtaaagcagacgtgataaccgctacactatggaaccgggcggaggagtcgcatgccatatcaactaactacatgtagaactgtggtgacgctgggacttggaatcaagatgtttttgtaccttgcgcagagaacttccaacaggacctggggtttctagtggcgccgctccgctcgctcccggctgctcgcttccggctgcacactccacggttaatggaggaagagagagctcgtccccccgagtcgacgctcctgctctgatgtagacagtacggagacagaaacacacctggctctgtggcgcaatggatagcgcattggacttctagacaaatggaggcattcaaaggttgtgggttcgagtcccaccagagtcgcttttattttaataagagagttataacgcaagaacaaaagaccggagttaggaagaaggaaaagtgtaccgaagtccatgagtattaaaacatcctgcctgacatgcccattaaaataaaaaaggaaagttatcgccgtcgtttcaagtgtccgtcaccatagaagaatcagtaatcttggtactaccaccagcgagctttctcagtcactttccagcgtcaatcacattgctattgtatgcggaaatgaagtaatgagcgaggtataatcagggttacgaacctccctcccctgtgactttgtttttcattgttttgttttatatgagtaaaaaatattattttacggttctttgaaaacttttaaatcttgcagtattgctccagttgctggtaaataaaatctagctctttcaggtaccagaatggccgagtggttaaggcgttggacttaagatccaatggatttatatccgcgtgggttcgaaccccacttctggtaaatgtgtttttcct

SEQ ID NO: 25912 - DNA, 1227 bp, Mus musculus
atttggagttttctaaatacataaacatagaatatgtagatatgttgagttctaattttttgtgaatgttttaaattcttttttcttgcctaattactttggctagtttcacttactaagggaactagaaggaagagtcatcctcctgtgtcactcctgattttaatgagatgctttcgacgtatttttcaatttttattattttatttatttatattcccatcattgtcccccaccttagtccccctctcacagttcctcatcctatttctcttccccttgcctcagagagggtagccctcccctaccacacctccccttccctgaggcctcaagtttctcaagaattaagtgaatcttctcgcactaaggcctgaccagcagacctttgctgtatttgtgccagaccttggactggccagtgtatgctcctggctgttggctcagtctctgggagctccctggggtctgggtaagttgagactgctggccttcttgtgggattgatctccacttcatcttcttcaatccttcccctaatcaaacataggggtcttcaacttcagttcaacagttggatgtaagtatctgcttctggctcagtcagctgctggtagggactgtcaggggccagccatgtcaggctcccttctgtaaacacgtcatagcatcagtaatagtgtcaggctttggtgctctcccattagatgggtcccatgctgggcttgtcattgcttttccttcagtctcttctccatttttgtccttgtagttcttttagacaggatcacttctgggtcagaaattttgactgtgggttagtaatgctgaccctgtgcttggggccctgtctatctactggaggtggaccattcaagttccctctcctcaatgttgagcattttggctaaggtcacccccaatgggtccttagagtctctcacctcccaggtctcgatacttttgagagggtccctcctcatgctgcttatctccattcattcttttggtcctcttggcttctttcctgtccccgctcaatacctgatcctattccccctttctcttccccctcccctctcccaccaggtccctccctccctttgcctcctgtgattattttgttccctcttctaagtggaattgaaacaacctcacttggacctttctacttgttacacttcttacagcctgggttatatcctagtatcctgtactttttggcta

SEQ ID NO: 25913 - DNA, 1218 bp, Mus musculus
gtgtgggtcaagcagtagctggtaccttactccttctcttgtgccaacccccaaatatacagaattcatttcaatgagattaggccctggacacaagcgactttgacccagagtgcttccccagagaagccctggtgtgctctactgggccaagcagggagcccccatgccctttcttttacagtctcagcaccagcagccatgttcttccttcatgagactcccggggtgaacaaatgggattggagacacagctatgagatgcttatcccttgaaaagctatgtggtatatctgtggttgtctgtgcctttgtgcttccattcccctgtcctttttgtaagatttagacttctgtgtgattttatacttcagtcaaaagtacttgtcctggcatcgcattgctgtgtgcatgagaggattgggagaaggctgctgtggcccaagaaataaccactgccccacccccccttgcttgttcgttggtcacttatatctcagtgggggtttctgggagagggctggtgaatgtccagatgtcaggtgttctgttagtaactgctgtgatttgaagttgttggtgttgttctgtgggaggacatcgccccctggtgctcatgaggtgtacgtgcagaacaataaactgcaaatgaacaagcacaaattgtcgttactcctaagggcctgcttttgtagaagtgctttggcagctggctcagaagcatgaggattacttcctttatctgcgggcaacctcagtccaactagttcgataaagggaaactcttctttctttattttctaaaacttcccacatctcttctactcccacatttcacctgacttaactctgggtttcccctcaaagaaacgggccataaagcaacagaaatgaatatgtgaacttggggggaaagggtcatctttaaaaacatggaaactggcttcttgcatgttgggggatgcatgtgtgtgcggggatgtatgtgtgtgcggggatgtatgtgtgtggaggtgcatatgtgcgaggcgatgcatgcttgtataaagggacacgtgtggggggtgcagtatgtgtgtgtgtgtgtgtgtgtgtgtgtgtgtgtgaaggtctgctgaagctaaaggttgacattagttatctcctctgcagtcttctaccttatcctttgaagcagggttctctcagtgaacctggaaattaccattttggctagga

SEQ ID NO: 25914 - DNA, 1165 bp, Mus musculus
aaccaccccctttctcaggatccccaatgcctcacagggttggtggagttccttatgttctctcatcagcctacttgggatgattgtcaacagctgttgcagatgctcttaacaaccgaagagcgagagagaattctgttagaggctaggaaaatagcccggaagccaacgggtggtctacacagctacaaaatgagatcaacatgggattccctttgactcaccccagttgggactgcaacatggctaaaggtagggagggcttaaaaatctcgccaggctctgatttccaaggtgcctcaagatggcccactaatttggctaaggtaagaggtaatgcaggggccgatcgaacctcccttggtgttccttgaaagacttatggaagccttcaggcggttcactccctttgatcttacctcagaagcccagaaggcctcagtggcctggccttcataaggcagtcagctccagatatcagaaagaaacttcagagattggaaggtgtattacaagagggagacagttactcgatctagtgaaagaggcagagaaagtgtgtgtgagagagagagaggcaggaggcaaaagaaagagaaaacaggagggatcatagacaagagagaaatttgactagaatcttggccgcagtgataggagaaaaagaaaaagacaagatctagacaggaaatctagacaacagaagacagagcctcagctaaaaaggctcagctatgtcagactaaagttatctatttgggatacacccttcgagacgggaagcagtgcctaaagaaagccaggaaaaagactgtaactcagatccccaccccaactacaccaaggcaagtaagagaattcttgggtactgctggcttctacagactctagacacctgggttggcgaccttagctgccctgttgtaccccctaaccaaggaaggggaggtgttttgtggatgtaaaagggagagcaggggtcaccagaggagtccttactcagactttgagaccttgaaaaaggctagtggcttacctatccaagaagttacaccctgttgccagcgggtggttttcttgcctgaaagctattgctgccataacactgcttgtcaaggatgctaataagctcactctgggacagcaaatagctgtagtggcaccc

SEQ ID NO: 25915 - DNA, 1126 bp, Mus musculus
ccatcaattgaactatttatgtaaggtaacatggaaaagaaaattaagtgctaatgtggtctcggagatcctagtgtcaggaaatgctacgatgtgagaaagttcagagcatagaaactggagttgttggccaaaagattcatggaaaaaaagaagcctaccatgcttctggaaacttgaaccaatttcaaacatactcatttggttctacgcttatctcccttctctgctgaccagagctcagccaggacactggatcacagagttttcagccctaagatgcccctgatcatagatgcccttcttccactttggctttcttacttaagacttggatctgaaattaaccttcaaggaatggttttggaaatcattgagcaggcaaggaactggtctctgccatagaatttgtgcacctgagagttcctggtcttgagttatggagagcaagcactggtttctacttcataggattcacaatggagagggctaggaagatactggacaattttcagcagtgtgacactcaagtcctggtcccttggagagaaaggacgcggtgttcaagaagtaatctcatcaaaatcagagtcaatgagaccttacatacagaagacatgaggtcttagattattggagggaaagtggaacgagtagttgagatgctgagggaaggttgctaagagatctggcattgcttcaattcttcccttatcagaacgaaatatgtcctgtgttagagctagcatgatcgcaagccacaactccccttattttccagacacctcctagtcctattgtgagatattttgtgtcccctgcccaatgtattgttcccaaatcaaatacagatgaatcaccattaaacatagtgaattttgagatacaaattaaaaaaattatttgtatggaattccctttgtttttggtccaaatattcattctcaatattataaagtaataaatgttgttttcacagctgttttctttagttatttattttttgtttgtttgtttgtttataacttataagttactcttaccagccaaaagatcctcattatttttaagttctgttgggagtagagggggttccgaccctgcaagtattatgactgacaacgaa

SEQ ID NO: 25916 - DNA, 1198 bp, Mus musculus
cctctgtatagtataagctacttttattttagtactacatattagactacttgtgactaaatagatctgccaaaaagtcttgagaaaaatgtcaaattaaccacagttctgggcttgttttctcataaaaggccactgtctaaaagacctgctgtggtaatatcccaggcctctgatcaaagttataaatttaagttctctaagaattgaaaacttttgaaaagccttgccagttatgagactcagtgtccaaagagatggacataaaagccagctgtattctaaaggattgatttcaccttgagagtggacagtgggcatagggaaattcaggcagtgctgtgggatcaggactccccatatgaagggtttccattctaagcattttcttaacaacttggatcactgactatgaaagtcaaggaaattgtatttgtgattgaagaaggaaattgagatgatatggaacatatgttttgctatatccttggccaggtaaaacatcaaggcctgaataaaaatatcagccttgactcagtggatggtgtaccagtggcaagcactgatcgctggagtgagatgactgaggcagagcgactccaagagaacctccaggcttaccgtaccttccaagggatgttaaccaagcttttagaagaccagagagtgcatttcaccccgactgaaggtgacttccatcaggcaatacatactcttacgctccaagtttctgccttcgcctaccagctagaggagttaatggcgcttctggaacagaaggtccctgaaaaagaggctgatgggatgcctgtcacaattggagatggtggcctctttgagaagaagctgtggggcttgaaggtccttcaagagctttcacagtggactgtgaggtctatccatgacctccgtgtcatttcttctcatcacatgggaatctcagcacatgagagccattatggggccaagcaaatgtagctcttaactcttgcctctgtctccctctttgatctaatgggatatcagtagttccccaggggcctagttttctcagcatcaattttggaaaaccttagaccacaggcatatttcgtcaagtagggttgacccacgtatgaacagaagataaacatggttattctggctgtgcatatgtgtgtacatgattttgtttgtattggtggtataataaagtata

SEQ ID NO: 25917 - DNA, 1198 bp, Mus musculus; identical to SEQ ID NO: 25916

SEQ ID NO: 25918 - DNA, 2367 bp, Mus musculus
ttgttgtttcttaaacataaaaaaaaaaattaatttttttagttagatttcctaatccttcctaagtattgtatggatatgtaagtttttcagttctcacctggcccttaagatcctctgattgatgatttacttttggatttcctttagatgtgagatctgtggatttacttgtcgacaaaaagcatctcttaattggcacatgaagaaacatgatgcagactccttctaccagttttcttgcaatatctgtggcaaaaaatttgagaagaaggacagtgtagtggcacacaaagcaaaaagccaccctgaggtgctgattgcagaagctctggcagccaatgcgggcgccctcatcaccagcacagatatcttgggcactaacccagagcccctgacacagcctgcagatggtcaggggcttcctcttcttcctgagcccttgggaaactcaacagctggagagtgcctactgctagaagctgaagggatgtcaaagtcatactgcagtgggacagaacgggtgagccttatggctgacgggaagatctttgtgggaagtggcagcagtgggggcactgaagggctggtcatgaactcggatatactcggtgctaccacagaggttctgattgaagatacagactctactggaccctagtgcaaaggaagactttgggcactgggacagtgcagactttgtatttaaaagataaaaaggacaaaaaaaatttaaagcatttaaaaatctagtaaaataactgaagggcctgctctttgcattgtggatcacaacacacacacacaccatccccattccctgaactccccttcctcatccttaaaatattgatgtagcctttaccagaaaggttgatgaaaaagcagcaacatgctaggttccagccagcagcagacttcctgctcattggcaaatctcctttttctcagcctataactctgatgtgctctggatcagctttgaactcataatagtatattactatcatctaaatcttttctcctctactactgccctatggctctggcttcttcccactgcaacaaccaacacttaccctcaaatattatataattctattttccggaggctggcagcttgacttggcactttagggctccttggcaggatgctgttaaaacagcacacatctctcacccctcttccattactcactgggtttggggaaggaaggatacatggggaccacctccctccctttcaatggatcccagcacctcagttccccccactcctgaacctccataatgctcttaatggtgctcacttgcttggaagcaggctcccaagagaggggactgacctctgtttctggctgaaagatagggctctgtgtcagtgagaaaagtcccaggctaatggcagaaatttgcactttgaacatgtgtgttttgtgttgtggaacctgagattccttatttattaatggaaagtctgattttttgggggggagggtctttgttgctatgttttgtggggctgggagagtagattattctgacatgggatccttcctacaagaggtactttgaaggcaaggcttagagttgaagaagcacagccagcctctaaaatcatagttctccagtggcctttaaagtaagctggtccccagcactaacagaatcactacaatagcctagtgcttttttggaagccttagggaagtttgataggtttgtggtaactagtgtgctctttgagatttttaagagcatttgagatacaagaattttgaggggatgaggaatgttggtcaaggtctaaatcacacataaaaaattttcttctgtgaatttatcttctttgcatatatatccctgctggccccttgttttgattttgttattggtcattccagctctcagtggaagaccggaccctgtcattcatgaaggaacacaatctaaaagttctagagatttggttaagagtaaactcttctgtcttatctcctctttagaagagacaaagcttcaatagacaaaaacaaaagtaaaaatctatacgataatgttttttggctttccccagaattatctgttttcctctgagtagagattttaatgccctgtggcattaaaattactgtcactgggagacacggatcatatttttacatgcttctacctctcaaaagactaaaaccctaattcagctcattttttgaaaattaggagtgcagttcttccctgtgtacttcagaatcagccattgaagactgggccagttgttgtcagcaacacatgatgactattgggaaaaataagagtttgagaacaaaataaggaacagcttgtttttcacaaacactaaaactgtgg

SEQ ID NO: 25919 - DNA, 2367 bp, Mus musculus; identical to SEQ ID NO: 25918

SEQ ID NO: 25920 - DNA, 1375 bp, Mus musculus
ttaaaagttttttttttcctttacattctgataattgtaaagagttttgcttctagtgagctataatcaagaagtcaagagtttgaatcttttagtgtatattgttttctaagtgaaaagtattttattagctaatgcctctcaagagaagtttacttaaaaccttagctgtcattaagctgaccctaagcagagctgctttatccttactgtaaacatttatatggttcctgttaatccttttgaagtcattcctttgtttccagtcaggtaacttctaagttctttgccttctgtgacttcctacccccttttattttctgtattctttggcaagaaaaaacattattcttatcctctgggccagtggttgcttactgctatggggcggggcctttggacatacagttttttgtttttgtttttttccccgaagccaagtaattggaatgagtccactttaaattctttaacgacaatccattggagggcaagtctggtgccagcacctgcggtaattccagctccagtagcgtatattaaagttgctgcagttaaaaagctcctagttagatcttgggagcgggcaagtggtccacctcgaggcgagtcaccgcctgtccccaccccttgcctctcggcaccccctcgatgctcttagctgagtgtcccgaggagcccaaagcgtttactttgaaagaattagagtgttcaaaacaggcccgagccgcttagatactgcagttaagaataatggaataggaccatggttctattttgttggttttcagaactgaggccatgattaagagaaaggccaaggtggtggttgcagtggcagaagcggctgtggggggcagggggaggaggctgtgtgcagaggtactgcttggcattgcagtggtgcactatcaatggcagcgggtgcatcaggggtgcactgcctatgctttagagatgtggggctcagcagcgggttaaaatccagagtccttttcagagtggctccacaggccatggtggcaagtggccaaagttcggcttaggcggggccgagaaggacaaggacaaatgggccccccaaggtaccctgtaggtgtggggccagagacctcagagccgtgacaaggcaggtgggcgggtctgaggtggcactcaactcaaaagcacagtttcatcaacctattaaaactactgtggtgctaataatgaattgtaagatatattcgtgtattttggaaaacctataacaaaaattgtgtcttaggaacctgacaaaatgtctgttccttgttccaaacagcaattaatttggttattacagaatacgaataattgatctattacatataatcattttaaataaaattgacac

SEQ ID NO: 25921 - DNA, 1173 bp, Mus musculus
ttttttttttggtgtttaagttctagattgtttttgtggattggccacaacagaaacgtgggtattttctttctttcatttgttcttcttcttcaaaagttttttttttcttccagatcagtttcttctgtctcttttcctcccagttcctcctccccacctctgcctttcccatccactccttctctgtttctcttcagaaaaggaaagacctcccgtgaatattaaccaaatatcacaattcaagttttgtaagacgagacacttccacaacttagaaattactcagccaaaaaatagataaagaaaatgtgctacatttacaccatggagtattattcacctgttaaaaacatacatcatgaaatttccagacatgtatattttcaattgaagatataaaatctagttttcttgttctacttctcaaagctactaggactgttgtgtaatctgttttgagtctttaaggtgatcctctagctggttaaaatcaagggtcaaatttaaaaattccacaactctgacttattataaaatcatagaacttactggggtctggacattaaagcttttgcacttaccagtgcagaggtagaaatgaaagcatctatccttggctgcttagaactagactcagagttaatgtagtcatggaatcacagtggctcacatgggatatcgtcctcttcccagctccttggagacaatatccccacggtgcttttctcaagagaaacaattatttttacattgttgtctgggaggcaacaaggaatagagaggtaactatcttttctttgcactttcttcggcactgttcctactctgtgacctttttcttgtgacttagtttgctattactgttccaaggaagtggactatttgctgtgtgtgtgtgtgtgtgtgtgtgtgtgtgtgtgtgtgtgtgtgtgatattcctgggaagtggaggaacataaagagttaaacttctatattttcttcttatgctgattagagtatttggtaaatttgtagaatattgagatggactcccctgccaccaaacgaaaaagattccatctgtagaagaacacagatattgaccactatacttttcattggctgccagagtagaaaacagtctataaaaccaatgatttattacacaggacttctaaatggaaagca

SEQ ID NO: 25922 - DNA, 2332 bp, Mus musculus
ctctctttgatgcctcaggacaggaatccttagcctaagctaaggatgatgtcctcctgccatgtctaggaatgttggtgctgccctctatctgcagatgtacttggtgctctggggagcactttggttgtacatctgctcagccacacccaccagtcctgctgctcagttcctctatgtgacattcttgatatgtttcttccctagtccaaagaatcctcatcggtgcttagctgtgacatctctgtggatgacaagtacattgtcactggctctggggacaagaaagctacggtttatgaagttatttattaaggacaaatcttcgtgcaaactggactcctcctcatagcactttgcgctgttgtacttttctgttcacccctctcccattctaaaaccaaggatttccaatactcattgcagttgtggagtttaatcccttcccatagccccacttcctccttgctattgaattgtgaatactcattaagaacctgtgataccaaatcttcagctatcgtcttggaagaacatggaatacctaacagtgaatggaatctttaattatgtattatatctgtaatatatttattttgtttaaagaaggctttctaacaatgactgactaaataaagctgtccgctcctgcattgataatgaaggtgcattgtatttgatgctccacccctcccttttggtgagggaggggaaaggaaggtttaaaataactgatttaaatgtcactaaatgtagactattgactgtatagagatgtgaaatgtataattacacacggaagcaatatgttgctgtgttgttatgaggttgttttgttttattttctacttatattaaaaacatttggaaatttggctgtttgaacaagtagaatataacaggccaagtactattcctttgagtctatttgggcaactttaaccaatatgtctataactttagattacattcaacaaaaataattagatgtttttcttttttattttttacttgttgacaagtatctttgtaatattttttaattcctttttttattgtattatagacagatcaaaaattaaattgggcctcaaagagagaacttaatttcttctaaatatttttgccaaatttcctggcagaggaagctgtgtgtctctgggcagttgtgatgctgtgagacatggcaggctgttttgtgtcatgctctttaggagctgtaggtacaggaggactgcttgcctaccgctgtgcaaagcaagtctttcccacacaaaggccagcagaggagggtttgcagagcccaccctctgaaagccacaaagaagagcctctcccgggatggtggcttgctttatttacctctggttctttccatgtcttagttggatgtccctgaaatggacacaggctgtgccattgtgccagaaacattgtgttatcttttatgttgttgttgttgttgctgttaaaactataacatgtgactccttttttattattattttttgtttgaatgctttaaaaagatcttttaagtctgtggatctgctgatgtacagtgcctttgctgctatggatcaaaatcaagaactgtgtagataaactttattgtataagtagaaaaatcacttaatttcatactagaaatggatggatgctgcaagctgaaatggactgtcattgacgttctttgtgtggtagcaaaaaaaatggtgtcttaagtgcttagtgtttgatgtcattaacagtttcataaaactctacagtgtagaaagattttgatactaaactgtgcattgtacatagttctaacgcattgtgttggccaccagtacttctatgatggtagattgtttgtgcattcagacttttaagcattaaacataaataacttctagaatgattattttctaattatttttgctaattgctttgtctatgccactccctatattaaaatcactagttatattcaagtcagattgttaagtactatgggttttgaactgtttctttttttttttttttttttttaatttttcttttgagataacccagaaagcatgaaagaagttatggaaggcaggtggttgccaagtatttactgagcctctcattttgttgacagtctttcatctagaagcagtccaaaactctcaaacttgaaccatttagatttttactgtcattctggtaaactagccacttaaagctacttaaacttaactcttggaactaattaatattagaaacctttttttgccagtaatacagactaaatttcaagtgctcaatagctccacaggagctaacagctattgtactggac

SEQ ID NO: 25923 - DNA, 1219 bp, Mus musculus
acagtgatggtgagaagagtgatgacaacttggtagttgatgtgtccaatgaggtatgttagtagctagccctacttctgctgctctgcagctatggcagaggcaagtgtccaaagcacttaggagaaactattaccaactttatacattgctgggtctttcaaaatgctgctccttcctttcagatgtcactgtccttcccaccactagaaataacaggtgtcagtggtcaccctactgattttatgttccttacaggctcatggagtttttgatatttgcttttgttttgggatgtcctctcaataccagatgtttccttcagtaatttcagttaatgttaattgattaaagtccagttaattccagacattttgtactactaagtgcttttagttagaagtgcccccagtaaaggacttgtgctatgagtcagttgtcagtcttcttattattatttttaatttactctgtgtatttcgtcttcgaaaaggcggcgcagttgacagtcttacttgtttgtcattgtaggatccatcttccccccgaggaagcccagcacattccccaagggagaatggcctggacaagacacgactcctcaagaaagatgcccccatcagccccgcttctgttgcatcttccagcagtactccttcctccaaatccaaagagcttagccttgtaagctgctccctaaccagaactgccacttccaagatagttattgggtttggggttttcagtttttgtgtatttcccatttatctctggggcttagatttccagtttaattaaaaatatgtttgaaccagaaaggtttactaacttgatggtatttgcttcctgagtttgtatgcttaagagagacataggtggatgaaaatgagagaaaaacatcatagtaaagttgaaaagtacagataagagttagtgtgatgttctcattgcctgtggtttgtggtgaactcgctcaggagtttagctgtcattttattaggtgcttcatttgaattgccacgctagacacagctgcaatagttttgcttctgcctaagtactctctcactaatacgaggctgcttggactcaacacgaatgcctgactgaatttgccagcaagctgcatctttccctacgccgtctcctgtatagggctgtatagggctgtatagggcgttggttgcatttgtgtgtcgtaaatccccttttctcttca

SEQ ID NO: 25924 - DNA, 1146 bp, Mus musculus
cactgtactacttactgattgatttgcagctcctttttcttcaggctgagttaacgtaggattctcttgaggcattaagaatcagtttggtgttgtacatgtgcagggaaggggccttttgcagcgtttagggtgcttgggggcagcagactttgatccaacagggaagactaaaggctatgccccatccttgtctgaatcatgactccttccttcagagtattatcccaggcaacctcagtagcatccaacttcacttttctgttataaatctatgtgtgtgtgtgggggggggggggaacatgtgggtttagagagggagttttgtgcatttttgaggggtcagcattttgttggttcattttggcgtgtgctccctttagttatcattgttgtcctatgaagctgtgtccacaggtacagaatgagggagaccatctatcagatacagaataaccagaatgtaaaataatattgataaaaccaatagggatatagcctgttccatgattcttaatagaagtgccaaagatgccagaacttttgaaaacaaaatgttggacggagggtggtatttgcctttggcagataggagagctaggactgcaggttaatgtaattgaattttccagtgtggtcaaactctcagaggcttcttaattgtgaggtttttgtcttcccacatgagccaggactattctagcaaagatctgttgtctagaaacttgcctcatccgtaagtggaaagcctttttcatgggtaatctgggtgaggcttggaatcatcaggtcacccttggggcagcctcttctcaccggtcactagacccttgtcttttgaaaagtaggtccaccaaagcacccagtaaaagacatctttgtgttttgtacttgccctgctttctacctacctggagtgctaatttacgtgcttagctaacattcggaattttattaagtaagaggggctcatatttctatagttatcgaagtaggtacccattttgtttctttgagagtttgttttatgtaaaaatcataactttgctagctcagaaaatactaagaggaaggactggattaagtggaaatattatataaccttacagttttagcggcggcggggggcggggggggggtgtgtgt

SEQ ID NO: 25925 - DNA, 1623 bp, Mus musculus
tagctaaaggacggaaaaagtggtagacatgtcttaagacttgttttccttcagtagtcagtaatctaaagaaaaactacccagtcagaaaataccatttggctttctggtttccttttagccacacccactctgtctacaaagctgtttcttcaaatctagaaaaaaaatgtgggtgagttcccctgagtccccaattaacttctttcatgtctttgaagacaccaccatcttgtatattgagatcctacttataggtgtcacttgtaaaagcaactttcctattgcataccctaggaaagagttagtgctgggaaggccctgccaagctctttgcaatttagtcttatattttgtgttaaaaattagaaactgttactagaaacaaaaaattagccctttctttcactgaagtatcttcaagcagattatagctaacatgcatttggcccttggggagaaggcacacacatttttttttaaaagatttgttttattcttgtatttatgtattgaagactggatatgcacatgacttttagggttgtcaaccatctgatgtggctgctgggaatggaactctgatcagttctcttaactgagccctccccatgccattgaacacttttaggataaccataatgtcttccattgtttaaaaaataatatgtttattattagataagcaattttgataatcataaatagagttctatttgtggttttgtgtctacacaattacataatcagtaaatgaacttgtaattattcacaaaattcattttcttgaaatataatctaaataggattcattattcttcttgtgataactcttaaacctttcttcatctaaaagatttcccttctaatttttttctaatgacactgtacaatttttttaattgttgattttcatgtgaatgtgtatgtgactgaatttatttgtgtcctacatttgtacacctggctcccacaacagccagaagatggcattgggtcctctggattggacttagaggctgttgtgaaccacatgtgatatgggtgctaggaaccaaacccaggccctctgcaagagtagcaatcagtcttaacatttgagctatctctccatccccacaaagaaagcccaggctggccttgaattcatgattctcctgtccctactcttcagcatgtcctaccaatgttcaccatcacaactagctacatttatgttgtgtgtgtgtgcacatatgtgttccatggcatgtgtgtggacgccagaggtcagatttcagatggttgttttctcctattatgtaggtctcaggacttgaactcaggaggtcattaggcttggtgacaggtacctttaccagctgatcagttctgctggacctggttaacttaaaatacccttctcaaacagcctttgatttccccccctccccccatctcattgcctcacagattagattctctcaatatcctaaaaatttagtgagagagaactttgtagtattatggagaaacagatgtatttaatgtattcttaaaatcctattaaaatgaaattctagtttacattaaacatattaaaatatactttaggttaaccaatacttcatttggaatgtagat

SEQ ID NO: 25926 - DNA, 1175 bp, Mus musculus
tttctttctttctttctttctttctttcaagacagggtttctctgtgtagccttggctgtcctggaactcactctgtagaccaggcttgcctcgaactcagaaatcctcctgcctctgcctcccaagtgctgggattaaaggtgtttggacagtagctgtcttctaactacgaaagtaatttgtagctgtaggatacaatcgtataaatattgtcagtatatccattttcaagaatcatgaattggagacattgacatcataaagtaaaacaaactccacatacgtctttcttacaatgtgattacctctttttcactccagctagactacttttcccactcttgtctcgcctttgtatgacttgattggaagaatatttttcagagatgagaacgtgggaatacagtttgctctgtgtgctatctttaacaagatattcctttttattttagttaaaacagagtataactgacatagatgaataacctgcattacattaatatttttttttttaattttagacaaaattttttattagatattttctttatttacatttcatatactatcccaaaagtcccctataccttccccccgccctgctctctaacccacccactccttcctggccctggcattcccctgtactggggcatataatctttgcaagaccaagggcctctcctcccaatgatggccaactaggccatcctctgctacatatgcagctagagacacgagctctgggggtactggttagttcatattgttgttccacctatagggttgcagaccccttcagctccttgggtgctttctctagctcctccattggggccctgtgttccacccaatagctgactgtgagcatccacttctgtatttgccaggcactggcatagccgcacaagagacagttgtatcagggtcctgtcaggaaaatcttgctggaatatgcaatagtgtctgcgtttggtggctggttatgggatggatcctcaggttgggcagtcttccttcttcttgaatttcatgcgtttagcaagttgtatcttatatcttgggtatcctgagtttctgggctaatatccacttatcagtgagtacatattgtgcgagttcctttgtgattgggttacctcactcaggatgatgccctccaggtccatccatt

SEQ ID NO: 25927 - DNA, 1201 bp, Mus musculus
tcatctctcattggctatgctaatcttaaatttcatgttattttcaatgtctcatagtagtattcagtaagaaaattctatttataatttgtggttaatccccagattagtaggcaagatctaggaagacttctaaatgactatagactagtggttcccaacttgtggactgtatatcagaagcattatgattcaaaacagtagcaaaaaaagttatgaagtagcaatgaaatatgttatggttggggtcaccacgacacgagtagctgtattaaagggttgcagcattaggaaggttgagaagcactgctctaggccttcactcccatagttcccaagagatggtatagctatggccatttagctcctctaagccaggaaagaaggtaagaaatgttttctttcttggaactgtgttggagaagcttgctgccttggagaaacatcaactaaacagtttggggattacagctgttactgtggagtagggttacccatggtctgtggactggggcagctatgtgaacttttgataaaattgggcaatgagataaggagcttgtactagaatataagtcaacacccagcttcttttgtggatagtgtctttatctttgaaacaaaacaagagagatccacccacctgaataaactaattgatttacctcctgaccaaaattgctttgctgtcctgctgattggtgataatctggggggtggacagctttttagaatttgtagtcaatcaaaaaattgtcagttatctataaggtgaatatgagtggatatatgagtatatagactgactgaaataaagtgattttttaaattgtcatcttaaatacttaaaagcaagttagtcaaagatttgatcaaatttggcatggatatgcatagcatgaccaagacatttgacatgttcacaagttggcagctttggtgggcattgcaggttgtccttctgggaatgtaaaacttgtttaaattcttctaaatccttctaaattcttcttttagaggattcccctttcccttactttttaccatgaactcaatgaaaagaatgtttctatataaatctcacataacttttattctgcagtcctaaaatttaggacgtcatcatcaaagaagctttaaaatcaatcccaattgtctctcctgcacccggaagctgctgtgcataagttatactgcaccc

SEQ ID NO: 25928 - DNA, 1149 bp, Mus musculus
tgtcagcggtgaaatgatgggcagtaacacagaaccgcgattaatgttcagccatctccgattggttgatgcggcgccctcgcgccgcgggagggcggggctcctggagagcgccgcggagagcgcgcggggctagccggagactgtagtcaatctggaggcatccttggccacagtagccgcgcgaggactacatctcccgggatgctccttgggccctccgcggatggtcgtgaatatgtatcagaatgttaatgattagctgctgctaaatttggtcaaagaagtcacctacacagagcgcgttgttagagctgttccgagcgggcgttcggctgttggctgccttcttccccctcttacacactcgtgtattattttgaggtggtgttcgcagagtttgaaagagaattttaaaaagccgcaagcgtttcgctcttttatttttataatccccttcaatttggggctaaaaaaacaggaaggaagaaaaggaaatgaaatgtggtaaaagaagctaaaaggtgccttttaaaagatcgttgctgtgaagtgaaaaaaaatctccagagaacccccaagcgccgcgagacctcttccgaaccaaaggagtttgcgctcgctctcagggaagaagcgaccattcattccgaggaatagcagccaattaaaagacaaataaaaaaagtttggagtggggcgcgagcaggcgggcggcgctcggcgggcgcggggctcggcgggcgcaggacggacggtgcccgccgccctcagtgacgcccgcggggaatgcggagccggccgcccgcgcccagccgccgcgcctgcctgccgcccgcgtcacgcgagacccgcaggcccgggacgccgccgcggggccctcgaagcggatgagccgcgcgcctctgcctggcgcagccaactaaagcggcgtggatgattcgcgacctgagcaagatgtacccgcagacgcgccacccggtgagtggcgccgcgcccgcagccctgtccgcggccggccgctccgagggtgcgggaggcgaccgacttgtagccattttcttattgttgtctctgaagccccgggaagcagcgcgccgccgctctccgcccgcgcggctctcccgaggggggcgagccgggcggcgc

SEQ ID NO: 25929 - DNA, 1155 bp, Mus musculus
tgacctttccgctcggccgttctcctgtataggaggcagtcatggcgcccagccggaatggcatgatactgaagccccacttccacaaggattggcagcagcgagtggacacttggttcaaccagctggcgcgcaagatccgcaggcgcaaggcccggcaggcgaaagtgcgtcgcatcgcccctcgccctgcgtccagccccatcaggcccatcgtgaggtgccctacagtgagataccacaccaaggtctgggctggcaggggcttcagcctggaggagctcagggtggctggcatccacaagaaaatggctcgcaccatcggcatctctgtggacccgaggaggcgaaacaagtccacggagtcactgcaggccaacgtgcagcgctgttgaggagtaccgctccaagctcatcctgttccccaggaagccttctgctccgaagaagggagatagttctgctgaagaacttaagctggccacccagctgacaggacccgtgatgcccatctggaatgtgtacaaaaaggaaaaggccagagttatcacagaagaagagaagaactttaaggcttttgccagtctctgaatggcccgtgccaatgcccgactctttggcatccgagcaaaaagggcgaaggaagctgcagagcaagatgttgaaaagaaaaaataattctgtgttagagagttgcaataaattttccatgaagcggaaaaaaaattcaggtgatagcagatgctggtgagggtatcgagaaagagggacactcctccattgctggtgggattgcaagctggtacaaacactctggaaatcagtctggcagttcctcagaaaattggacatagtactacaggaaggtccagctttacctctcctgggcctatacccagaagatgctctaatttgtaagaaggacacacgctctactatgttaatagcagtcttatttataatagccagaagctggaaagaacccagatgtccctcaaccgaagaatggatacagaaaatatggtacatttatacaatggagcactaatcagctattaaaaacaatgaatttatgaacttcttaggcaaatagatggatctggaggatatcatcctgagttaaataacctagtcacaaaagaacacacatatgca

SEQ ID NO: 25930 - DNA, 1942 bp, Mus musculus
caagggatttcctaatgactgaagcttcatgctgcctgctggggatgctttcgggtgcaaacttgagcacccgggctgggagctgccgctctccggaggggtagctagtgaagggtgtgttgtgctcaagcagacgccttttgcattgcacgtttttctatgttgttgaggttcaaacctggagccctacgtatgtgagggctttaacccagatttgctctcttccattttcttggtctcactggacgggcctctgttgttctaggtcagtgggaggcattcgtgcctctctgtataacgctgtcacaaccgaagacgttgagaagctggcggccttcatgaagaatttcttggagatgcatcagctgtgaacatgaccagccacgctctgcctgtgagcagcacgcagcgtcgtttagagtaacttgggattgactacagaaacttaacagacatggatttttttttcccaaatacatgcttattacagattcctttctcaaagaataacgactaaacatcagggcactgcagagctgaggaaactcccagctaacagccaccttcattctcatgtgacctggaagcattttgaaagctttctttcctgttgctcttctaaatgaattcagcctgtcagccatctttgctgcccccttctctaggtggactgccttgggctttgccctgctggttccaactggttattattaggaggttggaggccctgtgggctggattgacagcagtgagtttgctgggttctgcagcagttggttcaagtcaacagcgactcacgagcgttttggatctgtgtactgcaattcccataaagagataggtgtgttatgctgtgtttatgtagtgggtattgttttaaacaccgtacggtttatgcctatgcctttatatttctaatgaaacagttttgttcagcccatgactttgtgcatgactgtcgtccgttctagtcacctgtgctctccatctactgccttttaaagctgcgtcatgagaaggatctacacgttccaccatgactctcgtttcttgccacaagtagaagaaatggttgattctttgcttttcggttaggccgttaaacaaaactcagtcacacccctgccttccaccctcaaactgtgatcacgtggctgttcttgtagtttaaccagggcaacactatatattccaggtctatacattgctgaggtctttttctggttgttcatgtatcagtgttttcaatcgactgcatggaaaacattaaagtcctaagtcatctaagccattcattgcctgtgaattattctgcttgcttttttagtcaggtgctgcttttaaacattctgatggggagcctagggtttaaaattagcctgtgatagggtagtgtagtctagacaaaggtgtcaggcttcgttcttgtgcaactcagtgtggttgcttgccttttactttggaacaaacactgtcagcagagtcccttccagcacagctcccagggaagagttttgtgaactctgtcccagttagcccagaaaaaaaaggcagcagaacagctttgcgctcatcctgttgcattcgattgcacaaggggaagacactgattgcttggtttctccggtcaggttccaccagctcattggtgaagagttgaaataagacccaacattgcaggatgtttgcatttaaaacaagctcttactttgtatgccccagtacaggggaacaccagggccaaaaggtggagtgggtgggtaggggagtgggggtgggtgggtatgggggacttttggtatagcattggaaatgtaaatgagctaaatacctaataaaaaatggaaaaaaacaaaaaaacaaaaaaacaagctcttttcctctgtcaatgccaagagcccagtttgatcattctgggtcacaaacagcactagtgctcaga

SEQ ID NO: 25931 - DNA, 1204 bp, Mus musculus
tttccccacaagaagagatttttttttattgaatggggcgaggaatggaggaagaaaagaaagagcatccttatttcttattatatgtatattagtgtatgtatatacaggtgccacatatgatctttgagtcctcagaggtcagaagagggtgttagaacccctggaactagagttacagatgtttgtgaaccactgtgtgggtgcagggaccctctgtaagagcaagagccacctctccagttctgaggggcccatttggaagcagaacaaggattgcaagagcataagtgtgtctcggggcttgacagttctcggtgtgggagacctcggggcaaagaccaggccttgggtctcggaagtgctgacttgctgttttgggtagagatttctatagtatggcatgttcctaggcagaaatgggtcacttcattaaaatggttgtttaggggagagctagcccttggcatgcatggcttagggatgattacagctgcttctaagatagccaacgtttctttcttcttttttaaaagtttggtgtgattttcgctggtgctcagaagaatgttggctctgccggggtgacggtggtgattgtccgggatgacctgctggggttctcgctcagagagtgcccatcagtccttgactacaaagtgcaggctgggaacaactctttgtataacacacctccgtgcttcaggtaactgtgggactctagtcttctgtccaagcagaagttaaggagagcacgcttcattagctggtgacccaagcaccccagagacactcaacgatctttgtccagctctcctctaggcgctgtttggtcagtttttcttgttgcccttttttggtaaaggtgacaatcttggtctttgcttgattttgatgttgaccgttaacccacaagctttctctctatagacaaagttccatggactgtgtctcggacaaacagggtcgctttccagaaggaagagggtcaggctagggcaagtgtgcagggttcttttcttccccgctggagaaaatcattcccccgacacacatacacacacacacacacacacacacacacacacacacacacaagaaagggaagagtttggagttaaaatccaactgtcccttcccccaacccctacccactctttcctttgagtagagtgttctggggttaactctcccggtcattcct

SEQ ID NO: 25932 - DNA, 2367 bp, Mus musculus
tttatttttttttaaagatttatttatttattatatgtaagtacactgtagctgttttcagacaccccagaagagggcatcagatctcattacggttggttgtgagccactatgtggctgggatttgaactcaggacctttgtttggaagatgagtcagtgctcttaaccgctgagccatctctccagtccccttctttttcttttaaggtttattttggatgtgtgtgtatttgtatatgtgtgtgtactcacagaggccagaagctaactccggggctggagttatagacatttgtcagctgcttggatgtgggtgctgggaactgaacccaagttctctgcaagagcagactgtgtacttaaccactgagccacctccgcagcctctagaggaagagtgaaagtttgcatttagtggggcagccctcattctccatatttgacatgttagtttatgttatttatggtcactcgttttttatgcccagagctgttcccaacaactacaaggtgatctttgtacaaggaggtgggtctggccagttcagtgctgtccccttaaatctgattggcctgaaagctggaaggagtgctgactacgtggtgaccggagcttggtcagctaaggctgcggaagaagccaagaagtttggaacggtgaacattgtccaccctaaacttggaagttacacaagtaagttctgggaactgaagatgcacggtgaggtggtggctggccattgcccttactattctattgctgctcttcttccgtcagtaatgatctcagttagatgtgtggtgatggtgctctactgactactccttttgagtgatgagagccttgtttacctaaaagcccaggagcaggttggtggttttatggggagagcaagggctccagggatgctgcccctgtctaagtcactccttatctcctctagtagactgtagtctggaaattggtcccttttctaggaagatggctgcagttgctcttcagctcttcagcttcttatattcgaagttttaatgcccttgctagagcgtcccaatgataatatcacattccctgctgtgaggcagtcactgactctgcctgagtcacccttcacctctaggggtatagatttgattggccctgctggaactacgtgttcccagagtgggtaagcactgtggtcctaagaggaagcgattagacaccaacaggagtgcagggtagatggatgcttgatgacaggaaaacctaaacacccattccttttgttggttcgtttggtctttcgagacagagtctttcgagacagtctttctacctctgtcttacctggtagttttgatgtagcacaggctggccttgaactctgagtagtctttttttccttaacctttcaagtgccggattacatgtttgcaccaggacacttggcccctctgagcttcattggcatgttatttgtgcccagtaagagggtgatgggtcatccccagctgttagtggtaattgcaagagtgagtgagtgggtcggcccgtgctcttgtcaagtgctttggagttagtctttccctcaggaagctaaccagtctcctggctgacatcgtcttcgtatggaaaagggaggttttcaaatttgccctttgtgacagaaattccagacccaagcacctggaacctcaacccggacgcctcctatgtatacttctgtgcaaacgagactgtgcacggggtggagtttgacttcgtacctgacgtcaagggagcggtgctggtctgtgacatgtcctcaaacttcttatccaggccggtggatgtttccaaggtaaagaatgaaaggttggtttggggaaccagtgaacgtttctttgagctgttttgatatatgaacttggttctttaccttctgggccaccttactgggcccattttgactccttttaggcgttgcagctcagtgatgtgaagcctgttaccattgctctgcagccttcacctctgtccagctccaagaactttcagattttgtactgtaactttgtcccattaaaatttcacaccccagcctttgccaaccagtgtccggctttatgaatttgtactcaagggaccttccataaatgggatcatgatatttgtccaccagtgccttcagcatttatgttgtagcatatatatatatgtcccccatctccttttgtgcacatgtttgactacaccaaaccatgtcacttgttttgttttgttttcgagacagggtttctctgtatagcccaggctgttctggaactcactttgtagaccaggctggcctagaactcagaaatccgcctgcctctgcctcccgagtgctgggattaaaggcgt

SEQ ID NO: 25933 - DNA, 1154 bp, Mus musculus
gaaaccctgtctcgaaaaaccaaaaaaaaaaaaaaaaaaaaaaaaaaaaagagttgaacatattctcctctgtcaaatctttctctgattcatcactttgtctgccactcagcactttcaaacatggctgcttccttctataaaccagcttttagttttaattttactttactttttggtttgctaacttttagttttaactttactcccttccttgttttgggattaaaagtgtatactaagggatgaaccacaccacactggaaacaagttatttcagtaaataatacaaactccggggttcacagtgagatccaatatcctgcaacaacttggtctttaaaaacaagaaaagaagggctggagagatggctcagtggttaagagcactgactgctcttccaaggtcctgagttcaattcccagcaatcacatggtagctcacaaccatctgtgctgggatctgatgtcctcttctgatgtgtctgaagagagtgacagtttactcacatacataaaacaaataaatcttaaacaacaataaaaacaagaaaagaaaagaattttgaaaagaggaaaagaaaattgcataaatgaacagtttcattcccaggccttaaaccagataaatagattcaacaatacccactgttttatgtaatatagtggttttaaacaatcagagagagagagtgtgtgtgagttaatctactagaacagtgtttgctttctctgagctctaaacccaagtccagtcccagagagtgaatggggatgaggcaggatagaaggacagggaagaaaatcaagtttcccacactgcatgcggtttgcttaatgaggatcaagaaactgaatatagagctggagagccgagtcagtggttaagagaactggagaactgtctgctcttccaaagacccgaatttaattcccaggacccactacatggcagttcagaaccatctctaattccagtcccaggagacttgacacccacctctgacttcagggcaaacaaaacacccatatgcataaaataaaaataataaaagttgtaaaaataatccatcacagctgacaaggccaaaattgtcaacagagatgatgtgtgttttcccaaacacttcccaaataaggatattaaaaacaac

SEQ ID NO: 25934 - DNA, 1161 bp, Mus musculus
caacttgacacagctggagttatcaaagagaaaggagcttcggttgaggaaatgcctccatgagatccaactgtaaggcattttctcaattagtgatcaagggggaaaggcccctgtgggtgggaccatctcagggctggtagtcttggttctataagaaagcaggctgagcaagccaggagaggcaagccagtaatgaacatccctccatggcctctgtctgcatcagctcctgcttcctgacctgcttgagttccagtcctgacttccttggtgatgaacagcagtatggaagtgtaagccgaataaaccctttcctccccaacttgcttcttggtcatgatgtttgtgcaggaatagaaaccctgactaagacacctccctaactaaaaataataaaagtaaacaagaaaaaaaaaatcacagttctacagtgaggttttcacctctgtagtggctcactttgttctcaaagctttgttgttttccttgtagtttcagaagattaccagcgatgctctgattcctttacctctgaacaccgtccaggatccggcttctgcacaagaggcagtgggagcgtctagagaccatctgggagttgtaggcctggagcagcaggagggatctgcagcaggattcattgctaaaacaggctctcctttagcaggtggcattcctggaggcaggagtcaaagagaagaggaggtgttgtctaaacacagcaggtcttcttcagagaaggggagcacggcaagtgagccctccagaaggccgtctgctgagagacaccccaggaaggacctgctgtccgatgctgaccctcctgggaactctgaaagcaaaggacctggggatagaaggtctctgcttaatgagccaattaaaagtgaatctttgaaaaaatgcatttctatcaagaaagaaaacagaatagtgactgtctcatctaagactatcaaaagtaaacccaaccttctagaacattctgaaagtgatactcttggatctgattttgaacttcaggaacgtgtccattcgtcagcacacctaacctgacataggtctaaccttttgaaattatgatttttgccttcaaattttaataaattttcttatgtttttattatattgagtgataaaatacagggctagaaatac

SEQ ID NO: 25935 - DNA, 4537 bp, Mus musculus
gcgccacagataccgagaacatccgcttcgtctttgcagccgtcaaggacaccatcctgcagctgaacctgaaggagtacaatctggtctaaccgtgcctcccagaaaccgttcttccctcccctgtgggttgttgaagataaacaagagggactgtatttctgtggaaaacaatttgcataatactaatttattgccgtcctggactctgtgagcgtgtccacagagctgtagtaaatattatgattttatttaaactattcagaggaaacaggatgctgaagtacagtcccagcacatttcctctttttttttttttaggcaaaccttgatgtattttaaattttcagtcattcactcacagtataaaagcactcctgtcattcgtgttctctctctctctctctctctctctctctctctctctctctctctctctctctctctcattcctttccttcttcctcctcccctttccttttgaccaaaacgaagctgatttttcttcttcctgctccttccctccctgctgattttattctccctcactaccatggccttgcccccaatcccattcttggccagtttcccccaatcccattcttgggcagtttctcccatcgagtgacgtagtcaggacggtgttattcgactgaagccgccttacgtcagcttcctttacccgtgggtctgctgaaggcaggagcataggtgttcgtactatggttttaaatggttctctggatgcacatcacatctagcatttctttttcaatacatacatacatacatacatacatatatatgtatactatatatattgtcttgtctcacttgcactaggacagtgggtacccattgatgatcaagagtcgtatcttttgggtgcagaccttcagccacagcaggattgttaagagaaatggatggaggtcagggtgtgagggcacaggctgggaagaagtccttgcttctcaaggccacgtaccggccgcgtccttccacccttgccctttaaaccacagatgccaaatgatacgccaacagacactacattccccagcagctgctgccagagccctcttgtagcttctttattttctgtttctttccagctttcctaccctcctatccccccttgtgtttgggccacaattttgaaataatttttattataggtatgtgctgccaaagccagatttttataaggtaaaataaattaagaatttaaacagtaaaagccagtgtctcaaaatgtcagcattaaaatgtgaaggggacagcagggtgtgaaccggaaacacacattgccaaacagttgccaactgaactgctgcttctcatggtccgttcttttctttgcccttaaggtcaatgccagtgtccagacgagcagtgtagaaaagctccctgtgtggtttgtcgtgaggtctgcttgtatctcttcactggcgttagtttcattagctctttattctccttacgttcgagtgaatctgccaagaacactggtggatagtattatcctaacacttttggtttgggggcggggagggggcagggaatagtgagctggctttaccaccttcaggatctcgaattgggcgcttgaacctaagaaagattgtggacttatcaaaagtcaccgctcagtgttccgtcaagcatgtatttatgtgacgatcatactaggagggatgtttggaattctccatgtgcaatttgtccgcagatgcaaactgtgccgaacgtgtgtgagtgagcctgtcaagcagcctgcatcagtgtgtgatttaagtagatggcgagcgctctaaggctgccgggaagtcagacctcgatgctggtctcattagcgcttggcactaatctcaactccatagacatcacttttcttgaatagcaaagctgggagagtgaccagctcactgtatgaacacggacattgctgactggtaatgaagtgctctcatgtgttactctcctggctctttcatcccttgctctagaaagcccctgtaatttaattaacagactgcctgtaggtatagtgcaattatgaatgctctgatcgttgtacatacatctctcttgatattgcaacatccatactggctttgtaatcattaattttttggcagattgaatgtgctgtattgatatgtatctatgtaattgtatgtcttatagctaattcacattttgaataatgttattttatttacttttttaagagaggagaatgtaaatttgtcagtttatttctgactagggatatttttttccatttagaaaagaagaaaaaaaaaaaaacccttactattgtacagagcggtactagcatcgtgctgtctaaaatcatttgcacattcctgagtagaggtgtgctgacctaagacccaaaggtaatttcatagcaaacacacaccatccgtcagagcttttatacaaacacggagaccaactttgtagaccttttgccatttgacctggggttggaatatgagcttttatacgattcatattcttatttggcaaatgcacagtttagcattacctctctggtggcctttattagaaaggcagttttagaagctatttgtgatccactaaggaaatgttttatcagctagagaccactgcttgcctgaaagggcaaccttaaatttggtgcagcaaaaaacaaaaaaacaaaaaaaacaaaaacaaaaacaaaacaaacaaaacaaaaaataaaaacaaaaaaatttaaaaacacaaaaagacaaaaaagaagaaaaaagtaacatttgatggcctgcagtgtatagagaaaacctcatcccaggatcataagtgttaaccgtcctaaggaagcgagctgttctgtctaatagagctgtagtggatggagctgagccgtgctgataccaagctcagagctgctgagtaaggcagggagaggtggccacgttgtctttatgaattgagggtgcagcttgctgctgcacagagttgaagtctggcctcactgcacatcctggggtgcatgacagagtcccttcttctgagaagggaaaacattgatcaccctagctgcagtggtgcctgcacaccttactctatccacactagtcaatgaagctaaaactaattttgttgttgtttctcgtttggggttttattgaaggggtgaggggcgggaagggcttcttagttttgtacaaaaacaaagtttactcatatgctttctcttctattgtgattgcaagtgttcctgttgtcgatgctctaggtaatggaggcttgtgatgagcgttatggtgacttgggcatgtcttattcagaagcaaaacacagaccacagaaacctttcctcagcataccaaggcaagcagccatctcatgagtcactcagcacatgagtgtgccgtttacagatgatgtcgcccttttgtgtgtgatacggcagttcccacccacagagaattcctatttgtaaattggaggtttatactatgccttacagagcttaaattcagaagtctgtgcctcatgtctgaaacaaagggaaaacacacgcccatgcagaagtcagttaagtcttacagagcctgttgggttttccttatcgtttccttaggaagagctctgttgaatgtcctgagtagctgggaaattcttcttaggagcctgcgtatattgtttactggcaggtggcatccacggcgatatttaaagaacacctggaacttgggggcttgggggctttgttttgttttgtttttgtttagattacattagcaggcctaatcattttaaagggtaattcagccaaagggcaatttactttttgtacttcagacttctattgattgtcaagttgtacgaattgtaatttaaaaatttatactgccacatgattgtaaattttagttgtcttaagtaggaattggtgaaaagctgtttatgctggatttgggtcaaaatgacttgattatttgcaaaaaataaaactaataatgggaagaaagggctgcataacaagacaccgcaagactcagattccctcagatgaccccagcgcccctttgttctcagtttctcaaaagaacgaatgaagtgaaacatagcagaatgttaacccatataaaataaagtgtacccaaatattgtaatgtatatcgctgctcttcttaaaattacgtaaggctttcaagccactcacatggtaactaacagcatctcgattgatacaactaaggtgtacttggacatactttaatatttgattcaaaagagaaacctttggttagaaacacatacaaaagtggaagctaataatgtgtgtttatctgtctccgcactcttccaatataggcagcattcctagatgtcctggcacttgtgtctttgagatcccattgtggttctctcgacaggagaaacgaatgcttacttctgtgtgattaggccaacgtttgggaagccgggcacctgccatcccacagataacctgctggacgtccacactctgttcttctcgcagttgtcctgt

SEQ ID NO: 25936 - DNA, 1231 bp, Mus musculus
atgtggacgttgttttaggcctgttaaattaaaagtattatattcacagttacaacatgagccacagatgaaaactctgctttcaaattaacgccttaacatttcataactttaacatcttttcctgctacttaactaacctttatgcttctttttcctttaccatgcttacagaacattcaggcctacagggaatggattctgactcacagtagcagtagtgaggaggaggaggaggaggaggaagagacttagtcagaacttaattgagaaagtgtgtatggtcctttgcatttccctggattgtttgtgtatctgctgtcagtccatccatgtgtccattgttagggacaaaagttagcactgtttccttagaacatgtttttctgaccatcatgataaagcaaagtaatttctttatttacatacaggaaaatgtatttatcagtcagagtgtagagtatatcatacattataaatttgcttttatatatcctagctttgtatcccacagtttgtcattaagatcggaagtgagatttaaatgtagttttaatgttcatgagctctactctaaatcatctgcatatttgttagatgtcaaaacatcttttttaaaataaaaatattgtgtgaaattttgggctgtaatgtaatatcattgtttaaagaaaagagagggcgggagaaagcctaggaataccattgaatgttttatatgtatttagcacttaaaggcattttgtcaaatttcttttcataataaacttgcataacttgatgttgtgtggatttttttttctattccaaaatcatctctaagttgaactactatataaaaatacatgaattgtcatagaagattagttatacatagaatccaaagtctttgctagtcattctgttactacttgttttctcatacacttctgagacggttaacaagttgattgggcagtcatatttattagctaactaacatatcaatatattatatccctatcaaaatagtattacttaattcaagataatagaatttatataataaattgtaaatttatatatatttttctaaaagttatgaagaaaagctatcgttgtctctgagttttacaagcaagtttgttttatattttggcactgaattttttttaacttcagacagacaattctctcgtcctactttgctagtatattggatgttgtaaaatcagcaaaaaccaaataccct

SEQ ID NO: 25937 - DNA, 1226 bp, Mus musculus
gaaaaattataaaatcttaagcatatgttatttctattgctgactaaaacaaaatatttcatgaaatttagactcagaggaagaattttttgatgcaccatgtagtcccttggaggagtgtcctcaagtgtcatgtagagataaatgtactcgacagaaaaaattacaaaagaaagattgtgtgatgaatcttattcaacttaggatgagatttgaagtagcagaggtaagttacattcaatgtgggctatgtgaattgtcatttatactttgtaccgtttactcaaatagtcttcttgctaatagacattgcccaaggcatatggagactcggtctatggttttcttccttttttttttttttttaagatctatcttacttaagaattagtgtttaagtggtatattgtgggcagtttttcagtacatgtttttgatgttgattctacactgtaagtatatgctttatatgtgtgtggaaatataaaatcaatattaaattttgtaatatactacataatacatcgtctgtatttacatattgttatcagatatggacctgtgtactttgcctttcttctgcaggtgtccattcagttttatcacctggtgggagactgtgaactacctgtgctggaaatgggtgctttaggattgggaacagaagctgagtttagaacatttgacttgaaaggaagtgcctttttgaaagaattatggctaaaatgtccagaatatttaggtaagactattaaaatatgtacattattttcataatttgattagcttctgtattagtcagggttttactgctgtgaacagacaccatgaccaaggcaagtgttattaaaaaaaacaacatttgattggggctggcttacaggttcagaggttcagtccattatcatcaaagtgggagcatggcagcatccaggctgtcatggctcaggcagaactgagagttctgtgtcttcatccaaaggctgctagtggaagactgacttccaggcaactggggtgagagttttaagcccacacccacagtgacacacctattccaaccaggtcacacctattccatcaaggccacacctccagatggtaccactccctggtccaagaatatacaaaccatcactcctgctaaggaattttctgttccttcgactttgaatcaatatatttatattttgaaagtctaaaaagtccaaggatattacttttct

SEQ ID NO: 25938 - DNA, 1170 bp, Mus musculus
ctatgcttttcacttttatctttgtagctacatataatacaattcagatttactccagttcagtattgcattttctatttagtttttttgtatagattttgtttgtttgtttgtttgtttgtttgtttttttaaacatggttctgcaggtaaaaaagaaaagatcaggagttaagggacagacccagatattactaggtaacagtggatgttgtctgttgtcactgctgctgacagattgaaaaatatagggaattgctagttacatttagtaggacaaaaattattgctacataacaacagtagttttatttattgaaaagagttttatgtgtatttgtgtgtgcctgagtttattttatgtgcaccatatgcacatgacaggggcccacagaagtcagaagtgggaatgttggactgtgtgtaactggaggaacaggtcattgtgagtcacagtgtcagtgctgggaactgaaccctggtcctctgcaacagtcatcctcactctaaccactgaatcatctctgcagccccacagacagtgcctttcattattaactttggaggttccgggaaacttgtctgccagacgagactcatactgttacagacgcttggcttggtgttctgatatggcttacctgtatgttcattaccactagtggttgcagtgatggggcttggcaggttagataagcagtctaccactaagccaattctttagtctgaaatctatgctttaaaagtcacctctgataatcataattcatgctaaagtttgggtccattcttctagtcagttcttcacatagcagcgggcccatctctctaatatcaaagatctagcaaggtgttagccaacactctggaagctgaagcagcatcatgagctcaaggccatctgggctccataaccgaaccctgttttgaaagaaaaaaatcctatacaaataaagatttgattactgtatctcccatttcttatttctaaaacttttaattgttttggtttgaacctggggccttctgcagcattccttgataaggattcttcaggcacctggccctgtcctcagtgactgattattttgagtttaaaatctggagtcttgtctttagtgtgtataaaatctttgaaatctgacccttagtaacatttggattttcactt

SEQ ID NO: 25939 - DNA, 1152 bp, Mus musculus
ttttttttttttgctaattcgatagaaaaacctcagaatcatctaggctcccacagcctgccctgccctttggaagcccacctcaaacatcatggtgataggaatatagttacccaatatcctgattcgctcacctgcttaacatattaactcctttatattccattctggaagatgaatttcacatttcccctagccatgttaaacttatgttgttgtgagaactgcagagtttggctcagcagatctgtagacatgggactcttttcataaccaaccagacatggcaacaggcaaacaggcacaccattcacactttctctgagtctgtgtatggaaaatgactcactcgtgtggcatggcaaagtaaatttaatgtgagcagtttcacgtcaatgatatttggaaaatcctatgggctgtaataccattacaatatttaagcacatgttatcttactatcttcaaaaaacaagttactttaattgcatgtgctagagaaaagctatcatgctcatcaaatgaataggcttctagggaattctgggaaaatagcccataaacaggtagatgtaactctcacgtcgctcagctgtagcgcctgcaccctgggcattcttgctttggtctggactgccaggacctgctttgcactttttcctgtagatttgtagttaagggaacaccgaggggtcattgaggcaggagtggtgttcactctgagttccagctagtacttagctggattttgactaaggctgaaacaaaaaccttcacagaaggtagttgttgaagagtgagaacaactgggggtggaggaagaccccaaagttcctattgaagccatacagtgttatataaggttcctccctagggcatactgatgagcaaagaggccaccctccctagcacacatccttaggatgtaactttgagagtcccttcatggttctgcacaacccttgtcttatcactatgccccagtggtctgctactttaggaatatctaggtgtgcacaaacttaaccttttctatatctaaagagttttctacgtgtatcggattgctcagaataaagtatatattagacgagttttggtaaagaaataaattctatctggatagtatggtttaaaaatatgaaaatatgt

SEQ ID NO: 25940 - DNA, 1122 bp, Mus musculus
ccatttgattttaaataagaatcgttaccatgtacctttatttttaaaacatagctaactttaataatacacacacacacaaaatcataatatcagacagttttaagacattcaaagacggaagtatgttttctgtctcaaagctataaaatattttttctagtgacaagtcttattagaaaagctgagaatcagtagacgagctggggtttgttttggaccaatagaaatgtgttggccatgggccaccagcaatgatggtgatgcagctgataccctctatactggcttctgatttctttcttttgtccagtggatttgtccaatggttcttttagtagaaaggcttttacttatgagacagggcatcttttaaatctaaaaccagtggttcctggtgacatagcatttgtgtaaaccgctgtgacctaagcagtttttctttttctttttccatcttgcaaaacacacggctaaggcagtagtctagggatccagcaagcaggaaccccagcctggggtcaccggtggtcaacatatctgtcccagtttgctttatactggaggaacgcttgaactttgcaaaactggaaattaattttttctaactacaagtacttttttttttaatcaactgtttgatgttattcatcttaaacactcttgttgtagtggggctccatttcagttaaatggcaagtttgaggattttttatttttattttttattattttttttcttttgccccactataggagtaaaactaggctctaggattccagagcctcgagtcaatgctgtgaagccccatgctttgtgttacctcaccttcgcaccattgcacttgttgaaccatgtctgatgctgtagtggcccagtgcctgacacagggcttgtacagtgtctgtttaccgtgtctcactggattttatttttagagtttttcaatatgacttaaaacaagagaaattcacacagtgggataaataattcaaaaaactaaaaagggaacctggaaatgaaaccttcagacactcgagaagagtacagttccagttcacgtggagagaggcaggctttgtttatgttggagtcatgtttgttaataaacactaatttta

SEQ ID NO: 25941 - DNA, 2516 bp, Mus musculus
ttccctggagaaaaagacggttccaacattgactgaatctctgtcctttcccagggctgtggctagggtgcttagtcagtgtttttaggaggggctgagcaaaggaatagtaacatggattattagaagtttctttttttctttttttccagagtcacttatttctgcaattcaaggtgatattgaagaagctaaaaagcaactggatttacccgaacatttgaaactcaaagatgataatttcttccaagtttctaaaggcaaaattatgaatggccactaatgaaaagtcccttacctgcctaccactagtgtcacgcatagtgtcacagtgcttctgatacactctcatcttgatcatattttaaatcaagcgttttcctgtagctgtcaagtggtctccagcagttcactccatcatgttgcacagtactaagagactcattcagaaatcaagactttagatgtaatatgttgattaaaatgtagcactagaaagcttgtactgaaaataaagtctgtgagtgtgggtggaaaagcaagttcctgaggaaaatgaggactgaccatagttcttgtgactgagtgtgctggcactggtgagcccagccagcctgtgctgaacagaggcttttcaggaagtgcaccacacacacacacacacacacacacacacacagagcttacccatgaaggaaaaattagagttacttttctcattttgtgcattgatatatttttacaatcctgcaaacttccttgagtcactcacgactccccctgaggtcacttcctggtagtgtcccaatgctctgtgtgcagttacttcaggttgaagttgccttgatcgcctgcccctcatcagggcttttgcttttcttcaaagtactgaggatccaacccagtgccttacacgccaggcaagtgtgaccactgagctaggctcccgccccctttactttttgaagccatacaatggatgtctatatgttgcctttttgaagattaggtggttttgctctttaacatttttgtgactttggtttattttcttcccatgtcgcccagagattacttgtgtgtgtgccattctgctcaaaactaaatggtggtcaggttcaagtaaagaaaaataaaacaagctgcatttatagacttgcttggaattgaaatgaacatagccagttcctacccaaccctgccctgcctttttttttttttttaaagtgtggtcctgtgctttcaaagtaagtacagttctctatgaccaggcacttaaacataatttaaaagtccttgtagcttcagaaccggataagttccagttgcatatctctatatctcctggtttccctcttggttttcccctggttcctcccctttccctcttggtggcctgagttgtttatgttggcagaaggttgacattggatgctcgattgcttcagcctcaccggggcattgaatcatcatttgttgaatggcaacaggtttgctggggcagaggcactgcctaagtgggagcatgcacgtgaaaatagaaaggtaatttaacaacacacagacacccagagacttggtctctgcatgtgtgtagaagtagtggtgtggggagggatgggactcactcagccctgtgaatgtgttctatggctgagcaacatccctagccttcagaatagaatttttgatgttggaaatcctgtatttaaaggaaaccttaattatcaatggatttatgaaggaaagttaaaaacaaatatgcacagtacaaaatagatctgtggctttttttttttaaagtaagaatagcttgttagtatatcaatgttcatggctaatgttatctcattttgttagtcgttattttggaattacatgatgtgtgatttagggcttagttaattctctagaattcaaaaactattattgatgtattaaaagaaattacggtaccacgttgattagtctgaatgtttgcaggcattggaataaaatttgacttattttttccctcttcccctgtcaacctgaatcctgtatctgtttggggtatactggctgtttgttactatacacctgtatttacaatcctgagtagacctatcaagtaagggtgctcatgtgactaagagctttattttcaaggaccctccccctcccagtccccccatctcaggggtctttcctccttttaaaagaccttacaaggtctctatatctggctatccttgaaagtacagagatccatgtgtgtcttccttctgaatgctgggattaaaagtgtgcatcaagcctggccaagacacacacaccaccaccaccaccacccacccaccctttaaaattcctgtagcaaggtgactttacatggaaaggattcagaggatatcattactcaaaaagtcaactctttaagaataaaggttcctattgggagctaaaggagccagacaagtctaactcctgtataatcctcaagattgttttgtaaccatggatgtgccacaacccca

SEQ ID NO: 25942 - DNA, 1141 bp, Mus musculus
gaggaagtcaaagtgtctgcctgaaggagaccttggcaaggagattgagcagaagtatgactgtggagaagagatcctgatcacagtgctgtctgccatgacagaggaggcagctgctgcgatcaaggccatggcaaaataaccagcttccagggtggtgatggtggcagcagcgatccatgagcctacacaggcccctccccaagccaggttctgctctggctgggcccttggctggactcctatttgcatttatttgacgttttattttgattttcctcaccccctcaaactatcagggagaccctgcccttcacctagctcccttggccaggaatgagggagccatggccttggtgaaactccctgcctcttctctcgcagccctgatgggggagagggagccgggtactgctcgtggtttaggttcccctctcctttttttttctttttaattcaatttggaatcagaaagctggattctggcaaatggtcttgtgccctttatcctactcatccccaatctagtcccctgttctccatagtccttcacccccaagcaccactgtacagactggggaccagccccttccctgcctgtgtctcttcccaaacccctgtaggagtggtgagaagagggggcagaggacacgatccctcctcaggcatctgggaaggccttgcccccacgggctttaccctttcctgtgggctctctccctgacacatttgttaaaaatcaaacctgaatcaaactacaagtttaatatgaaaaaaaaaagaaagctattacctgtaactttctttattataggaagatatggataccttcatgagaagatgcgtgttcacagatctgtgctgggtatatttaggaatgagactttcattactttacaatctataaacaaatttaaaagattggtacattaagggtagtgtagctttattatggcattcatactgaatcaactgttaatgagtcataaggcaagacaaaaacccaattgttctgatgcttggccatcttatgttaaagcatttccttctagtactctacattcttgtttctatggaagagttctagaaaacatagtagttctgaacagtgatctcagggatggaaaatcctaatgacaaa

SEQ ID NO: 25943 - DNA, 1359 bp, Mus musculus
gcgtggtatcactattgacatctccctgtggaaattcgagaccagcaaatactatgtgaccatcattgatgccccaggacacagagacttcataaaaaaacatgattacaggcacttcccgggctgactgtgctgtcctgattgttgctgctggtgttggagaatttgaagctggtatctccaagaacgggcagacccgtgagcatgttcttctggcttacaccctgggtgtgaaacagctgattgttggtgtcagcaaaatggattccaccaagccaccatacagtcagaagagatacgaggaaatcgttaaggaagtcagcacctacatgaagaaaattggctacaaccctgacacagtagcatttgtgccaatttctggttggaatggtgacaacatgctggagccaagtgctaatatgccttgattcaagggatggaaagtcacccgtaaagatggcagtgccagtggcaccacgctgctggaagctttggattgtatcctaccaccaactcgtccaactgacaagcctctgcgactgcccatccaggatgtctataaaattggaggcattggcactgtccccgtgggccgagtggagactggtgttctcaaacctggcatggtggttacctttgctccagtcaatgtaacaactgaagtcaagtctgttgaaatgcaccatgaagctttgagtgaagctcttcctggggacaatgtgggcttcaatgtaaagaacgtgtcggtcaaagatgttagatgaggcaatgttgctggtgacagcaaaaacgacccaccaatggaagcagctggcttcactgctcaggtgattatcctgaaccatccaggccaaatccgtgctggctttgctcctgttctggattgtcacacagcccacaaagcatgcaagtttgctgagcttaaagaaaagatcgatagtcgttcttgtaagaagctggaagatggccccaaattcctgaagtctggtgatgctgccattgttgatatggtccctggcaagcccatgtgtgttgagagcttctctgactatcctccacttggtcgtttggctgttcgtgacatgaggcagacagttgctgtgggtgtcatcaaagttgtggacaagaaggctgctggagatggcaaagtcaccaagtctgcccagaaagctcagaaggctaaatgagtattacccctaacacctgccaccccaatcttaatcagtggtggaagaacggtctcagaactgtttgcctcaattggccatttatgtttaatagtaaaagactggttaatgataacaatacgttgtaaaaccttcagaaggaaagaatgctgtatggacctttgtgtgtgtg

SEQ ID NO: 25944 - DNA, 1231 bp, Mus musculus
tgagtagctgtctgcctgtccagggcctgggtgaactggttaatggcaggagggactttgagccgcttgtagaggatggctctttgccgctgcagcctgatgtagcgggcccatttgacaaagtgcgatagatgtcttttgggctggatgtcctgtccaatgccgaagttcttaggcctcttctcgaacagagggttgaccaccttcttggtctcctgcttcttgacgacggcggggtccggggccaccttctttcccctggccttcttccctttgggcatcttgctctgctgctggagagaagaggatcgtgttttcaatcaccaaaagcaccgatggtgcacaacagtctcaaccgtgtgtaaatcctttgtttgtaattttcttccttcctgtcttctccttagatggggctcgaacgttaagcaacgccgaggactacctcgatgacgaagactcagactgattccccccggggccgctttgattgttgcctaaacttcttttgcttttgccattccggagcctgggttgtttgccagaagagtattgataactgttgcttttaaagtctgtatgagcgcgacactgctgcactgtgatctgtgaggagtcgttgtgagggtgggtcattctcacccacgccttgccaataagtgaagagatactttgttgtataaaatacatatatgctcaccagggtaaaataaacgaaaaaaaattatttctatttatcaagctaaaggaattgtaatagttttttttcttttaaaaaaaatcatttttttaagttctttacctcaaggaatgagatgttttgagtgggtttttcaagggggaaatggttattataacaatagaccaaaactctcaacagaaaattgtcagctcttctgacaaaaataaacatttaaagagattttattatctgtttttgtgctatcactcattgctggtaaataaagctttctatactcaggtaagaaccgattcgatgttacttttagatcacatttgatattgattagcacagaagaatcacaatgctgtgttcctctcacagcttcctagttttgttttgttttttttccgagacaatgtttctctgtgtagccctggctgtcctggaactcactctgtagaccaggctggcctcgaactcagaaatccacctgcctctgcctcccaagtgctgggtttaaaggcgtgggccaccaccgcctggctcaca

SEQ ID NO: 25945 - DNA, 1881 bp, Mus musculus
agaggaaaggaagggcttagacaatgacatagaacacttctttgtcaaggagctacttaggctattagcctgaattctttaaataagtgggtatactttagcatagagcagtggctatgagcagcttagttagtataagatactgtatcttttatttccagggcctgaaaatgcctttaaatgtgagtagggagagtttctgtttgtagttaggttttgtgttacaccctgcctttcaggattaatacatctccccccccaccccaagcagaaatacctttaaacctatctttggcaactcctattaaaaatggatgttactgctgcttctcagtgacccagggtgcaaatgcaccgtactaagtgcattagtgggcaggtcttgttttaagatttgctgattaatccatcacaaatgggagcttacaaaggatgaaattgatttaaaagcagaacaaagggaggaaaaagaaagccttctccttgtgttttttataagtgtaaaattctttcaggcaacctgagctggttgagggagtgcttggacaaccgggtgggtgtgaacggcctggacaaagctggaagcacagccctgtactgggcctgccacggtggccataaaggtactgaactcgctggttatatgattccgtgctcttcaacatctcctccacctaagggagcctgccttctttagtgacaaaagcagtgcagcaaaggctgtgttcttggtaagggcagagcagtggtggtgggtgtggctggtgagccccactgtgagaccccatgaactgctgggaacttcgccttctctctggctttcgaaggcaccagaacataccagtaacaggatagcaagccatggtcacctgccacagagggaaagcagagctggtacctgtagcctttcactagctatgcttttggacccacattaagtttaatacaaaatttgaagtaccacactgatttaagcctgcagatctgttgcagtcattaataacaggttggatttttctaagtattttattctagccctatcccactatccactcttttctaccaactgagataaatctttgggtctgaaatttttcttttgtaatctaacttttagagtttttttttttttctgaagataaaattcgaaaatcttataagaattttctagaaattctcctaacaagctttgtactttgctattttgttgcctgcttttacaaagttcactgtttctatcttaagttccattttctgtttgaattgcagacatagtggaggttctgtttactcagccgaatgtggagctgaaccagcaggtgaggccgcatggtgggcgccacattcaacattcccaccgctctcttgtttgcacacgacagcttgcgcgcatacacaatattttaattcaggtgctccaagcagatggagttttgttgttgttcctgtgtttccttgctgtggcactgtggttggaagccaagccctcatacatgctgttcaagtacatggtccagatagtcagcttacaaagagaaagctttacctcagtcccagtttgggaggtggtgatcaagtggcctcatggctcttgggctagtaccaacgtgagtgagcacgtggtggtactggtcggctcactgtatctatctacagtgagcagagtctcaccacccactttgagcacacactccagggcatgaaggctccttcccactcgtctctcttcccaaggttccatcaattccctttggatcgcagcatttcctttttttttttttttttttttaaagatttatttatttatttattatatgtaagtacactgtagctgtcttcagacactccagaagaggcagtcagatctcattatgggtggtt

SEQ ID NO: 25946 - DNA, 1229 bp, Mus musculus
gggcagttctagaagcctgcagaaaggggaagcaggatgttctctggtgtgcatattgagcccgagctattttgacagtcaaaacatgactgtgtgtcctgacagtgtctgtattttgaagttttggtatccagttcagtgacctctctctctccgtcctttgcttcttttgctgtgaggccagggtctctctcaaacctgtgatttcacctgcaaaacaaaacatggtctgtggaagtgagtgttttccccaagcagtaaatattgttttaaatagccttttttaaaaacatcgtttaacaatagtccatgttccctaatgtcttcttggacctggtggtttttcttggctcagtgtgacaaacggagggaagacgacactggctaagagcttgcagaagcaccttcccaactgcagcgtcatatctcaggatgacttcttcaaggtatctatgaaggttcttagataacttgttgaacacacacaaacaaaaagctttcacgacaaagttaagtaaattatagccaaaagctatttggggagaatatactgggtgccatagtgttacctgcccactagagggcaccatctgtcagtgaccacctctgagcttggtcctcctattccaagacatttcttaaagtcttaacttcttaattgtataattgcaccatttcttcactccatagtgtcttgatggatttttttaaatttttttccagccagagtctgagatagacatagatgaaaatggttttttgcagtatgatggtaagtacagccacatgttgaataatatgaggttatattcattttctttttcaaatccaaacaacttctctctctgttaacataatgttaaatgtttaaatagggagggcagaaggcgccatgggtagaagcacttgtcacgcaagcctgacaacctgagtttgatttcctagaacctttggaaaggtggaaggagacactgactccacaaagttacccctggtctccataaggatgctgtggccgtgcacacacacatatcctaacacattatacacgtgctttcttctgtcctctgtggacactgcacccacgtgcacccacatacatgcaggcaaaacatccataaacatagaaaatgaagagcttttcatttaataatattaaaaatagtaactactttccaaatacagtatatgttatttatctttcaaatgtatctatagacattctgtgt

SEQ ID NO: 25947 - DNA, 1164 bp, Mus musculus
caggacagtggcagctcgtctgtatgttcacttttgtgccattgtccccaacatccagagccatgtgttgccatgccgtcagacagaaacccctcctgaaagcaagaatggcttgacctcaccctgcaggaggcacagcacagttcatgcacagagggtcagttcctctataggaacaaaagccaagagctcctgactgttacctagcaccaaaagaccattgtcgtctaggccaacaatgggtgctatgctgtgtatgcttctgcgtttgtgtgtatagttgtgtgtccaagtttgtatgtatatttctgtatgtatacatatactccaagactacaaaatgaaccttgtatactacacagaatgtttttttccagttttcattttgtttgtattgattataatatataatttgaaaaattgtctcatagtaatgccgccacacacacacacacacacacacacacacacacacacctgcaaccagcaacattacctgaagtaatggtctcacattgactgagtcagcagtttactgcagagcctggagactttgtgcttgtagccataaattcacttgtaattgttaaatactgtgtgtctctgtgagatttttttatatcaatagaagtgtttggtagggggctggtgagatggctcagcggttaagagtgccgactgctcttccaaaggtcctgagttcaaatcccagcaaccacatggtggctcacaaccatctgtaatgagatctgatgccctcttctggagtgtctgaagacagctacagtgtacttacaaataataaatgaataaatattaaataaaagagaaagatgttatctaaaaaaaaagaagtgtttggtaggttttacttggttttctgaagctaacactctgaatacagaatcatatagtttcttcaatcatataggaaaccagggcctttcttagaaaagtacaggcagatgtgagctggggaatttcttagtacctcgttcaatgtgggagttaaaattatgaatatatctagagcagccctaattcaaatatgaagattgtttattaataataaaaataattgaccatgatcttctcaattcatacaaaatatactgttacattgcctcatttggtcagttgtcattatttgtttatttctaacac

SEQ ID NO: 25948 - DNA, 1141 bp, Mus musculus
atctgttcttttatttttttgagttagcatacaacataatgggtttcattatggcattcatatatgtcaaacatggctcttgtttatctacttctccgctgagccacggagtttatttctcaggaaaataaataccgtaaaagtcatgacatatatgcttatgacttttggacattttgagctatactttctgaataggatctacctttcttatagatgatttttggaggtatttcccatatgttagatcatatcatgcaaaaagttttaatttcttcctttccaacatgaatgcctttattccttatttttattcttaggggaaagctttttcttttcacccctgagtataatgttaactgtggggttctctctctctctctctctctctctctctctgtctctctctttctctgtgtctgtctgtctgtctgtctctctcttttaaagatttcacttatttattttatatatatgatgagtacactgtatacactgcagctgtcttcagacacaccagaaaagggcattggatcccattacagatggttgtgagccaccatgtggttgctggggattgaactcaggacgtctggaagagcagtctgtgctcttaaccgatgagtcatctctccagccccctgtggggttttcttaatgccccttttcttgttggatatttttccacctttctttgaaaggatgttggatattgttaaataccttttgattctattgggataaacttgttgaggtcttcttccaccctgtcttattaaaatctcattttcatgtgttaaatcaaatcacccttgccttcttaggagaggtcacatttggctatggtaaataattttctaagaacattgttgggttagatttgctaatgtcttgtttgggatttctatactcattcattgtaagggatcgtggcctatggttttcatttgctaagactaagccttgccttttacccattgagaggacaacaaattgttttttattcttctctggaagataagcagtaatcttcattaagaatgattttgaagactttgaatcagaatagtacagattgccattcttaaaggctgcttgtgttcagccagcagtgctactacaagtaatctgtgtacctgtt

SEQ ID NO: 25949 - DNA, 1537 bp, Mus musculus
agaaatgtattttaaaagtcatccagtgaacagcgaggaatgcatgctttttaagttgttatttaggaatgcttttattcatcgagtgttttttgtttttttacaaaggtaagagcagtctgacaccagagggttggttttgttacctaacgatttttttttctgttatgttttactctttaatgttactacttacatttctaaattatgtattttacttaactctgaaatcagttatttcacttatttttttcttcatatcatgaacgttctaaaaatattccttataaatttgcatcactttttctcttgtggcttttgaagttactatattctaaacttgagaagatggtataaatcaataatagaagagtcactggggagctggtgagatggctcagtgggtaagagcactgacttcttttccaaaggtactgaattcaaatcccagcaaccacatggtggctcacagcctcccatagtgagatctgatgccctattctgatgtgtttgaagacagctacggtgaacttataataataaataaatcttaaaaaaaaaaaaaaagaggtgtcactggaggagtttaattttgtattttttatatttaggtccagctattaaagtgtgtaagtctgggaaatttaattttttttcttaaattagtgctatatacaaatgttctcagttttataaggtgatcatgtgctttctgtttttaaatttacattttctgaggtggtgaagacttaggttctgatcaataagcatgatagggcatgtagactatacgggaaggctcctgagcccacagtatatagtgagcatgatagggcatgtagactatacgggaaggctcccgagctcacagtatgcactggtcacgccggggaactgtagagtgtatgggctctgtgtgtaattcacgttctgacatcgccagaaagacgggactgggagcttcatgtctgcatgaaacttcctatatctttaatgtgtgtatagacttactttttctttaaatattaaagtctaccaattgctacaacagttcttggttgtttccctcaatgtaatgatggccatagtgggaatgttatttgagcacatttctcaattcttcattagccttttttttttttttttttgtacgcttctaggaactcaatgagcatttgagctttgagtttgccgaggtgtatagtatctattttcactttgtttcattcatgttcagtataatgaacttggaatcttccaagggaaaaagattagtcttgatccttaattttgttaaatgatagaataaactacaaaggctaacagcagaaaaagtttcaagaagagcagttttatcatctggggtcgcttctctgaactcttctcaactgggcgggtagtgtctctgaggacttctgccaggtgactccacagtgcctcagcaggtggctactgggtgaggacttcactctgcattctgacctggtattttctcctcccctagtgctttctctctgtattgtcaactttttatttc

SEQ ID NO: 25950 - DNA, 1128 bp, Mus musculus
agttactttttgctttttaccaaaaaaaaaaaaaaaaaaaaaagtacggacttatttctgccacggtttacatttttctgccaagacaccacccactggagaggtcctggaacctgcaggccgctgcgggctaagcagacacttccgccgccccaggatcgcagcacagaggaaagggccccagcgcacttgccgctgggacctctgaggccgcggagtctttcggccgctcctgcccgagtcctcgcttggggaccgagaggcgcacacacaggggaatgcgaacaaccgtgcaagtcaaaagaaggccgccagggggtagcggcctccttccatccacatccccatgccccgccccctcagagggcgcacttccggccgcaagggcgctcgggaacgcgaaccgcgagcctccaccaaccagcggctgtgctggatgggcgcaggtgcgcgcgcatcacggcgcaggttcgaaactccggcgctgcgcggtggctcccccacaacgtctcgtccgccctcgggacagccgagctctgcgctgcccttcgccctccgcccgccgcccgcgcgaccctcgtccctggcccatggccaagcggcgtgcggctgagccgctcacgttccgcgtgccttggaagcggctcctgctcagcgacttccccgaggagccgccgctctgggtcccgccgtctgggacggctcggcccctcaagcgccagggggacgcggggatcatggcggagcctgcgtctgcgccccgcaagcgacgcggcggcggggacgacagacaggagctgcagggctgtagccgggagcccggagagccacctcctggcgagcaggaggaaccccgggccgcgggcggcggcgacagagtagaaagcgcgggcagcccgcaggtagccgacggggtgcacagccaggtaggtccgctactcactagcccggagctcggtgccaggccgcggaagtcgggccatcgagtgggccagacgggctggaccctagagggtcagctcagtgaccaacgggagagaggcgtttaatttgatggggaatgctgtagaacttctagcatgctttccagtagcattcatcagaggacctgttaactcctaatgttca

SEQ ID NO: 25951 - DNA, 1571 bp, Mus musculus
aaatcggtgtgataaatcagtgtaactgggaaaatgtgtaggtagcccagcctggctttaagcttacagctcccccacttggccttctgagtgctctgactgggcatgtcagtctgctcccctgaaacaaagcagttatttcctggtgtttgcgtgtgtgtgtgtgtgtgtgtgtgtgtgtgtgtgtgtgtgtgtgcgtgcaatggggggagtgccattttctaagccagtgatatctttatctttttcctttcctaaagcagcctgaagagttttggcagtataatacattccagtattggaggaaccctctgccacctcttgatctggcagctcttgaagatgtgagtgcaaacagcctgacagagacacttgaggacaagaatgaaggagttgagattgacatggagtcctgacagaagcatctgaagaaatgggattctctgaatttgaggcgacctgaaggaaaagttcttttccatacttgacatgatccttttttcaaacctgaaaactaggaagggttttgggataaataactaatgactactgaatctcctaatggagagctgtcgagggtgtgggacagctgcagacaaaatacttgtgtttgcatttttaatgaaaaagttttgttcacgctcttgactttgaagatgcttatcttggaaaaggaggttttggcagtttcagaggaagccctcaggtctaccgcacttgttctgtcaaatgtccctttgcaccacaaagcttatttgtggtacacggaatgaatacatttatacagctgatgctcataaatactcgctagtacatcttattggatccccttggttgaacaaataggagacttgagtatctatgcaaaattaaaatgtgagattgtttttgaaagctaaccttgttttacaagagtgtaaacttaaactagtgagaacttccatttgggtagcgtgttttacctttcgctatttgctgtttattaacagcataggcgatgaatctagccaaacaatggatagagaacagtaggaagcagacacctgcccctcctgccttttctgaggtgaaagaaatgatctggtcagcttactgattttgttctgaggacattttttatatagtttatattactttagacctgtagttctcaacactgatatagcactttagccatttctgctcgagccctggtcctagagagatctcagtcaattatttgaaggtggttttacacataggtttttgttttattttggttttttgcaccgattctttatccctgtgttgtgcagatggggccagaaccactagactagcagcctttcctgtttaaaggagatcactagtgagagctgaagcaatgcctcttcattccttttgtcggtatcttgttatgttacttgatttgtcattactaagttattgtgttacaattttatttttaataaagtatactgtttatgtttgagctatgtatcagtgactaattttgtattggattcttgacggtgtttctgtacctcattctttatctgctgatagacactgaggcccattccatttgctcc

SEQ ID NO: 25952 - DNA, 1178 bp, Mus musculus
taaggcagtacatttgataactaaacatatgtgtatagaaatgagctttaaataactgcacatatacacaaacaaatgccattgaatatataatatacatatcaaatatcaatactagccaatgttcaagcaaatactacctatttttctttttcaatgctggtctattcattctagcaaataaatggcaacatattatgtttcaaagtgatttggtaatttatgtttaacaattcattcttgttagaagctatttgtgactctgagttttcatacacagcattgctcctttttcttttattggtctgtaggcaagtgttttatagtcttaacattttagctgtactcatttttccattctcataaaacacatgcaacctgagttacatgtaatatgatcagagtcaccagaaatatgtaacatgagtcattcaactttgtaactgatactctgggacaaatgtttaagatattagttatttgcatcattatttttttagaataatttactacaaagttatttttcttgtctcctagagctgaaaagagatctggccaaagacatcacttcagatacatctggagactttcggaaagccttgcttgctcttgccaaggtataacataaatgctctggaaatgtgtttgctattatgctgaataaaaacttaagagttgtgataattttctaggaatgagaaactttctctttcttcaaactaatgctgcttaattgatgaactatacttgtatgtatttgagggaacagtgtgatattttggtatataggatgtcaattaatggcataaaataatgtcttcctgttataacttcctaccatttttttttagttgagatttaaagtttatcttcaggtcacttaaagatatcaactatgatacagattacatttctcttactgtatagtaacgccacagtgtacccctgcttattagcgactgtgtcctttcattggcatcttccagacctgtgtttcataccctactatcgctgcttatcaccaatgaactatgtgcttctgtgggttccagtgttttaggaagcagacctacgtgagctcatgctctgctttgtctggcttgtgctcctcagtgcaacattgctggagaggatagaccctgttttatgctctttttcctcagtggttattgtctgat

SEQ ID NO: 25953 - DNA, 1154 bp, Mus musculus
tatttttatagcacaaccagaggttccctaatgtcacaagaagactgaattgttctttgttcacatgacttactcaaatcagttttatttgtttatggtagagaagagacagtgaagtagaaaatcattgtgggggaaaatgttgggtattttagtctgtcttaaacttaatgatgtaccagtttggggggttttgttttctcccttactatatcagtttcatcaagtcagattattgggtcatgaaatggaaggtgaatctgtatttaaaatgagttctactttggaaaaactgaccaaattttgttttatacatacacacaaattacttggaagtagatcagctaataatataattgttgttacttgatataaatctgtgatttcctatttgtcttcctcttatttttctatcctccccttcctttgtatgtctgaggagcttttgaatgttttaggtgtgggcaaagaaatggctaacgtacaacattctcaagactcatacattaaggaaaattgtattaatgtatcatagtagcttgagaaagtaggcggaatattttcgttggtctaccacaagactcttgatcccattatatattgctaattgagaagttgacataaacgcaatctgcttgtcctaggaatttgataatactgagagctttgaaattggcgtattatttaggcaatggttttagtattgtatgtgcctaaatgtgctattcttagtgtttggattaatcctaaggatttacagtttacagttaggtttaatataagtactcacagttaagtttatacataaatacagttaggttttatacaagtataagtttttttttttgtcttctgaagaactagtaggatgacgctttaatatagcagtctgcagtttttcattatgaccacaaatcctaatagaaattaccaaaaggattttttttaaagttgcatggtgatggctttttatatgtctctttcttagtcaaagtgaaaaagtaagttaggtcttcaaaaaaattcctgttctaaagcccagtttggtagtgatctgtaatcctagcacacttatgtattagacagaatggtggcctccagttcaaggacagcctggcctagacaagactatgtgtcaaaataatagaaacaaa

SEQ ID NO: 25954 - DNA, 1219 bp, Mus musculus
ttatgtgcctgtacttaaaaaaaaaaaaatggtacaccagaaaaggactggcagtctactaccatagtcaaacttcaccttaatttcgacatgacttttggaagcaggaagaaagctacaaaactggtatttggtaccatgtgtgagcctggttaaattggtcttctaaaagctgtcaattaggacattctgcgaaaggtaacatcacaactggttctaagtcaaaccatcaagtcaacagcagggtgcctgagataatcttggaagcttattgtgctggcctgcaccagaagatatctgcattctcattactaaaattgtagcacagaactgcactaggatttgtttacaaggagaaattaaactctgtttggttttcacatatagcagctctgttaaataacatgcatctgaattttaagttgcaaaggtatctgaacagttaatttttcatgtgcatcttttgttgaatgttttggttcaagaaagaatgtttaaagctttttaaagacttcagttcttaatgtaactgtacccttctgcatggaaaatcataaccaacatggctgcagtagacttctttagtggtatccagcaccacttgcagagggctgctttatcatattgtacttgggtgtaggactctagtgttcttgggtgtattgcatgggctgcattatctacagcattgtacaataacaactagaaaaggcggtatacttcactgatgcttgtctggtaatatcacttctgtgttaaaatggaaggttttttgtgatgtatgaaacttgtgttttttatatataaatgagtatagttagattagtgttgtggtaatgcctgttttcatctgtaaatagttaagtatgtacacaacaaggcactacttctgatttttgcagtgttcagtcctagtttttctttattaaaacattgagttttgcttcaattttatgtaccttagttctaagttagatttgcagatgtgtacagatagttcatatttatgtattgcacataatcatgctattcagcattgatgctatattgtattatgtaaataataaaagcagtgtacagagggagacttcttgtttattgggtttttaagtcttagacacctaaatagggaaaataggaaagttttcatattcaaatttatttcatatagctttgtattgcagttgttttgcatgatcattcttgagttcagtcatgg

SEQ ID NO: 25955 - DNA, 1175 bp, Mus musculus
accttgtcttccttttcttccatttaggtttaataaagaaccagacgctccagaaaacactgaaaatgaaggttctggccatagaagacgctgcggacggaaggaagacagtgatgaggacttagacgctgagtctgactcggatggcgaggatggagacactcaggcctgacaacaccaagtcaattgcagagggagtcagaagaggctcatgagcaacattggttatttataacatttgagtaacagaatcttaaaggttttcacagtaacacttaagctgtatatacagaatatgtgtgggcacaccatggcatgttgtataaaacctatagaaattgtttagaaaaacattatgtcaaattattcagtgttgagagttggtgactgcatcagcactatccatggaaaactaagatgactagctcagcgtacatgtctgtaacctgacctcgggtatgtgactcattagcaagagcccccttacatcgcacaaagcaaaacagcttatttttatacacactacacacacgtacaatcatgtgtaatgattttccttcaaaaatgtttttatatgcttcattccatttttttaaccttctcctagtttggaaatatacacttagaaaaatgtgtagactgtatagttactgtctagaaaggaaaacccaaccttcatactggagtggagatacttacagtatcagaagctcctgtgaagttctccctcgaaaggttatccttcccagaattccatcctccggaattatcactttattgccagtgttttcacctgtaaacagtgtaagttagtgtcacgtgattattgaagtctgtgtccttgggtttaaaaccctagagccacagaatagtggccaggtgatatgatgggcttttccacactctagctagagtcataatttcaatgttttactgtgttttctgtgtgtcttaatctctacaaatgtatatattacacacatgtgcatgtacatatgtgtgtgtatatttgctgagccattgaaataaatgggaagctgtggttttgcacttgtgtgtcttgttgttgttataaaaacttggagactgattttcctgatccacacaatacctatgtaaaatgaaccagaagtagagattttattgaagatattttagtttaggcttaaactcaa

SEQ ID NO: 25956 - DNA, 1223 bp, Mus musculus
atcggtgcagcctttaagttacaggaaagagtaaagacgttcccgccccagattgagactaaggacagtgacccggaagaagttcttctactctttccgtcccagccccaggtcggcccacgtgactcattagggaggtcacgctcggctctgccttgccgcacatcctcgactaccggcttcacggaaagccttcctcggacccaaggtgcaagtccggctttcttcgaatctagaactcccccattggctcgaacgcggctgtccatcacggcggagggacggagattccccgttcctattggctcttcttttccgcaatccccgcctcctgccgaacgctcccaacctgtctcccggctccgtagcgtagcgactccgctgcgcagtttgtgattggtggaaggtgggcgaggccggtgccctgatcgcctgcagcccggagcccgggtcagcttcggcgccctcctccagtcactgagcagctcgaaccgggccgctcgcccccccgccccccgccgccctcccagctcccgcccgccgcggccgcgcgctccgccgcctggcggccttcggaggtgccaaggaaggcgggctgcggagaaggcagcaccggccctgcgctgcggacggcgaccacggccgcgcgggacctcgggccggagagccccggcggcggccgcccctcgcggcggagccgttagtcagcagaacgcgaacgcgcgtggaggggccccacgaagcgcgcccgggcaccgcagctctctttcgcgtcctcgccgggccgggccgcgggcgcagagtcggcgggcggcgccccgcggaggacagcgcgttggcggccgcggccgcccagctgcaggtgcgtggggctgggctgctgggccgtcggggggtcgccgctctgagctggggaccaggccgggtggcttcggagcggagctaccgagcggagagccgtgcgtcccgggcctcctcgcccgcagggaggaccgcaagatggggtcgggccgccgctcccctccctggatctgggccacttcgggccctcgctctcggctcggtgtccgggtcccgccagcctcgattttagatggagtccgcccggagcttgagctgggtatcccgctccgcttgtcgcgggagctgctttccatggcttgaacttgtatcatctctgattgagaactcaaggagggagaggttggatttgaattgaaagt

SEQ ID NO: 25957 - DNA, 1165 bp, Mus musculus
attaaacctatttgggagggttcttgaaattatagttaatagtccttgactaccaataatacttacatatgtctttgttattgtaggagagtgcaatgtccacattaagctattaaaatatttgatgtctcttcttctttttcagaagatgaataatctgtcatttagtgagctatgttgcctcttctgctgtccaccttgcccagggaaaattgcttcaaaactagcattcttgccacctgatccaacttacacactgatgtgtgatgaaagtggaagccgctggaccttacacctgtcagagcgagcagactggcagtactcgtcccgagaaaaagatgctattgagtgtttcatgacaagaaccagtaaaggcaacagaattgcttgtatgtttgtgcgttgttcaccaaatgctaagtataccttactcttctcacatggaaatgctgttgatcttggtcagatgagcagtttttatataggtctgggttcccgcattaattgtaacatattctcctatgactactccggatatggtgctagttctggaaagccaacagagaagaacctgtatgcagatgtggaagctgcctggctggctcttcggacaaggtaatggtttttacccttatgctgcataagttatactgtggaacagcgaaacagaaagcatttttaacacggatgctttgaaatgcagtgtgaagatatttgcataattgtattacattaagatagtaaaattttatataatagccaaagtagtcttgacaaacagctcgcattgtgtgtgtaaatgcctgtgtgggcgtgtgtttcaggatcttttttatttaaatctaggaatatttaaagtttctctctcaagctttcttattaggatataatacacacatccttattctgtgatttcactatttgtttgctctggcattgataatgtaagaagccttttgtttgacttttattaaataagacatgttggcattttactttacatcttagtctactaaaatttggaaagatcatcttaattttctttgaagtaatatgacaaaattaatgaagatgtgtctcacttatgtcattctttaacgaggacagattgtatttgggaagtagaaacccattaacttttctgggtgcaagttttatagattcc

SEQ ID NO: 25958 - DNA, 2120 bp, Mus musculus
tagcttcaaactattttttatgttttcctctctgtttttaaccttaaaccagaacaaacccaaaggattttgcttgagttttaataactgatagaataaaataagtgcagtagggaatgaagttagcccaggcaggcatggtccttgggttaagaagcctaggggaaattcagcatcgaggcagcgcttccatgtaagggtggcagtgtccaagcagagcaactgtgcagaggtaacttcctgcagcaccgtagaggtcatggaaaggatggacggcctttggatcttactgaagttgacttccatccctaaagctgagttactgtacagttctaatgtttgaattttctgttctaacacaggaaacttccttttttctacagttcattgagcttttttcctttctcttattctctctagcattgacaaaatctctaagataacctctccagtattaataattcacgggactgaagatgaagtcattgacttttcccatggcctcgcattgtttgagcgctgccaaagacctgtggagcccctgtgggttgaaggggcaggacacaatgacgtggagctttatggacaataccttgagaggttaaaacagttcgtgtcacaggaactggtaaatttgtaaactactctgtaaatttgcagactgggttttcttttcttgctgaactgcactccttggtaaataacataaaacctgaaggttttgtttacaaatcatgtaagttgccttcataactgtacaggtaatgatttgttaacagacttaatgaaggttttaattaccataacttgaaactggaaatagcagtatcatgcagtcaggctgtgtaatttatattttttctgtgaattttttttaaacatcaagatgagtactgtatgaaattttaattctataaaatcaaatgctgtaaaagtattgtcaaatgcttttgcatatcaaaagcaaatttataaatatttttaaacatctcaatgtactaaatatcctggtatacaaatgtaatattctttcaaaaagctgtatatctaaagcaattcaagtactcagaataaactgtaaaaaacaaaacggtttgaaaacatccaaattgagttgatatatactccactgtacagggatagaggcttaaatggttattttattgttaaaaaaaatgcattgacttttctgtattctccaattatagtacatttatcctttaaaaaaatgaagtcttaatttttatgccatctgttaacttagcagctcttcatcctgtcactgagaagtcctgatggcgctggattttaactagttctgacttatgtttggtactgtgagacaactacttaacattttcattcagttatttaaaggacagttagggcttcaagaatgattttgtatgcaatgttgttttaaatttgactaattattagaactgtagtagtcttccttatatgaatacttgaaactccgttagttgatcttcaagaccacagagagactggctgtttggttcctttccacctctgctgtttttaagagtagggcctgttcttttggagtagtatctgagaatgtcatgggttccctcctgaatgcaggggataagaaaacatgccatacattttatattaaccagtatagtaaaaaaaataaaataaataaataaagctcacacacaaaaactaagttgcctttccttgaatgaatcctgcctgaaaaatgaaagaaaaataaaaaataaactaatggtatatagtcttaatttgtaatgaatgagaatcaaaataatacacactgtggatatgtttttaaggccttatgtaattttaattgttctgcttgttctgtggttatgtctaagattatagtacacgatcttcaaagtatatcaaatattgtgaatcctttggttcagctatgtcaaattcacagtaaaacaacaaatgtaccactcggctgtgcttgtgtgccttcttctgaactcctcacccccacagaaagaggaaaagtcacaacaccttcctgaagttttctgtatctttaaaattttgttttaacattctaagtatacatttaagaaggttgctttgatatttccacatatgtgaat

SEQ ID NO: 25959 - DNA, 1101 bp, Mus musculus
gacagcactgtctccatactattgattagtaactaatcaagaaaaccccagtaatttgctgaggtccgggtatctcattacagacggagagttgctggctgcttacacaatctatttcagaccctgatgcctgaattctgccgggaagtaccctctgagttcggaaacctatgcgccaccatggacagaagatgggattgaaagacagatgaatctgactcttgtgtcatgtagagttaagatatgtttctattctgcaatcttgtgagtggaattctaggaatgcgccctaggcttctgaactggcctagggaaacttgagtcactttcccagccgtagcattcagaagctgtcttttgagagacagcatctctcaaacactaaagtgcataagaacccctctggggttttgataaagtgtcagatctgcctctgaggggtaggacactaagtttctgcatttttaaagctctcaggagatgcccattctgttggtgtgtccttaagaacatggcctctgcctcccccccccccccccaaggccagctcggaatgtcagagcagatcaaaacttcacaaagtagatttgggcagaggacccaaaaaccatccgagcgaaatgtaattgtgagtgtgaaacatggcttactttccttgtgattaagggctttgcccatggaggatcgtgagctagtcgtatagcacatgtaaccacttctctgattggacattcacacatgatcacctctctggctgggctttgggctgagtgagcgtgtacagggagtgtgtgacctccttattgactcagcccaaggaagcactaagaaaatgaccaattccagtagagcttactccagtcttcatttatatcacactgtgagattcattaaatatcacttaaagggcagcgcaatacacggtcctcacttgaatatatcatatcatagacactgtcttcttgtggtggtaaaattccttcacaaacgaagcataaatacaaagtgttgacttttagctcacagtcccaaaggaatacagtccgtcatggcagggaatacatggcaggaggcagggaaggcgtggtactatggataggg

SEQ ID NO: 25960 - DNA, 2219 bp, Mus musculus
atttataattatatatatatatacacacatataaatataaaaaatcctgtctttgttttgttcaactctgactcatttccctcgttatcttgtaggaaatagctatacactttaacttttctctccctctctttttataggtagtgtcgtatttttgggattcagcggaaacttcgcaccgtcatggacgaagctgttcaccagtcccgatgagcagggcctcggagtgcttgagcagtttctcccgttgcagatggaggaatatgggtgctcccggaccggcagtgtccacagaagagaccttgacctgttacagcaggctttgaaagtgctttagagacttggttgtaatttaagtgctgggaaagaaaaaaaaaatgtgaactaacttatttaatttatggcattttaagacaacactgttaacccgatggaaccattttcctgtttgatagaaaagggagagaaggaatccaagcagttacctgagtgtcagcttgcaggccttggcactgtgcaggtggtagagcccttttgtcttcctgaggctgctgcgttcagagagcagttggtctcgtggcccttgctttgacaagcacatcgggggtgctttgctttttgtatagtggggtgcagggagtccaagggctccttgaacttgctccttcgaggactggctgctctagcatttcagatacttgaagtccaatgctcagtcctgcgctaactccagtcgctgccctgttcagtgatgtctggggctcatttctgtacagcccacgagggttttatgtgatgctagatatggttttaagtggcaactcaggcccagcacatgtcctttttgcctggtcatgtgctctttttattcacttgtatactgattacttttgagggttcacctttcaaagagggaaccttattgggacaaaagggcttttgaaattttttagatctgtaaccattgaggaaaaaaaaagaaagaaagaaacaacaacataaacctattacttgcatccaggtggaactttttctgcagctttaatccttaacctgtcttgacctttaaaacgcagagcggaactgaattaattttctttaaaagcagcaagccacttcctaaactgtaaaactcttgtcatttgaacttgcaaaagaaagccaggtgtggtggtgcacgcctttgatcacagcactccaggagcaggtggatctctgagagtttgaggctagcctggtctacgtagtgatccaggacagccagggctacgtagagaaaccctgtctcaaaagaaacaaaacaaaacaaaacaaaacaaaatcactctgtcaacaaaagctaacttgcaaaagggaaacctgtccttggttttggtcttgtacctgtgctttgttgtcttgttgtgtggattttttttttttccaagcggctctgctcattgtcctaccagaaaatcccagagagtttcccgcttgctcctccataaatattgtattcaaggaaagaaaggagatgccttcttagggtggaatcatggaggcaatggacatgatcttctttgtagcctttaaaagagggagtctcttagtgaatgtagctttcaaagacaagaagaaaggactctgggtctcccagtgctgcttctactggccctttcttcagccagtggggacacatgtggcaaaggatgctggctctgcagccaagagggaagatggcatcagaatgctgctgtgctgcccaaaggcgggtggctgaatagccaggctgacggtagcaattgagtgcagaaaagttcatcttcctccgtggagggccgaggctgatgcctgtatgttgtgtccaggagacattctaggacagctctgtgacttgtgtaactttacagaacatgctacctcaaagtgctgtgacaaaccatttggactgtagtgctcacaggatgggcacgtgtcttaatcaaagtttggttacttgtttatccgggttttttggatgtggggttttttgtttgtatttttttttctttttctttcattctttttttttttcttttttttttgtacagtgagatcttacctattaaatatatttagtgggtcatggttcctgaaggtgagtgaattgattgtgtgtgcagatgtgtgtgtgttatgacttaaatatatttgttttgtgctgttttagagttccttttttatatatatttggagaaagt

SEQ ID NO: 25961 - DNA, 1125 bp, Mus musculus
gtgactttaagacaagctctatgaatggcaaagaaaagtctacactgacaacatgtatgcttttgccactgtacggggcaatatacaaagagggctgttgacatctgaagaaaaagacctaagatgctgtggctaaaaaaaatcaggtggcagatctaaccgccaatcaggtggcccaaggagcaatgatcctggcagtcaaggagcctaaagatgattataacatcagagagaccagctttagatacaccgctgagcactatcaagctatggacagtatttgacttggcctgggggccaagaaattcaaaggtgtggttaggtcctttgacaactatgttacaggactctctgacttggcagaagaaatagtcaaaagctgcaaggactgtgctatgacgaggtagaatttctaaaagaaaccttcccaaggtaatggacctgcctttgttgcccaggtaaatcagggactggccaagatattagagatcggttaagagttacattgtacatgcaggccccaaagctcaggacaggtagagagaacgaatagaaccattaagagacccttaccaaattgacagcggagactggcgctatgattggatagctctcctaccctttatgctcttcagggatagaaacacccctggacagtttagactgacccccctataaattactctacaggggccccctccactggtaaaaatagcctctgtacatagtgctgacatgctgctttcccagcctttgttctctaggctcaaggtgctccagtgagtgagacagcgagcaaaaagcagctccagaaggcctactcaagaaaagaagacctgggctggtgagatggctcagtgggtaagagcacccgactgctcttccgaaggtccgaagttcaaatcccagcaaccacatggtggctcacaaccacccataatgcgatctgatgccctcttctggtagctctcttcagacagtgtacttacatataataaataaataaataaataaataaatctttaaaaaaaaaaaaaaagagaagaagacctgctacattagacgtctccacgcagaaaaccttgagactccggtggaaaggcccttatcttgtactcttaacca

SEQ ID NO: 25962 - DNA, 1769 bp, Mus musculus
ttttagagttcatttttaaagaaaatagattgtttacactgttaaaattgggttttgcttctcaaaattgtggttgtgctctcatgttacaagagaaattgaaggcttctcctgaattggagccaccagctaaatcggctcctctaaaatctataaagcctcctgagtggcctagtccacaaccttccccttatccacagcctcgaccccagccgccaagggaaccccaaacccctcggggcgttgagaggtggaccgctgtgagtacatggagccacagggacccgcagagcagagtccgggcggactctggtggacccgcccaaactttaaacccttcagtactggtcattttcctctgctggtatttataactggaaaactaaccaccccctttctcaggatccccaacgcctcacagggttggcggagttccttatgttctcttatcagcctacttgggattactgtcaacagcggttacagatgcttttaacaaccgaagagcaagagagaattctgttagaggctagaaaaatagcctgggagccaacgggcggtctacacagctacaaaatgagatcgacatgggattccctttgactcgccccagttgaaactgcaacacggctaaaggtagggagagcttaaaaatctatcaccaggctccggtctccaaggtgcctcaaaacgggcccactaatttggctaaggtaagaggtaatgcaggggccgatcgaaccttcctctgtgttccttgaaaggcttatggaagccttcaggcggttcactccctttgatcttacctcggaagcccagcaggcctcagtggccatggcctttcataaggcagtcagctcccgagatcagaaagaaacttcagagattaaaaggtgtattacaagaaagagacagttatgcgatctagtaaaagaggcagagaaagtgtgtgtgtgagagagagagaggcaggaggcaaaagaaagagaaaacaggagggatagtagacaagaaagaaatttgccacagtggtaggaaaaaaagaaaagacaggatctagacaggaaacctgggcaactgaagaccgagcctcagctaaagaggctcagctgtgtcagactgaagtgacttatttgggatacacccttcgaggtggaaagcagtggctaaaagaagccagaaaaagactgtaactcagatcccctccccaactacaccaaggcaagtaagaaaattcttaggtactgctggcttctacagactctagatacctgggttggcgaccttagctgcccagttgtaccccctaaccaaggaagcgaggtgtttgtgtggaccccagatcaccagaaagcctttaaagagattaaaaaggccctactgatggccagcctatgcctgacctaaccaagcctttcactctttatgtaaaagagagagcaggggtcaccagaggagtccttactcagactttgagactttgaaaaaggccagtgacttacctatccaagaagttacaccctgttgccagcgggtggttttcttgcctgaaagctattgctgccataatctgcttgtcaaggatgctgataagctcactctgggacagcaaataactgtagtggcatcccacactcttgaaagcattaccaacgctcctgtgacacatcagagctttttgttgtctaaatgagtgatcttcgcttcattccacctgctgtcccactgcgtgagactgcacctactcatcactgcgctgacattctggc

SEQ ID NO: 25963 - DNA, 1236 bp, Mus musculus
ttatttctctttacatccgtcagcagttcctaggactggagagttgcagtgtgtcataggcctgtcctggtgccagctactgcattagggactccacaaatgctaattgactttccctttcctcagtcaggccagaagaatccaacagagtccctgaccctgtctttgtcacgcacttaacggagaacaggggaatttagatagtcagtataatctgattaggcataactgctgtccacttggcaaaagggagtgagatattttgatacttgctagggtttggaatcttaaatctgctgaaaagaatccagtctttttgtgtttgccctgcttggtacaggagtcccctgccctgtatattcaattacttcctgtataatagaaccacatgcatcatacagcgttctttctgaaggtgaacattttgttcctcaggtggcctgagtgactttgaagtgcttgtcagcagctggctttcctgtgcagtactgtaaccattcagttcacagtggcattttacttcggatgccctcattcacaatattaaaaagggcatgcagcagccttgcctctttgcttcaggaactgtgcttttgggcagctgaggcccatgggctgctcaggcaagtcactggtctgtgtttaagaactgtttcaagtttagttggctggcattgactagtaactataactactgagccccatcaaggcggtgtggtcctctttcatgtctcgttccaagtgaagcactgcgttgacagagctggattcccgaggttattctatcactctctttaccagtggcaccatagcgctttcccaccaggcatgcaaactgactgaggtctctcacaaagtcagggaaagaaacattgaaggcaacttcatctagcttgaccaaatgcttatggcttctgactgataggctagggatcctaggctctcctcattcttctacagcaatgatatctggatttattttttatcaaaatggctgccagaaaccaggagatgcgtgagaccttctgtgatttgccaagaacagttcatcctttggctatctagacaccatctctgtctgatctcctaactcagccaagcaaagagagggatggtccaaaatgttgcaagaagggtgacaatggagacacagaattctccaggtccagcttcagtttcttaggtttttgggcccttttataatttccttttaggcctttctagatcatgaggcaa

SEQ ID NO: 25964 - DNA, 1167 bp, Mus musculus
acctcattggacaacacagcagagctgatcctgatggtgggggctcaggccagccagtcccgagggaggccgagagcatgggagagctggtgtgggtgcaggcattatgcctcctctcacctgtggcagtcgggagaactggctctggggtcatgagagcaggtgagatagccctacaccctcactgtctgccgcacttgggagagtgggccctgcgtttctcctggacaacacggtggagctgaccctgttggtaaaggcaccgttgagccagtcccgagggtatgagtgggagagctgacccagtcccttgaaggctgcagcacttggggtgggggtggggggtagtccccgtggcttgactggcagtgcagtggagctggctctggcataagagcaggagaactgaccctgcctcctgcagatggaggcactggtggcctagcaggaacagtgctagagagctcaccctggtggtgtggataagggagagccagcaggctgaccagctcagctaccaccaggctcagactcagggctctgagttggcccactccaaaatctgtatcaactactaactgttcggatgtgtaaaagggccagccccacaagcccaaagctgcaagatctccataacacagggcatcaacaggatagcttggagtcccagcgagggaggatccaatattcatggtgccacagaagcctcaaaccagacctacgactcattgcaatacaatataattgttcactgcgttgaacttttgcaactgaagatgtgtggacagagggacatactatgggacacactatagctttcacaatgagagtttttctatgcttttttgcttgttgtgtgtgtgtgtgtgtgtgtgtgtgtgtgtgtatgtgtgtgtgtgtgtgtgtgtgtgtgtgtgtgtgtgtgtatgtgtgtgtgtgtgtgtgtgtgtgtgtgtgtgtatgtgcgtgtgtgtgtgttttattttgaggagagattgaaatagtgaaaggctgatatgaagggaccagaagatgagtgggactgggatacatgtcatgatattcacaaagaatcaataaaaagttaaaaaaaaattaaaagatcgagttccacataaggtgacataaaaccaacgtccagtgacgtgaccatgtaagctatctggg

SEQ ID NO: 25965 - DNA, 1201 bp, Mus musculus
ctggcttctattcatgagagaaatggcccccgtgctggccagtaagaaagctgttgttctctggctacaccgtctagttgaaacctgagggtatatttgcagccagaccaatgagagacggccctgaattcttgctggaactacctgtagctgctaagctggtggctgtaatggagcttcagggaactgtcccaccatcaccttcggaaggcttgtctgatgagggggctgcaccaaggacatttgagaccgcagtagattctgtgtaacaccgttgaggattcccatccagccaatattgtacctggtagagcatcaattgtctttgctttaggtcgattttcctgagcttcttcagctcatgactcagagctccaactctcagcggcctccttcataatctataccgtgctcatgcttaactgcagatgaataatagctcaaagcacactcttctggcatctgtcccgaaacagaccccctaatctaattggcctagatggatccctcgtctaaccctcgttgcgttgcattgaaagtcaagattaaagtgagctgatgccttcctatggttcagggtatggatgagtgggtgattcctgtctattcctgcctggaaacctgtccgccgtacttcgccttttgatgacaccctgaagtgttctcagcagaactcagtgcttcccagctggctctgttagtttattggtacatgaagtttgcttagcatctctcctgaaaggagatgtgatccttatgctgaggcatggtttagagtaatgtgctgatgagcctgtagtggacttcagaaccgtagagctggctaggggctaggtggcaacagggaaggagaagtgtcaccttcattttaataatgcctctgtgtgagtggtggcctcaattgcatgctttgtcctctgacaaattcttactagtgcatcagtccatcaatcaatgacatatacttaataagcatcaactggagacccaaaccttttattaatattgcatagctctaagccagtagtagcttaataaatacttccagtgactaataaggtgttgcagctttgaagtcactttgagatgaaaatcaaactaatagacaaaaattcttggcttctaatatgggactcatctttacctctgattcaagaaatgaccaaatgtttctcagctagggtaggaatgttttcgcccc

SEQ ID NO: 25966 - DNA, 1239 bp, Mus musculus
ttcttcttcttcttcttcttcttcttcttctttctctctcttcctcttcctccctcttcctccctcttcctcttcctcttcttcttcttctttctccctcagactaatgtatttgatatcattcttattctagtttgcttttctgttgctatgataaaacactcaaccgaaagcaatttaggggaagagaggatttatttcatctgtacttccagttcgtagtcctatgttgaggagagtcaggacagggaattgaaccaaaaccatggaggagtgttgcttgctgtctcactcactggctcatactaagctagatttcttttacagcccgatcctcctgcctaggaatggtgctgcccacagtgggcttaatcctcccacattaatcatcagtcaagacaatctcttgtggacaattcctcagtagttcagatttcctcttcccaggtaactctagattgtgtcaagttgacaatacaaactaactagtacaatttttttaatctgtatttttattttttatttaaactagtaacttcttttttttttctcaagtagcaaataattgctcagaaagataaacagttgacggagattcctctggcccaagaattctaccatgttgcccagaaaagggaggcctggagactatatcaggttagtacagatgtaatttaaggacagaagagcatgtgtattcatatctgagtcctgggagcctgggaagacagggagatgaagctgctctgagtgataggatttattacagaggacgacagcactatttgctcacttctgttatgagctcagcaaaatgtgacagttctgagaaataaaaatatatatcgctctatttatatgtgtgtttgtctcgggagacttggcagtgagtggtgggaagggtttcctgaagatagagtgggcagagcgaactgggcaaagtgaagcctgtcctaggcctgttgatgcctagtgataaacacccatgacaggaactaatattgattgaacacttaagtactatgtcaggtccctggctcagctccttacacgcacagtttaattccacatgaattcacctgctatgtagcaattggctcttctgcataaccttgcatccttttgtcatcttcctgcatgcagtggactgcccttaaacttcctgcagcctacatagatctctgatggaatacagaaacaatggaagcattctgtatcttagcctggacaggaagaaaa

SEQ ID NO: 25967 - DNA, 1181 bp, Mus musculus
tgctctaactctggatagaaaacccatcttctggttatatccctgctttcattttctttgtaaaattcgcagggatgaatcaccagtgagtcagaagcgagggattccaccttttgtagaagcatagagtctcctggttagaaagctgggggtggtggcacatgcctgtgattccagaactcagaaggctgagacaggaggtttgagaatttgaaggtagtctgacctacatgtgagctggaggtcagcctgggctatatgaagttatctcagaggatcgaaagaggggagacaagccaaataaacaaaaagatgtctgaaaaagtcagctggcttactctttcttcaaagaaaaattcctgaaggaattaataagaatagagattctagagccccacctccatgtacaggaatgaaaaagaccaaaaaaaaacaaaacaaaaaacaggaatctgtgttttaaaagtccccttgtgtgccccttttaggtttaaaaactatggtttatatggaaatgttccaagttcaagagacagaatattcatggcagctgatgagggccagaagtacggtgtaaattaataggtgatggactcagaaatctaactcccttcaaagagtgaatgggaaatggtgaatgttgttgttgcaaacccctgtatctcttggattggtcattgagtcttagaatagaagctagaaagaagccggtggagagtgaagctcttgtctaaccgactgtcctgagctaggtgtctccccacttctgggcctctgtttacttatctgttgcaagataaactttctttctttttgatacagggcttgatatgtagccctagcttgcctggaactctctgtgtagcctgggctggtctcaaacgcaaggagatccttctgcctctgctggaattaaaggtgtgtgctaccaagccccgaataaggcagactttatctcttgagttactttcatgtagttttgatgcaaatgtagtatcctcagaaagagtggggagtttttgtttgtttgttttgttttggctttttgttttttcttccttccttcctttttttaaaatcatgttttgtcgaacctagtattttcctgctgactcagttttcaatcttaggccaccctcagcagtgaggatgttgggccttattctccaagtcagtgtagg

SEQ ID NO: 25968 - DNA, 1182 bp, Mus musculus
gaaagaacttttaaacatctaagtgctgcattccaaacaagaacgaattgatgctgtctcatccgagtctgtccttggacaacgtggcctgccatatcgagggtttaaaatttgactcacacttagtttattaagcaccccgtccttccatctatattttagagttagcaccagcaacacaaatatgaaaagatctgtccgattcacttctgctccgcaggtttacaagtgtcgggcgcttccttttggaacgcccttctgattggctgagccaatgccagtgacatcaaccaacttacttttgattggaagcctggttgctgggactgtagcgtttgcaggaagtcacttaactgtttgagggctgggaacccgaagttgaagttctgtttcgtccctagggatgggcgtaactgcctaggggagaagcgttcccaagccacgccagctggcacgtgggccgggaggcgtaggcgcgcgcgcggtctgggcggcatctgcggggatgcgcagccgctggttgccgggctccgagcagtttcccttttaaatgtcagcgttcggggctggaggggcagcacgcggcggcggaacggaacggtcggattggccgcgcgccgtagttctagacgcacctctccaccgaagggcccttctgactggcagggggagaaagtaaacagagttgaatcaccctccccactggccaattggagggggcctggattgtgacgtgatgggattctgcgaaattgttactgagctggagaatgccggagaggcgcggcgcggcaggaccaggggctcagcggccgtcggcggacgcgggaagaagtgtctcgtaggcgcggagccccactcagccccggcccccctcgtccgcgtactcggctgatgccccggggcgtcagctcggcggagaggcggtcgaggacgtgcgcctggctcgcagttggctttctctgggactccgacacgtttgcagtcgaataaacttgcgaccgccacgtgtggcatctctccgaggagggcgcgcccatcgtgggatcgcgcggggcgccgggcagggcggcggcgacagcggcggagccggccgcggctgctgcgtgcggaggcgctgccggttacgtaaagatgaggggctgaggtcgcctcggcgctcccgcgagtcgcaagctcccg

SEQ ID NO: 25969 - DNA, 1151 bp, Mus musculus
gtggctgaagtgttgtcaccttctctttttgtaagtacaaggaaaccctgtgttctccttcttaaggaggtgtgtgctctttgccacagtggtttttcgtttgtttgtttttgtttttttaaagatttatttatttatttatttaatgtatatgagtacactgttgctgtctccagacacaccagaagacggcatcagatcccattacagatggttgtgagccaccatgtggttgctgggaattgaactcaggacctctggaagaacagacagtgctcttaaccgctgagccatctctccagcccttgccacggtgttaatggggtagatttcataaactgcttccttcctcccagatgcgtttccagctaaacccgactgagtcgggaggggttgacttgccaatggaggtatgtctccactgttttcccattataggtcccctaaggagacttgagatttgtttttctaacaaatgcccaccctatacctaccctatggtgtcttaacactgagagcatgaattctagagctacttagggactgtgcccctttagaaggccacagatcattctaatacctacctaagattgtttccatctatcagaaccaatttttgcccacctggggatgatgctaaccacacacacacacacacacacccgtgggaatgtctagccccattttcaagtgtcttgagtggatcgtagcgaggtgagtgcagagccatgttcagcttcctgttgagaagataggttcctgagtttgttgggttcttggggtttgcttgtgaattgcagaccaggtatacgtctcttgagtctttgggttatttggcctagcagaaaaatcccttcgagatggagacccaccctggtggtgcttatttgtccctagtctggaagagaaggagccctccttcatctcttggctgccccatctttgtgcctcagcactgacaaagcagggtggccttgggagcttcagaagctggcgaggatccctgcttcacagcatgaaatgcaaatggggtacaattatgaaaaccacgtggttgttgtttccctggtttccctctcatggagtgtgagtgggcctagggttggaggagggaggagctgaggaaagcagagccctctggatggtagcat

SEQ ID NO: 25970 - DNA, 3155 bp, Mus musculus
atatggaccccatggttaggcaggacaactatacagtcacattctgagatgtgtgtattgggggttaggatgtcaactgagagtgtgggggatctggggtggggtgggggaatacaacagagtccgtaaaactcatgacagagtttatccttagtgtcctagggactgtcacccataggtggtcttcagaatgcttttgacataccctttcagcagtgctatgtcttgatttccttctcctaggtgaacggccctttccctgcacgtggccagactgccttaaaaagttctcgcgctcggatgagctgacccgccactaccggacccacactggggaaaagcagttccgttgcccactgtgtgagaagagattcatgaggagtgaccatctcaccaagcatgcccggcgtcacaccgagttccatcccagcatgatcaagagatcaaaaaaggctcttgccagccccttgtgaggtgctccccatggcagccaggcagagatgggtccccggaaggacagagctcccaggaaacagactgacacatggaaatctgccacagcagaggcgcgctggccacaggaggtcactgcttctttggccaatattctgatatctccctgcactgtttccaaaaagcacatggtagccctaaggtcaaagtcaacatttggtccccttgcagaggcaactctgaaccgtctctgactgttggagggcaggcaaataaatgcttttggtattttctcctttgtttttgggggaggggggagggggcaaggccaagacgaggggtaggattctgaagattcagactggtggtgtacatacgtctgactgggtgagttgacccctggcctcccacagtgactctggatccttgatgcttgctgactctcagaattgttttttcttctcatttaatgtaacgaccggtgtgcttcagtttgtttagcagaaccactctcttgaatcacattaacttttgagatttaaaaaaaacaaaacaaaaaaaaaaaaaacaacaaaaaaaaaccaaccctccatagcacagctgtcttttatgcaagcaagagcacacctactccagcatgatttgtcatctaaagacttgaaaacaaaacaacaacaacaaaaagttacttatagtcaatggataagcagagtccgaatttacactaatcaagacagaccttcgaggggtcacgataagtccggaactttcaaaccttgcttcgtatgaattgtactatctgaacataaactgcacttttattttctaataccgagggtgaatacggtaaatacatgctttgagggtagaagccgacggtctgtttggcaccacgttataatctgcttattttaacagtatacacatttccctgagaacctatggcaaagatgggagggcagaacatatgaaacacatgctgacgagggggaggaggaggggagtgcttttaaagataacaaaaaatgagcaaacaattttaacttcatgaatttgtttgaattcccccatgctttctgataacgccgtctcgttccacgctcgggactaggacagagcgagagcggtcggctggctctctgtagcgttggttgataaatgggtatatagccatcaccaggcctggaagtgccccccctttggtgggggggtgcttcttggtctccttatgttctatgaaattcccactatgaggtgcaagagttatatcaaaggaagctgaaatacgaaaaaaaaaaagtttgcccctgtaagtagtaagtgtctagggaaggaagacgccacaatgaatgacttcagaggccactctgcagaacagtcccttctggtgaacataggtcaaagaaacgcacgtgaatggcatcacatcactgtctgcatcagtatccctaccactacttagcttgtatctaggtgtctacacaatggcctgaaccactatatccatcctttgccatttactgaaaaacttagttttggcttttacatggccagaaaaacaaactcagttttcatagttaaaaaacaaaaaaagaaaacaacaaaaaaaaagaaaacaaaaacctcatttgaggggagtcagcagtgatcatggggaaatgtttacattttttccttcagaaataccactttctgatgattttatctgatatttaaaacagggagctatggtgcactctagtttgcacatggtgtgtaaactcggggttcccacctgcagtgagctccacatttcacccagcgcatgctcacccccatctcagcgtggttgctcctgcagtgggcacagggcacagctgactccgacttccaatacgacagccatcactagcgcagtgttttctgtttaaccaatgtagttgtatcagtagttctctcagaactgcttttaacattagggactgggagcagtccacgagctaaaaaggaaagtgttttctcatgagaaaacatgtcaggaaaaataaagaacactttctacctctgtttcagattttgaaacgcttattttaaaccaaattttaatttctgtgtccaaaataagttttaaggacatctgttcttccatatgaaataggttaggctgcccatttctcccgagctcatgggaaggctgtgcatagggtactctgagcgctgccttttagtgagtgaggagtttggggttgcctagcaacttgctaacttgtataaactcagctttccctcaacagaaagaaatgaaggaaaaccaagtcagtgaaagacaatctttattgtttcaggagtaaatctgtatgtggcttttgtcaaacacttaaatggatataaacgcagcaacttgtttgaaaagatgcacaattaacctcccggaagagttgctacttgccttttcaagttgtcaaccgacacacatttgatattctcttagatgttatagtaacgtaacgtataaactcaaggctttttattctttgtgataagtcctgttttacgacgtcagaaaacaggaaccagcattctaattagatttactacatggagatatggttcaaataggactattagagttcattgaacactaaaactatgaaacaattactttttatattaaaaagaccatggatttaacttacaaaaatccaaatgcaggatagtaattt

SEQ ID NO: 25971 - DNA, 1274 bp, Mus musculus
aactccttggtttagaaaccaaacctccctcacacgtttcaaactagcagtctgtcacagcacagttcttagccataggagtttgagaggtgttttcagtgcacactcttccacagtgtacctaggaagtatatagtcctagctgacttgtaaatagagaggatttccgggcaactggatatttcaggtcagtaattaggccaggcttcagatatgcttattggagagctgtcaatctggcaagttgatgaattggaacatatgtaaggctgaaaatctgtttgtcggtatatacttgaattatatggcaatttgtttcaatccatacagcttctacagaatcttccttattctgaaaagatgacagtgttgtttgtctacaatggtcctcatatgctggagccaaaccgatggaatttaaaggcttttcaaaggcgtcggcgaaggataacctttactcaacctcagtgaaaggaaagaacaggaggggcctttggaggtttttttcctttaactgtttatatgtgtcgctcgctcaagtgaataaaagttagcagatttattgaaagagaaagattggttatttttggaaacctgcttttaaaaacaaataggttgatgaagtagagaccacagtgactctgggacattttctagtgaaaactgagtcttcacttttggtggacattgcctcgttagttctctgtgagcacgggattgttgtgtgcagctttgtgctgcccctcaggtgtggtggcccacatctagcccagcgtttaggagtaggaggcaggaaggttatcagtttttgagtggtttcatgtgtcataacagaaaaggctatttcctgttgcaaatcgaaggtatggcagcgtgggatttcagtcagagtgtttactaactacaacagtgctgagtgcagaacattgactgagagaataaaggcaacccaggattagaaatcccacttttcttccagtattatatctagttcttacaaactagtatgggaatggctgcttaatagatagtgattgacagcagatctgttcatttctttgtttaaaaaaaataaaggttcccttattttcatagaaaatatgttataggtaacatgttataggttacttcaaagaattgggaaaacatatgcatgaggcttcaaaatgacaggaggactttgagaggtcacaaggtaaagatgatacagaatgtggctcagacactggcagggtgagatcaggtgacaggagttagcgtataagtgttgtcgt

SEQ ID NO: 25972 - DNA, 1134 bp, Mus musculus
tttgatatagtctcccaaaagaagctaaatggtttcaaacttgggttgtcgcttgacagaatctctcactatgtagccctgactggccccaaactcacaggtttattttaaccaggtttttaaagccctgcctcctgaatgctagaattaaagccttgtgccaccatgctgagctcctgtggtcttattttacatctgcattgttacttttccattgtaagagttttccctctagaagttgattatttcaagtttacagggttgagtatagagttaggtgataaagcacctacctagcataggaaagaccctggcatggctcttcagtcctcgtgctcctaaatatatgaataaccttacattcataatggtagctggcttttaaatgaattataaaagggttgtggacactgataatgcaaagtaacaagaagattcatttacaaagaaaagggttttctcttacttctgcttaatgatattgctcctttacaattcagaacatatgacatctgtgaagtgtctcctgggccccatctgaacatgatcattggagccaatggaacagggaagtcaagcatcgtgtgtgccatttgcctcggactcgcaggcaaacctgctttcatgggacgtgcagataaggtcagttaacagagtttcctctttgctttttggaatttcaagacagggtttctctttgaagcggctctgactgtgactgccctggaactacatctgtagaccaggctggtctcgagcttagagatctgcctgcctctgcctcccgaatgctgggattaaagttatgtaccaccatgcctggtttatttaaattacataattttaaagaaaattcagaaccatttgtttctagaaacaagttaatttctgtattttaggttcttacgtataccaaatgagctttcttttacctaaaacttctagacgggcactgatagtctcgggagaaagttctggttacttctaatattgctctaaaacaaagaactgataacagcaatcacagacagagaaagtttcttcactaaaaaagaattttcaaataatcctgatgccttaatagggaaatctgtcagggttgttagatacctggttagatgaaacttggttgaa

SEQ ID NO: 25973 - DNA, 1101 bp, Mus musculus
acacttgtgcataaacaaacaaacgaacaagtgcaatagagatatcctcagaaaggaccaggtcgaggtcatgaaccccatccatctgtagtccggaggaactgtctaccttgttttttaattacttgtaagagtctaaatcacgttggtattttgttttatataataatttatggtgaatattgagccttgactgtttctacttcatgttagagttagaaccgcaactcaatgatccaagtaaatgcttattgaaatgcccttagagcagtgcggtttcctcacacaccagcctgggcaaggggtgaagtcctgagatctctgtcagtttcttttccagcacacagttgtgggttatgagatgggtgtgagctaatactgtttattagtaatcacctcctttcacctgagaattttgagttttgtcatgattttctttctcccaccccaaccccattgcaggcggcacgttttctaccttcagcatcacttaaatggcaggctccctcccaacctgactcacctgtcacctgcagactgccctgggggcgctttgaatgactcgctccagattccaacaagccctcaactatctcaggcaatggaagtggacggactgagtgactctagcaagcaaggctattcccaggaaaccaagcgcctgaagcggaccccagctccagactccctaggcctggagatggagcacaggtttattgatcaagtattgtccacttgtcggaacgtagagcaagtcaggtatgccaatgcatacaggaaatggctggtgactctgagtcagtgaaaggggtggattcatcctaagaaattccctttagtgcaatattgcttttctttctcagtgccatagttgcatggactgactggctaactgtattcttcatctgtagcttaaaagtctataagaaaccttttgttttatttattttgttaagagccggcattcctttgggtatgagataatcgtatagttccttcctactaaatagagtcttaattctttttttttttttcctctttgacccatggctctctaggtccatccttgggcttctcatttgtctcttgagattggcttac

SEQ ID NO: 25974 - DNA, 2091 bp, Mus musculus
ttggctgggtgacacttaggaaaccatgaagaaatttttctactggccccaggagatagatcttactctttgggggcaaagttgtttttactacctttattatttagatgataatatatttgccattgtgaacataattccataaccttctatatacaaagcatattttgaatcattaaatacctcaggttctacatgaacctctataggaaaaaccattacatgatgtgtaggtcctctgagattgagaagtgacacaaatgacatgcagctcctgtagccggaccctatctcgactcagtcttaccttctcttctcagcatccgtcttatgtcccaagtaatagggcttacctttgatatagtatgtgtcagaacatgaacataggctatgccttatgaacatcagctaaatttttatagtgcttcatgcctttttatatctcctattcagcatcttgatcatctaggtgtcagctgccttcttctaaggctcggcccacaccttcccaaagccgtagagtcctctaatataccgtgattgcatcttcctagtaaagttggaagtaggtagtaaaaatgcaaatagcgaaaagatcctgtttctgtgtgggttttgtatgctacattatttctgaaattagcatttttgagtgttcattcacaggacttaggatttctctggaactttcccctacgcgtttggcattcacctttactagcaagctactgtgtctttgaccaaatgaattcatgcagtagaaaaggaaaatatgtctaatttaggggcttgtttagtcatattcctcaacacatatcttactgttagaaggaaaagatagtttgattggcacattgcatctggttttactcctgtggatcaagaaaaccactgacacacaacaagcagtaagatctatgatcttcaccataaccccgccctacatgtctttgtttttaaagtctattctggtaattgtcttgcccaattatattcatatgccttgcatatcaaaaggacttagtaactatctattaatgattaattagctctttgaagaagggaaagattgttcttgttcataaatgatggaataatgatcaggaaattaatgagttataagtgagtgatgtgggctagctctgctgttcttaaggagagctcccatgtgtaaaaatcagtgagatttagatttgctgtcttcattaccttgcttagatttgttaccactcagctgtgaggtggagcgctagaattctcctagctgttctttatctacactaaaaatcctcagtcaataaaatccacttgataggattattgttttctttcactagacagtgttggagagcagatcttgcatatagcaccagaggcacatctgatcagctgggataattcttggcctttagggacttgttgatgtgcatttgtgcaggaatcatcctgatccccaacttgaactgtggaccttgtagggactccttgaacctgtctgtgtgagtcgttttgtaaacctaaggcttttataccttcctgtagaagctttgggcccagactttcatcaccttttcttactcgtatggcacagctctaacttaagttatgcatgccattagtactttcctctttgtttttgtggtgctgaggctcaagctgagatttattatcagtcatagaagtaaatgtgtacagattatcaccagaagccacttatagtttcaaataagggctatgtaacatacaatgcagaagcgagcttttgagtttatgtgcagtggtctgtagaatgcatatgtggtagacaatgttagttcagtaatgttcagctcctcccagttcacactctctgtgtgtgtgtgtgtgtgtgtgtgtatacaaatagtcagtcctgcagttttatttagcacaagatggtgtgtgacatgagccaaatgcaacttgagagtagacccaccagggaggagcctctcccttggctccctaatggggttagggaagactcagctgtaaaatgaagagtgaaaaatccgtcccctttttcttcctccgaaaagctttttgggtttactgttattttcctactcaaaa

SEQ ID NO: 25975 - DNA, 1152 bp, Mus musculus
cttagctattgctctagcatcagactaacttagctctcaccaaggagacagttgccatctcttctctgaggaatatatctgtagtgtgatacgttacacagtgataaatgctattacatgacatgaattattacacttgtttttttaggctggctttagaaacataataaagatattatttaacagaaccatggcatgaaaacaagagttagaagaagtttgagcagtatctccctgtaagaggcacatttaataaatgtctcaaggtgtcagcagatgcagaaccatgctgctctttatatattggcatattcaggactttatactttatttcatttctctctaattctagttgctttgcattgtcttaaaggtgataatgataacatgggaacttaggctgagtaacttcatataattttctcagaatatatttgacatgaggaagaatttttttatcagtggtattgtagtttagtttgggtgcctattctgagttgacctgatgtagaagattagacagttttgaaacagacattcctacctgacccgtgaggaaccaagtgtagtgcaagtgtgattaggctttggcctctggtgagctccctggtgcatggtcctgtattggctgtagtcactttgtacttttgctgtattttgttctagaagagtaatggggtgtacactagactagatcacattactgtttctgagctggaaacaataaaaaataaggtgtctaagtatgccaaatatttatatactgctataaaagctaagaggaagacttttcaaaagtacagaaattactttttctaaactccagtctttgtatgctagttaattgcttagttcaacattataaaactatgggactttcactgaagagaaagatctcagatactatatattctattatcagaattcaccatctgtgttagtttacattgcttgtagattttccaaaaagagccttcagtgggctatagttaacattgggcacattagtgtaatcacggtacactgtagatcccagacattagtgtgactggcttgttctcctgggaatagctgtcctcactgacagataccactttgcctggtatggcagtctgtatcgaagttcctttagctcttagtatagcaacccac

SEQ ID NO: 25976 - DNA, 1256 bp, Mus musculus
ttgtacaaaggtatgtgcaaagtacacttgtggtattttggggtttagtaccccaggatgattaaattatgctaaattctaagattatcacttggacttttggctaagattaaatgtaaattctaagattaacatatcatgtattgtctataactgggtgttcaatggaaatgtaatgtgagccccaaaggtattacaattttctagtagcaatgtttaagacatataattaacttttaataacatatcttatttaacttaatctagtaaaacacgctttcaatattcatcaatgtaacaaaattaaggagccatctagcgccttttctccctttatattagtcttcacaattcaatgtgtggtttgcactcacgctgcccctccactgcagccatgtttcatgccctcaggctccacgtgtggccaggggctgctgctgcagacacaatgcagatttataggctacaaagtatgaatctgtttaaatttggaggtgacagatggacatgaaatttcgatcctttaaggattgtttagaaagaaatctaatgaagttttccttcattttaagttaactttgttctagaaattggatcaacctgatctaatttgccaagcattatttgaagaagaaatcctgtgccatgcaaaatacctctaggattgttgtaaagtactgacggtagaatagtgacagtcttcggtcttcactaaagtctgtcctgtttcttcaaagcataccagcttgagttgcatgcttagtgcatatccggacttgtttgcttcccattattcttgttatataatgatgtatattaaccagcagccctaggattctaatctatgcagctgtctgccagaacataatgatgtacctattaaatcatggtaaatagaagagaaataagttgaaccatttctttccccattagaattgttttttaacatgtggccatgtaccaaaccagctgtaaattagtgtatttctgtagaatatggaaacggtgttgtctttgatgatgtctgagtaaacgttacctctcctaaagcaagcgctatgtgtgtttcatctccatgcatgttaaacttggctgcggttatctgtcaagatgcccagctgactgctttgattgtgttagatggatgaactattgtctgaaaaaaaaaactgacaactgactatcatatatatacaaagcatagaacattaaaaatcaaactcagagaaactacattgttgtttttaaaatatatt

SEQ ID NO: 25977 - DNA, 1314 bp, Mus musculus
tccatcctgggaagggtgagaggcctccacattttcctgggagttagaacggggcatccgcctgcgggccatcagcacgacgatgttgccaatgtctgcgatgtaggaaatggtcctcagagggtggtccatcataggttcctagaggtgaagggcagaggaggtgagtctgcacacagaaccttaaaacttctcagatgcttatcttcttccctcataccagctgaggtgggccagggacaagcttcaccgccagacctctgagtcctacccccaaggcctgaggaagtgtccttggttaatgaagagcaagagctatgtgcaggagaaaagcaaatatcaaacattttacactgtgtagagtctccagtggtgaagctggaaagataaaatctaaatttcagtgtgcttgtgtatgtgtgcatacatgtatgcacatgtaggcatgtgtgtgctgtacaattttaaagagacttccttaaggcaaatgagtcctccccagagaacccatggagtgacttgagtgagatacaacacacacattctgagttttcctttgtacttaaagaatgaatgtgacctttgagcccaccatagccttgagtttcactggaaaccagtgtgtgtgtgtgtgtgtgtgtgtgtctgtgtatgaagtcctaactgaatgcgtgtcattgacatgaacacagttacatcaaggatcccaatgtctcagactcacggggatggctaagcttttccctggcccatttgtagataaagaaaaattgcaaaccccagttttgtcatccccagtgtttaaagcctgagactgctctcctagagagaaatcctactgtgagagtagctaaacccacctccttgttcagagttatgcacactgagttttgaggctgctgctggtacacctccatgagatctggtagagcatgtggcctatcagatctcagctactgtctgtgtgtctgtcctttcttcattccctcatcaccccctgtcagtttccaggacccagcatgcaagttgtggcaccccaatgcctggggacgggcacttcacaggcagagaacctatgttagaattcctttggctttcgtccctgagaaaagtgggaaccagctggtacctgtgtatccgcattcagtactttgatcctctgggtagagatgaacaggtccacctcagtcattggctgagattcgccttcaggagcctaagaagaaagggcaccaagaagaggttttactgtattgtcttcacctggaggcacgggaaaggttagctcacacactgggttaccaagacacagtc

SEQ ID NO: 25978 - DNA, 1452 bp, Mus musculus
ttttagttctagacccccagagccccagaaagctccttccagactttaccaggacaccagaggaagctacggcagtgaccccgaggaggaggagtaccgccagcagttggcagcacactcgaagcgtggttactacagccagccctcccggtaccgagacacggagttatagagcttgtatgcgtggactcctgcgaggccacctggagatcttctccagttaaaacgcactgcagagatacggtggggacccaggcaacagatggcatgagttatcaactgaaggctctgtttgtgggactggagtgaagttgattctgactttcttgaatgaagagaaacagtctgataactgttacttgctttggtgtggaccaagatctgtattaacctctctgtattttttaatatgtatatcgagcaataactatctttcctcactcgtggctgccttcctgcacagcttcagtgtgaagcagatgtgaagagggagttaaaaaaaaaaaaaaaaaaaggactccgtctcagactaagttcagaagtattttatcacgactctctaagtgcctttgacaaaatgtgtctcacgtttgcctccctccctgacgcttcatgcaaacccataatggactaaaactttattttgactaaatttttataccagtttagcagctgtgactgcccctgcaccatgccaccttttcagggcattgtctgtagtattttccacaaattctgactgtacataggacagcgaccctcgggagtgtgtctgcctatcaattctgcgtagctcggaggccaagattttagagtgtttgtccgttgtctggaaccacatattccacaaaggcagagacttgagaaaagggtattttgtttcctctctatcagagtatgtactgacatcgggtggttttgtaatttaataaaaaggagtacaagaatgagtttagtgctgagtctctacacaccttccttctgggcagtgtggggggaacccaaggtcctcatgcattcagagtgctgcttcaccactgaactacaccccactcttcctgatttattttaattaaaaaaatttttaaaaagacataaaaatgtgtgtatgaatgtttttcctgcatgcatctgtgtgtgtcacatgtgtgcccagtgcctgcagaggtcaaagagggcatcggattccccccaaaactggagttacattggttgtgctctaccatgtgggtgccaggactcaaacctgggtcctctggaagaaccaaaggttttctaaagctctgagccggttatctggttcctccttcctgtagtcacacaagtgagaacttacacaacagggaatggaaacatgggaagaagaagaagaaaataaccccttcacaggtctgatctttctccagtcccttattcatgagtgtctgttgtgtgtctattgcgtgtctgtgg

SEQ ID NO: 25979 - DNA, 1179 bp, Mus musculus
cagatctctgtgagttctaggttagcctgggcaacataataagatcctgtctcaaaataaacacaaacagaaaaccaccaccaccaccaaaacctacccaataattctcttcgacaggaattaaattctatcttttttattagcttcttggatgggacatattctgtttttcagttgttatacattaatatcgagtgaggagtggaagccaaagccagtcagcattcccacttatttgaaggttgggtagcttaggatgaaacaaaaataaatgtgaagtaaaaccgcattaagatttgtgaacttttcatggtaagtcagtagtagactgtacaaattgaaagcatgaaggctattgctctctgagccttgggtgtcactgtgtaaagcacatgtgacttggttcaggagagctctcgagtatataccttcccagccccaccataccttcatgagcagcacatgcagagacatcctgggagagcagaagtgttgagcacatggcctctgtcttgagcctgtggacaaccccactcccccacccccatcccccatttctgcaattcttctgactgtttgcccatggtgtgtctgtggggctcttttaacatctggctggattcccttcctttttctgctttctccgagtaggtgatacatcgaaagttgcatggccaaatgctgttcattcttttgtgataaagtggtggggcggggaggaggtactcccgcccttccagggaatagcactttgttttcaagtgcggcctgaagaatgcagatcaccaaatagcttgccacgcgtaaaggttttaacttctcagggtctttacagaatgtgttgtgtggcgggattcttggttttcgttaatgaattagctttatggtgctgcggatggaacctacttatatacttctggtgcatacatggagctataaagggggctctgacaaggatgctgtaggaaccgcaaagtttgaggtagaaaaacaaccccttgctttgacttaaggaggacagttgaggtgcacgctgatgtgaaggaaaaggaaaaggagacactctgaattatagccgttctctagttgtgtgcctgtggcgccatttgtgaagtgtccgaagcctctggctggtgacttgtatttagtcatttcatagcaggacatgctatttgatga

SEQ ID NO: 25980 - DNA, 1101 bp, Mus musculus
ctctgtctgaccttagacctttccgctggaagtctctctgagggagtctgagaatggatgtctctaacaagcccctcctcagagcagatggtgctgacacggcaggggaagcttccaggctgagagctgatatgatggtttgtgggcatttgacagcagggctggattgtgtgaggtggaaaggatggagcggggttgggctcctggcactcgggtgtttggtagagtcaggggtgtgatgggggtaggggacagccaggagtcaatcactgactgcagggatgttatagggagtggggtggggtggggtggggtacaggctggaaggagaactggagcctccaagggattagaggtagctgacagagggtggggacatgaccagggtagccagggcctactagctctccctaaaaaaggagagtaaggacctgggaggtactggtttcaggggagggtctgagctgccatcagggggcaggctggaggaatcggaggaatctaggtcctgctttcccagggtttctggaaggcacactttgccaagggtccagttgtgcagcttacagtcccaggacgggtgtggactttcctttaagatatcaggaccctcttttgtccttcaggccacagtcccaggacttaggatggtctcatccctcttctcgcccagcatcgctaattggcctagaaccaaggtgaacgctgggattctttcttgtacacagagcccacatcactaaaactcactcccctccttggccgtacagcttaatagctttaaagatttgtgcagccctgggcccagtgttcttagcataactggatataagccgattctgagagtgggtgctgacatgcgcgagtgtttgtgacagtcctcatcgtgaaggtcagaaggtttgctacagggaagaattcccggcagggtggtggcctgtcactcaaagccatcaggccttctacccttcctgcggggtgcacaagtccaggttcacatcctcttatttgcttgcctattccaattggaaggaatgtttagtacatctgaagatgtaaaagattctcttaggtttggggaagaggcactcgtttgtccta

SEQ ID NO: 25981 - DNA, 1239 bp, Mus musculus
ggactgaagaagggaggaaactttggaggcaggagctctggctcttatggtggtggaggccagtactttgctaaaccacgaaaccaaggtggctatggcggttccagcagcagcagtagctatggcagtggcaggaggttctaattacgtacagccaggaaacaaagcttagcaggagaggagagccagagaagtgacagggaagctacaggttacaacagatttgtgaactcagccaagcacagtggtgacagggcctagctgctacaaagaagacatgctttagacaatactcatgtgtgtgggcaaaaactccaggactgtatttgtgactaattgtataacaggttatttttagtttctgttctgtggaaagtgtaaagcattccaacaaaaggttttactgtagacctttttcacccaggatgttgattgctaaatgtaatagtctgatcatgacgctgaataaatgtgtctttttttttttaaatgtgctgtgtaaagttagtctattctgaagtcatcttggtaaacttccccaacagtgtgaagttagaattccttcagggtggtgccaagttccatttggaatttatttatggttgcttgggtggagaagccattgtcttcaaaaaccttgatgtcgttaaactgccagttactattgtaacttttaatgagtttcaccattgaaagggtcatccaagcaaggtcacaatttggttataaaatggttgttggcacacgctatgcaatatcaaaattgaataatggtatcagataaaataacagatgggaatgaaacttatgtatccattatcatgtgtactcaataaacgatttaattctcttgaaaaaaaaaaaaaaagaacacaggctcccccctaaaccgagtgcttggcctgtttcaacccaagaggaatcaaagtatcaagatctgtttgggaaggccagaccaccagggatggagggaggacagtccagagggtgggagtgaagagattgcccccacccctgctgagaatcccctacccctaaggtctggcaggaaaggggcagccctgctatacttcagagcaagtttagggctgccagatggctgctagatgctaggggggccggaggtggctcacataggcatcccctcagggagatgatagggctgccacttagtttttctaccagagttcaggggtccttaacctcctcagaagcagtttccttttaattcatgcttga

SEQ ID NO: 25982 - DNA, 1191 bp, Mus musculus
tgtttcttaccggaagaactgacgagaaaaacaaagatgtatttaaatcctggatccactaccgctgttgtgatttgggagtatacgtataatagtatttattttataaaaacacataacattgtagtaaattattataaaaaatatctgatattcataaaatatatcctctggaggttttttttgaggcaagtatttcacaaaagttccagaattttctttgaagtttaagtatgactgctgacaacttatccatcattatttgtaaaaatgatggcaaacattttcattttctcttaaaaacttcaggttattgctgagatacaatgaatacagtgatagtaacaaaaaattgctatcattatatttaaaaccagcttaacctttatttttatgctatgtgtgtgagtattttgcctgcatgtatgtctgtgtactttgcacattcagtgtctgaagtccagaaggcaccagatctcctggagctgaagtcacagacggttgtaagtcttcatgtgggtgctgtgaactaaacccaggtcctctggaagaacagccagcactcttaactactgagccatccatctcttcaactctctcactgtgtttttaggagaatgagtttttaatgttcctaaagagtcaaagaaattaaaccatctcttacaatcagtaatagtgtgatggtactttggctcttttttttttttttttttttttcaaaacagggtttctctgtgtagccctggctgtcctggaactcactctgtagaccaggctggccttgaactcagaaatccacttgccctgcctcccgagtgctggcatcaaaggcgtgcaccaccacgcccggctggtacttcggctctttgttctgttttacacctagaagattataattgttgaactttaaatttttagtcttattgctggcattaaattcttcctgcctattttgaactgtgttaattttctgtataatatgagaaataatgaggtacactcctttactaaccataactaaggatagctatctgtgtgtgtgcatatcatagtgcgtgtgtgtgtgtgtgcatgtgtgtgtgtgtgtgtgtgtgcgcgtgtgtgtgcgcgtgcgcgcgtgtgagtgtttgcacacatgtcagcttctgaatttctagccagttctcatgtctctgcctcccatctcac

SEQ ID NO: 25983 - DNA, 1149 bp, Mus musculus
gtggatatgtgtttgtgtgggtatgtgcttgtgcatgtgtgtgtttgtatgtgtgtgaatatgtgtgcttgtgagcatgtctgtatgtgtgtgtgcatgtttgtgtgtgtgtgaatgtgtgtatgtctgtgtgtgtgtatgtgagcatgtctgtatatgtgtgcttgtgtgtgtatatatctgtatttgtgtatgggggggagatcaatactgggtgtcttccttgagtgttgtttatgtatttactttttagtgtgagtgttttccatgcatttatgtggatcacctgtgtgcctggtgacctcagaggtcagaagatggtgtcagatatcctggattgggagtcatagttggttatgagtcatcttgtgggtgctgggaattgaacccgtgtcctctgcaagagcaatagatgctcttacccaatgagccgtctctccagccccagtctatttttttgtgacagggtctctcactgatttgacaagactgttccgcaagctccagcgctcctcttctctctccctctccagagctggagttagagctgcaccaccatgttggctttttaacatgtgtgctagggctccgaactctgatctttatgcttgtatggcagattattgactgagctggttctccaggtcccaagtggtagattcttacgaaactgttttgggctggttttttttttttttaaaagatgtatttatttatttatttatttatttcatgtaagtgagcgcattgttactgccttcagatacaccagaagagggtatcagaccccattacagatagttgtgagctaccatatggttgctgggaattgaactcaggacctctggaagagcagtcggtgctcttaactactgagccatctttcccccccgccaccatccccccccctcaccccctttaatacctttggatgctatttatcctgtgaatagcttataactttatggggtggtggaacagtagctcagtaagagcattaactgtgcaagtgtgaggatctgggttcaaatcccagaacctacataaaatgccaggtatggctgactgtgccttcatcccagccttggggaataaacatgaggatcctgagggctagtaggccagccagcctggagcgcttgtgtgtgt

SEQ ID NO: 25984 - DNA, 1116 bp, Mus musculus
catgaccgactctgtcttttcccctcttgttttgtagttttacgtattaactatatggacatgtttttgtaacaaagtagcttttttaagcctatttgaaagcacgcagatagcacagggaaagttatttccaagtgctgggttaggtcgtgatttgtaaagatcttatggtttgaaagggggaaaaaattaaaaatgtattatatattgataatgatagtttacatatttcaagatgaaagttttgatccaagaatgtggtgaggtgttggatatgtggtggtacttctctggctcttccatctttcgttgaaatctcatttagatgtttttggtatggtgtgtatatgtgtgtgtgtgatatgatatatatatatgcacacacatatctatccatgtatacacacacacacacacatacattttctaataagatttatgatataccctttctgatactgccttaaaatatttaatggcttgtcatgtatcctttgctaaattataactttctgtgataataattaaatccacgctgcttctgtagaaaaagattggattttctgttctgttttgtttttaattgtatggtcttgtttgcttgattttttttttcctcctaaaatattggtccaaactttcagtctcttccattagaatttgagtgaaagcaaatgatttttttaaattgtgattacttttattttgtgtgtgtgtgtgtgtcaggtgttttatctgtgtgcttgtctgtgcactacatgcatttctggtgccttaggaggtcagaaggaggaggcacagagaattgtgagccaccatgcagatggatgctaggactccatctcaggtcttcgggaagagcatccagtactcctaacttctcagccatctatccagtccacagagaatctttttacctttgattggctttgcctgtgagaccaggtggctgctggcgtgggctgtgcttatcactgtgtagcacgtatctccttccaccatctccctagttattccccatggagagtctgtggtgagagccctcagcctctataacagggaagtggagcagaggggactctggccttgtaggcctgaagatatcatttcctggga

SEQ ID NO: 25985 - DNA, 2196 bp, Mus musculus
cagcggatccaggagttccgacagctcacggccgacatgcaggcgctggagcggaagattcaggatagcagctgcgaggtggcatcagagctcagggagaatgggcagtgcccgtctcgggagtgcaagtctgtggccgtgggtagtgatgagaacatgaacgatgtcgttgtataccacagagacttaaggccctgcaaggatacggctgtggggacggtcaccgagacgaggaatgttggcatcagcgtgacagaagctatgcttggggttatcactgaagctgacaaagagattgagctgcagcagcagaccatagaggccttgaaggagaagatttaccgcctagaagtacagcttaaagaaaccacccatgaccgcgagatgactaagctcaagcaagaactacaggctgccggatccaggaagaaagttgacaaggccacaatggcccagccacttgtcttcagcaagttggtggaggcactggtgccaaccagagatcaaatggttggcagtcatgtggacacaagggagtcatgtgttgggacctctgtgcaaactagtagcgtaggcacctcctgccatcctgactgcaagaaccaagtcgtgggatccgagctgcccatgaattggtgggtcgtgaaggagagggtggcaatgcatgaccaatgcgtagggaggtctgttgagacttgtgaccggagtgtgggtgtggaagtcagtgtctgtgaaacaggcagcaacacagaggcttctgggagcgacctgacactccttaagacaaacttgaacctcaaagacgtgcggtccatcggctgtggagattgttccgtggatgtgattgtctgcttccccaaggagtgcacctcccgaagcatgaacacggaggctgtaggccaggaggaagcagctgtcatggcggtgccccataccacagaccagcacaccagcacgaatctggagcgggtggaccagtgcactaacacagaggcagccaccctggtggagtcctgcaccaacactctcctcagcactatggacaagcagaccagcacccagactgtggagatgcgaacggtggccatcggagaaggccgcgtcagagacatcaacccctccactaagactcggtccgttggtgtcgggacagtgctgtctggcaattctgagtttgacaggccatgtgctgtgaagaccaaagagtcgggtgtgggacagataaatattcaggacaactatctagttggtctcaaaatgcggaccatagcgtgcgggcctccacagttgactgtggggctgatgggcagcaggaggagcgtgggtgttgggaacgagcccgtaggagagctcccggaggagtctcctcagcctcgggtggcgtctggaatggtgactggcttggatcactacattgagcgcgtgcagaggctgctggcagagcaacagacgttgctggctgagaactacagtgagctggcggaggcttttggggagcctcattcacagattggctccctcaactcgcagctcatcagcaccctgtcgtccatcaattccgtcatgaagtctgcaagcaccgaggagctcaggaactctgacttccagaaagccagtctgggtaaaactacaggtaagcggtaccctcaccccacaccccgggacctgagaataaagactcggggagacataaaaggaataaggatttgcgtagctcaaggctctgaagactaggaagcgccaagcatggcaccagcttccagcaaggtctatttttctctgtcatagcaaagaatatggtgagatggagcaagaatgcacccatccccaggatagcgacatcagtctattcctgagggcagagggataacattttccatcatgaattgttggggacacatcaaaccctaagagagaaggcagggagaatgtccttctaggaagaaaggctttcctttcctttcctttcctttcctttccgctgctggagccattttttagagtcatagagagagctttgggatgatgaggtgaatgcaaaccgagaccaagactcataagcagccttgctgaccctactgtctccctagctcctttggcctcttgcttcaggctaacacaaggaagcatgtccacgagacccggcttccctggcgatgacctctgaggcgttaatgtgatgcttcatgtctgtct

SEQ ID NO: 25986 - DNA, 1099 bp, Mus musculus
gtccgtaaacagaatcagtcaaagtttttttccaaccaagtaggtacaagttaaatatcccatatttaaaatacttggtgtccaaagtgttcagaggggcatggattttgaagtttttgcatacataagaagtttgaacacaaaatccatttgttttatatacactttacatgacattttgatgtatgttcattttgaccacaaccaataatataaggttagatgtagaatttttcttttgtagtgtcatggtgatactcagaagatttcagacttggaatccccttttgaattttagattttcagcttggggtacataaaaaaaataataatgttatgtttctgacctccaactcttttggtctttaaatggcctactcaaaagcaaagtccactccgtagagtaaccgccaagctcacctgaacctttgtcttctctgcagatatcagttgtaagcacagatgatgatctggcttgagttctgaacaaatcttggtctatgaggtctacaccaataacaccctactctggaatggtaacagagccagcgctgaagtctcctttcttcctcccatctggaagaacatcaagatatctttttgtggatcaagtttgagtacttgatcatttttatattacttttgtaaatattcttggccacattctacttcagctctggatgtggttaccaagtatctgtaacccttgagcccctagacagtattgccatctctggccaaatatgcactttccctagaaagccatattccagcaatgaaccttgtgctatagtgactcccacctgtacatacattgtataggccacctgtacatatcccagagaacaatcactattcttaagcactttgaagatatttctatgtaaattattgtaaactttttcaatggttgggacaatggcaataggataaaacgggttactaagatgaaattgccaaaaaaaaaaaaaaatttgtaactaattttgtacgtatgaatgaaatctttgacctctgtcgaggtttgcaaagactgacttcaaactactgtacgtttttttcaagtgctaaaaaaaaaattaaaccaagcagcttaacc

SEQ ID NO: 25987 - DNA, 1194 bp, Mus musculus
ggtgtaactgtaatgtattcaaaattgtcagtgtggtggcatcaaatatgtagagatggtctttctgtggagaatttgtggaactttagtgtggagaacaaagaaggagttggagatgaaaaagtggtactgtgtcaagggaagatttttgtgagttttccatcatgttggccatcacatcctgactgaagtctcaagattcctggaagtgaaggaagacacaaagcttaaaactcagatgagatgctctgactccatcgtgaagtggtcactgaaaaaaatgttgctggtttcttgggatgaaagaactgagccagcatctgaaaaagatcatttcatttaaaaacaaaaacaaaaaaccttgtctcttctgtaaaaatccaacattaggtagaacttgctgtaatttaaaagtcacaaagtcatttataaaaaatgaagtgattaaatattgaccgagtattgttgagtattgctagagtagctagttatctggtgagactgctaattgattcagtgtatgatagttcacacgggatgagaaccttggcctttatcacccaaacaagaactctctatgagattggttgacgtgagttggttgagtctctggagcatcagttttcaacttctggatcgcaacccctttgggggtgggtaggtcacataacagatatgctgactaacagagattgccattatgatttataacaatatcaaatgtatagttatgaactagttatgaaataatcttatggttgagggtcaccacaacatgaggaactatattaaagactcgtggcattaggaaggttgagaaccacttctctagggctcaatgtattagataactcactaaggggtaaaatatgaaatatcaaatcctaaaaaggatatttataattaaaacagcctgtcatgaggcaactgtgagtggaacatctgggaatttgagaagtatctgcaaagtatagaaaaatcaacagatttgtggaccctggtaaagaagttcagccaagtctcagtgaaaaatgttaagaagttgatgcaagctgcatgctccttgttaagatgcaggctttgcatatcaccaggtcacttagaatattctaacagttactctgaagatgtgtcatgatttgtgagcctttggatctgggtaaatagaggacaaaactaattctttgaggcttt

SEQ ID NO: 25988 - DNA, 1185 bp, Mus musculus
agtgtgtatagtggagcaggaaagtggtctgaactccgggaagcctgtggccagggcagcctgcactggggacagctgcttcctcagctgccgtgcagactgagttccatcaggtttgtttggaagctgctctggtcagtccagcacatggagggaagtgtgctagaggaatcaggagatgatgggtcctcgcttgaagtcagcgttgctgggaaagtctgatctttgtatttgggccttcagggtaaataccttccaaggagaatgaggacattgtcccatgaacaatccctaaaatagtcagagcccatagtgtgactaaaagggggaactgtagaggattgagtgtaggtagtatgtttggactttaaaaatacagctggctttcagcggcaaaactggagatctgtagaccatgagaacttgtgtagcaggcgtttttagtacagaggcctgtccttgctgctctgcatgtctgatatatactaaggcggccatctgaccctctgaggaattgtctgtgccttacctgtcccaacttaaggttccaggactactaatgcagcttctaggactctcctgccctctcgtgctggggtgtagtaagccctttcccaggcatgacacctgccactgttggctggatcctctaggcatggagtgaggaggagagtggggaaagacagtttgatttgcttctgtgtggctaacataccatgactcgagttttcgttctccgtataaaggaccgtttagagagatgagagtcgggtgctaacatgtttaatctttaaaagtgaaaaacacgtacataacttgaaaggtgcttttgtgcagcttgtagaaaaagcagctgtttcctctgtagttctaattcacgctctccataatgacttgagttcttagctctggtgaatttctaaacatgtagtatgaagtcccgagtacctaaaacgtatatattcaaatacacaataaagagcatgtttattttttgttttttaaggcaggatcttgctatgtagctctgactgttttgaaatttattgtgtagaccaaactggcctcaaactcacagagatctgcctgcctctgtctccctggtgctgcgattaaagatgtgggccaccacatccagctgaggacacagtttctatttgtttgtttgtttgtttattataagta

SEQ ID NO: 25989 - DNA, 1156 bp, Mus musculus
acactgtgtgcgtggttgcttgtgtgcacgcctgtgtgtgcatgccttgtgtttacacgttgaaagccgtgatttatctgcttctcagagtcattgtgttgtgtgtactttgtttattgtagatttaggggcatttgtttctttgttttggaacttgtgattttttttcctgtttgtttacatggcttggatttttgttttgtttttggtatttgtacttaaatatagttattatcaaagaaactagacaatataaaatacagttgaacataaatacaatataaatagtttatagttctttgacccagaggtgactatgttttgctttctagaattttctgtgcacatgtttatgtgaatgtatgtatataatcatgcctgaggatactcatttctattttggtgatttgaatagtttctatatgaggctaatattttgtttaattatctcattaaaatttttttcgaatagccattcattaattcatgaactgagtgcttgcttagatgttggattctggtacttgggctgtttgatgacttggttctctctctttttaaattaatcttatctttgatatataattagctagttcatttgagtggctttgatttaccttgcttacctggggttggtgctgactctatggggagactgtataagaaggaaccttttttcattttttttttaaagactgattctcactataataataatgtagatctcaaagagatctatgtacctgctcctcagatgctgagattaaatgcatatgctatcaggtctaggtttctggggtttattcttattctgtcttgtgaaattttttattacatatatatgttgggggatatgtggcctgcacatgcatagaggtcagaggacaacatgggagagtctcttctcttcttctaccacatgggttttagaagattagactcaggtcatcaggcttggcagcaagtgcctttacccacaagaatggttttgccagctctgtgtgaaatcttttaaccttttctgtctcccctttcttatagggccagtactctcacttggttctcctggcagcgtttgactgtattgatgatactaagcttgtgaagcagataatcatatcagtaagtaacttggatgggatgagtgctggcgttg

SEQ ID NO: 25990 - DNA, 1187 bp, Mus musculus
attctccttttgtttaaagggattggtgatacgtcgtcgttctaaaagaaatgtttggtctcttctatttggttctgatgtttgaatcttttccccctctttcctttgttctttttattttttctttctttccttctctctttctttctttctttctttctttccttctttctttctttctttctttctttctttctttctaaataaagtatgatgttgggattggaagccctgagtaatgaaatatttggtaaggatcatttcatgtagctcaataatcatgacagcaaacctctgtgagaaggttgattctggggaggaaagcaaaactacaaaaactctgattgacttttgatgaccaagtaaattttccttgaataaattagcatttctgaacaaatggttgccttgctttatcctacatacacaattttataggacccaatgaggaaggtattaaattgtattcgtttgaaaagcatcttttgtaccaaagcaaattcttttccctgctcatctccatcatcgatttggacctttggtggcgaccaatgagtcggttccagaaacttaagtgagtgccttgagaacgcttgggaactgtgcctgaggtggtaaactcttaattaggttaactgtagcgcttaccaatcagtaactacactatcactcagggctttcgtaccttctaggtaaaactcctttcattgtggtttttttttttttttaatactgtatttttttttaagtgccatcatttaaaattcacttagtaagtggcagattacattattcagtcccacaagcacacaaacatagtaacactaggagatatttgagcatttattttacaatcgactgaatatataatgtaaatgaggtaagtaacttttgtagagattgtatgtgtgagataatgtaatgttcttttccagtttttggactacagttgaataaactttttaattatttaaaaacatctttgccgaataacatgtgatgggttttttgtataatgtatttgattttgtaaatacgtatttcctgatgtgatttttgtgagaaacgctaaatcttttagtataccatgtcctctgaagattggcaggagctaaatactagtttgtgggcgatttgtattgtgtactgtacaataactggggaacttttataattataaaaatata

SEQ ID NO: 25991 - DNA, 1694 bp, Mus musculus
acggttcatgcacctctctttagatggtgtactttaaaaacagaagtaaaatacacaaatggttttctcgctgcatacctaaagttagtagtgtgcaacattagctgcctttaatttgtagtaggtgagcgagaatgagcacattcttgcagaatgctgtagacgtcagtcaggagtgagcacagctcccatgctgtggtcctgggcctttttacatggacacactctctacaagtgctaaatgcattttcagtttggaaagattattatcacattattatcattaatattattatttaaaatgtctaagataatgctgtgcttgaaacatctgtgtgaaagaaaacacgtgtgtcgctgtgatggtcctcgttgcatggacatagtagaaagtcaaaagcttgacgtgttacgcttgcacacgagttaaggcagtggttatagacaacatactgactttgtcataacctcccctcctcaagttcttttgaacaaatcacgatcatccagaaactaaaatcaggacttttctgatctccgtggatcacagcagagtttgggggaggaaggttgtcaatgcagtgttgttcaacatcgggctgtgactggatcagagcaacaacctccatgtacatggtagaacaaactcattaacagaaccctagtatttctgtgagtctggtgattttaaaagactgggactgaagcattgattcagcgcttagttctagtattagaaaagccctttgctgtaatgccttgtattaaccctttgagcattgtaagatatacaatgggggatgaaagcctttcagatcatttatttagacttaaaaaagtaaaatagcctctatatccaaatgtctaattacactgttttttaaagggggggtcggaaaagaaagtgtctccatgccgaacacttgcattttatatacaactcttaattttccttcaagagggctggatagatttattcccaaatattcactgccatctaagtaagtgtactgtttacagaagataaaatcaacttttctagcatcacatgactctctagaaaaggaggacgcatacatgggcctatgctggcctatgtagtaactgatttctgcacactggaggtacctgtttgcctttaaaaggtatgataaaataaagggttatgttttgtcttttttcccaaaacaaaagatctcatttatttagctttagaaagtacaaatgaagccttagaaggagtgagttccactacacacagctggactctgaggtacttaggctctttggagttgcatctatcatgaaatattgtttggaaatcatgcggggcataattttatctatgctccagaacattaatactttgtcataagatatagagaggcagagtggcgagcaagacactcacttgctctaagctcttctgccaggagatgctgtgactactgcttcagctatctctgaatgtcattctgcttacaacatttgctgatttctttgagggaatttctggacagttgatctggtcctcccctatgtgacagaacacggagcagtgttgtgctcagatacgtccacactgccctcgctgagcacagacaggagcatgacctactccgcggcgtctgccaacatccatagcatagtgcaagtgtccgtacgttgctttctaggcagttgaggaagtcaga

SEQ ID NO: 25992 - DNA, 1289 bp, Mus musculus
agagggttgggaaggtcatctatttttctctgaaaaaaattgagctgtgcatttatcagttcaggataaatgacagaattgcaagagattatgctaatatgtacataatttgtgtacataattattaaaccacgttaacaatgcaagcttccgttagacattgacttttaactattatttgtgtaccaattcctctgtttaaagactactgattctgtattggaaccactgtacagatgcattctgctgttaagtggggctgttatagttagatactgcagctgaaaaaatgacttgactttttttttaagtgtacatgctacttatactgagctggacatacaggaaaccattccatttggatgactttcttttattccaggtcttttttctaatagtagttcaatatgctgctattataaaagaaaatgtatagaatgcaaggaatgtagcgacctgcatattgttatttcctggtttctaaaatacatggatttaaattttacacagaacctgaaggcagtgtgactggcacacctcactgttgctgaccccgactctgtaggatttggataggtggctggatggaccattgccattggagaacgtacatcagggatcatcgtacctcggctattacatggtgccttaaaacagaactgagctaaggtttagtaaggtttattttgtttgtgtgaataactcttcaatccattcggtaacgtgtgcctgtcatgctcagattcctgaagtaaagacaggtcacatgttcttcaaggggaatttaggggaaattaagcaaaacaaagagacaaaaacttcagtttctctctgagggactgtgagtggacttgtctaggttttatccttggagctgaatatcactttataacaaatcagattgctaagggtgtggactagcagttttcatccaaacatgttacataaagatcatgtgttgtagaccattcttatttagctataattctagaaagttaacaggattagcaggtacttattgaagtgcatcttttcagtctaaatgtctgtctgtgtgtctgggtgtctctgtgtacacacaaacacacacatacatacacacacacacacacacacacacacacacacacacgtggaactggagtctgctacagtcagaaggtgagatcctaaagagcacagctcatcccattttactttgcatgaaaagccaaggttcttttaactcaagctgtcaacagcagcaacaacatggggcatagcctttcatttaagtaattataaaatta

SEQ ID NO: 25993 - DNA, 1227 bp, Mus musculus
gcaaccatggggctagctcagagtagccgcttcctcccgatggagtaccattatcatggtcttaaagccaagcagctgtcatgacccacttgtgttcctcatggtatcaggatatgcatgaggaccagtagacataaggagaacctcttcgggagaacttctctatgcatctcccatccccctgacactgcagttgctgctgtttaagacatgacacttctccactgcagctgcttggagccattcataccccagaacctgacaggctcacccagacatacttaaacagaatctctctctctctctctctctctctctctctctctctctctctctctctctctctctcagtgctgtctgtatttagggtgacttagatttctctatgtttcctctagaagagtcacccaacagcacatttgttgcattcgtgtcttagtaagctgaggctctaatggttacaggagactaggcttcttgtctgtgtgagaacacacactgagcagagaaacaggacaaccatgaggagacacctgcaggggaacacacaacaggagacactagttcacaaaccacacatctgataagtgattagtctatggccataccaccctgaacgtgcccgatctcatttgataagtgcttaatataaaaaccctaaggaactcaactatgtgattatagcattaacggtgctcatttcctcctatgattttgtaatggaactcacatcttatgtatctcttcctgctgtcatacttctttaaaatttgcttcattttattattcatctctatgattgtttgtaagtgtgcatgcatgtgcatgcacacgatggtgcatatatagtaatcagaagacaccttgcttgcattggttctctaccatgtgggctccaggaatcaaagtcaagttgttggctttggtgacaagaacctttacctactgagccacttaccagtcctgcctcacctcctgacaactatctaaccagttgaaataatttttaatatatttataacttatcagaatgtgtcatctattgtggtatttatttccagcatgcttcatatcaatccttagcattaggaatactgtaggaagaatattgcatggaaaaccaacttgttggcattaggaagttgtcactgaactattgggaggtgaaccttgattgagaaacaataggtccattttgttttgatgtctcccataagtaaacacact

SEQ ID NO: 25994 - DNA, 1164 bp, Mus musculus
tacattcttttatgaagtctccttttagaaagtcttcaagaacaggaaagataataacaaaaagatggattggtgtcttctgttcacccatccccacccatccccacccatctccacccatccctacccatccccacccatccccacacagcatccatctacccagtgggctttgaattgtacattcattcacagtgtaccaactccattaagtctcaagggtactactaaagcttttgagttttcattgatttcatgatttttgttttaagtctaggtaaactttctaagaaagagatcagtttaccctaaacatgttctacctaactattaattatactaatacccactttcgacgaacaaaattgagtttctcagaactttctgacttctagactggaagatagactgatacactgacaaaagaagtgactgtgaactagtctgaaagtggacagcagcctctttattcatcttgggaaacagtgtcactcagacaagcctgacagaaggcccctggcctcaccagctttgttctgaccatagggagcaaacttgactgtgacctgtctgtctatgtattgccccaccactctgaggattaccctggggttgaattttggtgcctgacatttatcccccttctccttgtttattatcaatttaatttgtcccctactactttaacaggaactaccaatgcttcctctactcttagatatttcatatgcacgtgtttctgtaagtgttgatgaaagccaagacctaagagacagaggaagagagacttctttgctaaaataattccatagtaggataattttttgctgttgttgttgaggactgcagaatcttttctgtcaaatgtagatggcgagtctacttatgataggcacccatctctcccttccccttctctatatggagaagacaccctccctttcccacggcatgtgtgtgtattctacacacctagagctccccatctttattagggtctccctcccagtggagatgaactttctcttttattccctgttacgaaaaactaccccagtcctcctcctgttttgtgacattgctaggatactggtccatctcctctctcctctctgctgctttaacttcctctccagtctctcactgtttgattgattgagctgc

SEQ ID NO: 25995 - DNA, 1195 bp, Mus musculus
gaggagcaggcactcattccatacctatcaattgaaaataaactgcatttgaaatagaagtaaaactgccctgtgccgcaggtttgtagaagatgaatggtcacacctgccaggctgactttgctcagaatggctcaggggaaggaagttgcacagagacatcctgatctggcaaatggtacccagccacatggtcggtggattcttctcgggggatattttcagtcaggtttatggtactgttgactagttataaatcttcaaagtttgagagatggcgtgagaacacaggaaaggcaaaagccctttcctccacgatcttgtagcccggaaaatccccaacatctggctcacgtgtgaagccaggaaagatacggtttaccctggcagctgtccttgctgagggatggagctgctggcttaatgtcacacagggaaaacactctgtaagagtttgcaaaggagttttttttcccaagtggaaaaacgttcacacacatcatactaaacgagagattttttttttcaagcctcctcctatgggataaaaatatttgaccttatcagaattggtcaacgtcaagactgctggagggagcgatgtctacccttgctgttcactgtacaaacgcaagcctatgcactagcgtacacagctttactcaggcggtaaaagcactgttgataggttttgttttgttttgttttaaataaaacattaaaaataactttattaaaggaatccacaaaaatcaaaaacagaaacaagaggtaacgctgatttgctggttaatagaacaaacaagcatctttattcctgatgagctcgtaggctaatatccttaccacctcccgttctccagagtctcttcttctcgggaatttgatttaggaaaaccaagggtaattttgtttctttgaactttttccagccacaccttgaagaaggaaatagatttcattgttgtcacttctcccaaaagaaactattatcattaaaagaaatagattcctcatttcattaatttattctctttcattttgaacttctatattttaaatagttaagattaagaaaaaaaatggcttcctactcctgaaatcactcttggggatgcatatagacaaatctgccttaagttttcaaagtcgagtcctttttttttttttttatttcatcagctatacacactat

SEQ ID NO: 25996 - DNA, 1769 bp, Mus musculus
ctatcatagtccaagaatttgtgtttagtggagaacgtaattaggggaaatacttaagtgattgttggttggtacagtgttctcttagttcttaagcaatccacgtcttgctgaaaaaaaaatttttttttcctcccttctctctggctgctgccccaggtccgttattttgcaagagtctctggtgtccacgactttgagtctgacagagagtcaatcagccttgagtgtgaagcaagagtggtctcagagctacagggctttcccttcactttcatccagccacagttcccagaatggcacggacctaggggaccttcttagcttgcctccaggcacgccagtgtctggcaacagcgtctccaactcgttgccaccctaccttttcggcatggaaaatagccactctccttaccctagccctcggcactcagcaaccagggcccactccacccgctctaagaagagagcattgtccttgtcgccactgtcagatggcatcgggatcgacttcaacactatcatccgtacttcacccacatccttggtcgcctacatcaacggaccaagagcctccccagccaacctgtccccacagtcagaggtctatgggcatttcctgggtgttcgtggcagctgcatcccccagtcttgtgcagtggccagcgggcagaaaggcatattggttgccagtggagggcatacgctgccgggctatggagaggacggtacactggagtatgaacgcatgcagcagcttgagcatggtggcctgcaacccggacctgtaaacaacatggtgttgcagcctggcctaccgggccaggatggccagacagccaacatgctcaaaacagagcgcctggaggagttccccgccagtgccttggacctgccctctgctctgcctctccctcttcctccgcctcagggtcccccacccccataccatgcccatccacaccttcatcacccagagctcctgcctcacacccaatcgctgtccctggcccagactggcctggaagaggatggggagatggaagactcaggggggaagcactgctgccgttggatagactgcagtgccctttatgaccagcaggaggaactggtgaggcacatcgagaaggtccacatagaccaacgcaagggggaagacttcacgtgcttctggactggctgccctagaagatacaagcctttcaacgcacggtataaactgctgatccacatgagggtccactctggggagaagcccaacaagtgtacggtgagttggagtttccgaggtcctgggccacctctctggaaggtccagcttactgtcatgcatgcattttatcaaacaggacagaaaaggcaggtaagagtttctatttctgtgggacttggatgtgtgatggtcaaggtacctattaggtttctctcctcttcctctaactggtgcaaggggaaggattctttgatagctggtgactgctggtttctctccagttctagctcggttcccatgccccagaagtagtggaggccagtctgctttagtttgggattgtgagaatgacacagacgtggtgttctcttaactgcatggctgttcaagtggaggggaccattcactgagccacaagcaagcttttgctctttccaaagtaaatgttcaggtttgtgtttgtttgtttgtttgtttgttttttcctttgaaaatttaggtgagtcttggggtctgggagattgacatttaagaatggaattctccacttagg

SEQ ID NO: 25997 - DNA, 1193 bp, Mus musculus
aaggaaacgtgagaagatggaatagacacaggtgagattaaagaggaaaacacaaaagagccagccttgccagcaagcaggcagttttatattggtggttatgcgaggagcctcaggcaatgaaggtgaatgatcagtgatgacatcacagtcccaggttcaatccccgaggctgagactttacccagtgacacagcctccgtgaatacgtcatattatttctctggtccttgcttcacttactgggagcctctcaagttcattcagcaggtatatttgggcaccttaactgttggagtactctgccgggcactggcactctcctaaggcaactcatacaattgtgaggacatgggagaacatgtctgctcatttttcagagtgtcgggcacatagtagcagtctgtgcatttatttctgtttcctgcttgacttcttagtcttcagggaaaatgggggatccagacattcctaaagggtataatgatactggtctttattaattccctaccaaacagcacactctctttatcaggacttgtcacaatctggattgtgaccgttctgtagaatctgcactgggttgagtcaccacacatgagctttgtcagtaaccatctgctcttgaacggttcacatgatccctgtgggagtcagattgctcagtggcacaagaagttcattgggtgagctctctacttatctgatcctattgatcctctattgtattaggtgatgtcatatagtgtgtgtgtgtgtgtgtgtgtgtgtgtgtgtgtgtgtgtatgcacttgtgcgttctgtgtaggtaggtaggcccatctgtatgtgtgcatgtgtaggttagagatgacatcgggtctcttcttctgttgctctccaacttgctttttggagacaaggtccctcaatgaatctggaacgcaacatttgaactagaagccagtccctgggatttgcttccaggttacagtcatcacaaacagataacactgggcctagctttcacatgggtgctgggaagccagactcgtgattgtcggctttatgctctgagcgtcttccgaacctgtgaccgcaattctggtttcccttcttaggtcagtgttaggcatatggttatcccatttccgtcttctgtctgcctctatgagaatgatttggctttgatttttgaaaacttgatttggttg

SEQ ID NO: 25998 - DNA, 1168 bp, Mus musculus
gttttgtgtctactaactcataagtgattaataaaatgtgaacatatagattatttaatatttagccatcatcaaacttttgccctctgtcttttgcactcagtattttccaattctgtcctcccttctaaatttattagttttattccaaattctaactttgcaggttttttttttttcacactgtaatggtacatcgctagcgacatttgttttgttactggaaaagctttgccaacccactgagcctacttcttagtaaatgagatcaaactcaggagccttaaactattacatgaatgtttgcaactcagtcacttttctttcacctgtgctgaaagcaggtgaaacaaaacactagctactgatctgacattagtaggcattctctgctttagccatattgcagcagaacacgtggatggattttttttttgaaggaagacaaggagtgccaatcagatgagggaggtagagagccttgcctgccatttgtgcagttgaccagtagcgagtaaagcaagggtgaggacttgctcagtgcacctgctgtcttggagagattagggcccaggagagctcacatagcaaggaaacaaagaaaatgagcaaaccaaatcggaatagaagcagagttcttgctgtcggggggaagaagatagtgtggcagacagatgtaaaacgagaataaaacgcagggaggttggaatagagatggaggtcctcacgcagttcctgtattttagggtctctgtgcaggtagatacaggtacgatagatacatgggtctgcgtgtgtgtaatgtgcatggtaatggttttaaattatttgccaggcgtccttcctgagagagccaaggagcagtgacacttctgtcacagtgagtatgtctagcacttgttttctaaataccactgcacatggaaagatctggttctctgtagatacgactgattccagaactaaagcaaacgaacctaaaatagcttacaataccagaaagcaagacatctctcaccaaacaacaggaacactttagaaggatccaggaagcagcttacaagggaccttgctcctgaccaaattggggacatttgagcacaggactattgagccctgtcccacatactcctctgtagtcatcactgccttgcagttactcaagtta

SEQ ID NO: 25999 - DNA, 1197 bp, Mus musculus
ctctgctactaaaggaacaagtagatggacttggaagaaaaggatgaccaattagatctctgaaaagtctacatttttttgtttcttacatcagttgattagggaacagaggggtagccttagacttatgagaaccaacctcctgattgttccttggtcagagtgggttagataaagtgagaaatggagagggaacccaagataagcactctgtacaagagcccctgtcacaggaccatgggcatagtgacactgctgccaccacaggggaactgtgtgaagggggacactgagttactttatttggtcaaaggcttttcaacctgaagtctaaggttacaaggatttgtgtagctgaaccacaacagagctactacatcttggagcagaagtctgtggaaatgacccttggaacattattccatctactttgctgatttcattgtcctggaattgctgaagagattgaaggaaggtctagattcttagataggattcagaagtgttgggtggtacttgagcagtcccaagaggggttggctctattagagagcgtggtctcctaagagagagtacttggtgaactcccaaagtgggggttactgtggtgacaataggtggtggaatctcacacctaagagaagtttaagagtcagaggtaacttttggttaaatatggcttctctcacacagtggtcgaggtcatcagggaatctcatctacagtgtttgaagatcgaagactacagaagtctttctctttgaaaaacagtggcacttgtgtgcttatgtcactgcttccaagttcatgtgatttgtcattggcgctcaccatctttattgatagaagctatactgttgtgtggctgtggcggtgcccctggaagtagagtagtcaataatattctgtagtaggcaaaaagctggtccaagccaaaaaaaaaatgtcccaatttgattcacaccaaaatgttcaggattactaatctcttctttgggatggccaaagtttcctgcctaattttatcaatgacttacttagagttgaaggcttgaatatgacttggtaaatgacaagattagaagaggaaataaaagaccaggaattaatttttttagattgattgattttatgtctataagtgttttgccttctctctctctctctctctctctctctctctctctctctctcaca

SEQ ID NO: 26000 - DNA, 2076 bp, Mus musculus
tctctagacagccccactctctaaagaactgctataactttctgctagctcatctcatgcaaaccaaaagcccaggtttttatttacataccaattcagttatttattccaggttccctcttgaccctcccaagaatcaacattctgtgaccttagacccttgactcttagtaagagacagcaagctccccccccccaacgggtttgccgtcagaacgcaggtgttgtgaaagccaccgataattcaaagcaaaaatgggaaaggaaaagactcgcatcaacatcgtcgtaatcggactcgtagattcctgcaagtccaccacaaccggccacctgatctacaaatgtggtggaattgacaagcgaaccatcaaaaagtttgagaaggaggctgctgagatgggaaagggctccttcaagtacgccgggtcttggacaaactgaaagctgagcgggagtgtggtatcactactgacatctccctgtggaaattcaagaccagcgaatactacgtgaccatcattgatgccccaggacaaagagacttcatcaaaaacatgactacaggcacatcccaggctgactgtgctgtcctgattgttgctgctggtgttggtgaatttgaagctggtatctccaagaacgggcagacccctgagcatgttcttctggcttacaccctgggtgtggaacagctaactgtcagcgtcaatgaaatggattctccaagccaccatacagtcagaagagatacgaggaaatcgttaaggaagtcagcacctacatgaagaaaattggctacaaccctgacacagtggcatttgtgccaatttctggttggagtggtgacaacatgctggagccaggtgctaatatgccttggttcaagggatggaaagtcacccgcaaagatggcagtgccagtggcaccacgcagctggaagctttgggttatatcccgccaccaactcgtccaactgacaagcctctgcgactgcccctccaggatgtctataaaattgggggcattggcactgtccccgtgggccgagtgttctcaaacctggcatggtggttacctttgctccagtcaatgtaacaactgaagtcaagtctgttgaaatgcgctatgaagctttgagtgaagctcttcctggggacaatgtgggcttcaatataaagaacgtgtcggtcaaagatgttagacgaagcaatgttgctggtgacagcaaaaaacgacccaccaatggaagcagctggcttcactgctcaggtgattatcctgaaccatccaggccaaatcagtgctggctatgctcctgttctggattgtcacacagcccacaaagcatgcaagtttgctgagcttaaagaaaagatcaatagtcgttcttgtaagaagctggaagacggccccaaattcctgaagtctggtgatgctgccattgttgatatggtccctggcaagcccatgtgtgttgaatgcttctctgactattctccacttggtcgttttgctgttcgtgtcatgaggcagacagttgctgtgggtgtcatcaaagctgtggacaagaaggctgctggagatggcaaagtcaccaagtctgcccagaaatctcagaaggctaaatgaatattacccctaacacctgccaccccagtcttaatcagtggtggaagaatggtctcagaactgtttgtctcaattggccatttacgtttaatagtaaaagactggttaatgataacaatgcatcgtaaaaccttcagaaggaaagaatgttatgtggacctttgtgtgtgtgtgtgtgtgtgtgtgtgtgtgtgtgtgtgtgtgtgtgtcgcgcagttttaagttattagttttcaaaatcagtactttttaatggaaacaacttgaccaaaaatctgtcacagaattttgagaccattaaaataagtttaatgaaaagaaagaaaggaagaaagatagaaaggaaggaagggacggagggagggcgggagggagggaggaaggaagaaaggaaaagaaggaaggaaggaaggaaggaaggaaggaaggaaggaaggaaggaa

SEQ ID NO: 26001 - DNA, 1315 bp, Mus musculus
tttatttttgtttggttttatgggagggaaagagtactgaaatgttttgcaactttttttatgtgctgctagggtttttgttgttgttgttttgtttctgaagggaggagtggtaaccatatgtggcaggaagtcaaactggacagactctcccccacccctcagttactaaatttgcctttaactattcttatttttggaatcaaagtatgaaaatctgcacaacacaatgtttacaagactggttgactgaggagatgtctgctacacggtctttttcttacatggatatacatgtcctacttcgaggaaggaattcaagataaaagtatgctgtgtcccactgcaaagttcagctgtcaaatctggtattcatcacattaaaagcaataaatccgcagtggtgacctactttactaattagtaagctgggtggcacaaattgctattttaagacatttacgtttgtattttcggcaccaccagttaactccttggctagtataaatttgatattaaaaacattacatttatccctaaagtagtctcaaaactgttcagaagttgactttgtcctgatgactgtttaaatattaagcaggcagtgagtgtagaaaatgatagttttctgtttttccaagaagataaaatgcaagcttactctaatctacttgacatagtccgggacctctcagggagtaagttttaaaagaatagtaacggcctgtaagaacaaacaggaagagtaaggtccttgttaaatcacagccactgtgttccatgtggtgaagccttgagaagtgggagctgagctgccagccatgcctaaggattgctaacagccccttcaaaggcggtgacgggtctcactatctgctactcgcttctagctcagttactagaggatgcctctgagttttactgcttcctgtgtaattcattgcagatccaccaggatgtttgatgattcttttatttagaattagatgacagtgccaattatgatatccttattatttgaggattaatcttccagcatacaggagcgctagctttggttatttttgagtgtgatttttggctcagtacccacttcaatttgtagcaaatatttggaaagtgggtacccagggtttggaaatgcaggtctcagtttgagttaagaaatcatgctaaggggccatgggggctcagagctgtggcctccgcctcagctgtccttttcagccgatggggcacctaaccctgtggaaatggactggaattgttgaatcatacttctgtaatgtcacactcttcctagttcccagaataa

SEQ ID NO: 26002 - DNA, 2400 bp, Mus musculus
atttaagttaaccacacaaatgttacaaggtgtcaataaagggacccctttgtccaagtgaaagcccagtgagaaaggcgcagagccatcacagcctggttttggaaagtcataaatcaagcattctttatctggcccatggatgacttgcgaaccagtgtgcacgcccaagaaacgtgtgtgggttaggggtgttcagaaccttaaggtggttctgagaagcaaatcccgggattctgagggccactcttcatccgtttccctattgagcactggaacaaaaataaatattcaaccattggtccgtatagtgatgagccagacaacccgcaagaataaacggagaaccctgacagaaaaaacaagtcagggaggtagaacagtggagaaaagggaactcggtcaaagataggataatgagtgttagagacttctgtggacaaagcaaggctaaggtgatgtcctggaggctgatggccccgttttgaatccgccaacctggggactgaggctgagtacctacccagaagacaagtgtatctgccaggaggaggagcatctggacttttggcatgctgtaaagtgttagtataggcttaaccaacaacaaagtctcagtatgacagctgacagccttttaaagagcccctttctttatgccagaagacaaaacatgaactgcagtctacagtttgcattgtccagtcaagtttcttgcccctggatcagagacctaaatacacatcaggacttctaaactcacatgaactttacaaactgtttggaaaaagcgcattaggacattcagatctgtataatctacctacctattttgtttttcatctttaggaaaaaaggggtgttggaaacattctctggaacagaaaccaacaagatctggccccacgtatactccttcctacagacgaaagttccagaaactacccaaaaggcctctgttactccctgaagagggcagcaactggcaggatgaggcagggcctcctctcctcttcttgcctctgtatctcaaagctcttttcctaagacttctctaaaaattatgatttattcctaatggctaagccaaatgagtcagatacttagcctgatctgttaaaatagcctcacatgtttaatctaggacctggttgtcttctgtggacgtgcaattggaaaacgtcagagatgttgaaacaaactaactcggagagcaactggtgaccatctaaccttctgttcagttagtcaaagtggttgatcacattttcatgtttttctggaaaagttcaaaaaaaatttaccattcaaggcagataaataatctcattcgaggcttttcaataagccaatgcccactgcaattcaggaagatgttttctggcctgaagggatgtggtattagaagacactgtctatagatttcagaaagcaagcaacaggctttacagatgttaaatgtaaactcactgctaccttaacaggaaaagccaagggaacaggccaccatgctgtgtgtcctctacttatccaatctgctgtgaaaatgcagccactggcacgtagggacgtgtgacttggatatggaccaaggtgtatgacttaggttctgactgaagttctaggagcagcactggcactgacaatggcattaagtcctaagttctcccgtgtcactcagggtgaggaccaagttttaggacctacccgtttgtttccctctttgatccaagcggactgcctgccttgatgagcaagacagtaaacagaaaactaaagggtgacaccacacccatgggaatttgccactctgcaagtagacgggacatgctggggacagccccccagcagaaagactgactaattccactacacaacaggtgtagtaataggattttgcatggtgggttcaaaagcactgtaagggagttcccttaagaacattatacctgtgttgaagttctaaattaaagatcctcttgtctcggcctctctcaagtgctgggatcactgtgtgctaccacttcccaccctaatttaaagggaagcaattcttctggtaccatctaagcagcctcctcttctacttacagcagtgggatccaaccagcctgagtgctgggcaggcatcctatactgtggtttatcttcagccccttctgttgctgatgctggtggtggtggctcagttctgttgctctgacaggatctcactgtagttgactgccctgaactctgtagtcaggctggcttcaaactcagagccatcacctgtttctgcctcccaagtgctgaagttaaaggtgcgcaccaccaccacactcaggctggctttggattattatatagtccaaactggcctcacattcaatcctcttggtttagtctcctgagtgctta

SEQ ID NO: 26003 - DNA, 1105 bp, Mus musculus
tgttgctgtctcccacctggaaaagtgtgcccttatcagtttcttatctttctttcctcctgccctaatcttcagctgctaaactcctctgaccacccacctgaaggaacagcctatgtggccactccaccttgagatcttacatggttgcccagttctcctcttcccaaggcatagctaactttgttctctctcttgtgtctttcttcctgccttctgggatccagaagtcccgcatgtcccttccgcccaacaattggctcatggctttctttactgatggatcaagaaccaactggggaacaggaccttcccctcagaaccaccccttacagggaagcaggataactggggcttgttatagggaaacaggataactgggactgttaccctgcccaccaattctagctgaggggctcaggtttaatgagagtctggccagttcccagtagtgctttgtggatgagagtggggtggctggtgttcctcaggctatcctcttggactccacgggtatgagcacacacatgagcactgttacagaaacacaaacaagagaggtcgttcatgatttgagcatttctatacgttagaaaaagaatttgggagaacaggagtctgaagcaaagtggcgagatcattgagatctcagtggtgggacttactgggtccactgcgcactgctgctctctgatgtgctggttgactcttgtcaccaggcctgttggtccactgaatgggctgtaatgaagttagctgagtacatgtgcagtgtgagcactagaaggtgtaggtaggccagtggtagatggtatctcctgttactcagcatatgttcacagttacaggcaagcggtaaggttgattcaacgtagaactttgtggggtgagtagaaagggttgggatgggtttgaaagttgagatgaatcggaggtaaagagaggggcagggttggggaaaggcatggcaggaatggcagctgtgtgccggcacagcgttgcatcgtgactgaagacaataaaagtcctggggtcatgaggtcaagggctcagaagaagttggaatttttccatggtagcaagcaggagagaaggcctgtgtcct

SEQ ID NO: 26004 - DNA, 1192 bp, Mus musculus
agctaaagagctcgcctgtgttcgagtatcaagcagtttagaattaactagttgaatgggttcattgaactagtccatgaacaagtctgctctactgggacacagaagatatagcttttcatggggacggaggagaggagggagtgagggttcaaaataaagcaaccagggaaggctaagatgatggctggcgcactggcctgaccaaaaggagtgtcccccacttctaccaccacccctctttcatctgcctctgtctgtctctgtccctccctccctccctctctctcactctctctctctcacacacacacatacacacacacacacacacacacacacacacacacctctccccatctgttttgatttttctgtgtgtttgcctgcatgaatatatgtgcaccacatacatacttggtgcctgggaaggccagaagaggttgtcagatcccctgcagtacgtggctacgagccagtctgtgagtgctgtggtgaatctgagtgctcttcgtgagcagcaagtgggcttaactccaagccatttctttagtcccaggactacagcctctcagctgccccagctgctgctctgtggagatagggactcaccttcagatttatcaaggtagaaatctggatttgtgtgtggatagagttgtgccgtttattctagggcattgaagactgtttggggaaggccagactgtcacagcgtggtggaggctctgggaagtgtgagaacttggcattgttaaagatagactttagccagttactacgtgtgtctgtggttgtgtgggtaggatgcaggtcaggcaggtgacctgacttcttcatggctacaaactgttgatcacatgtgcagcaggcacaaaagtgagcacacacttgactttcccacggctgaggtgtctgacaggaaggaggagatcgtgagggaagagaagatgctggcaagaggaaagtgtgttcctaagcgagcccattatggatacagttcctgcacagttgaagactgcttacaattgtagtctgctcccctgtccaagctgatccaagccggccttgaaccctgcgcactagtcatgtgatgaacgtcatcattctacctaattaaagataggagcccctcctgatacagctgaagagcaaggcgtagccattgtgcttgctgctaggagcagtggag

SEQ ID NO: 26005 - DNA, 1355 bp, Mus musculus
aatagagactcgcagaaaatactgttgagtaagtagaaggcagttgctggcgttcaggataagaaattgtctttgttcatctttttttaccccatggtgctctgactaaggggagaaatgtaatatgcaccactcaaaattacctccatatttgtgactgtaataagtatgtgggacgggaaggctgagtgtcttacactaacctctagcctgtctccagccgaacttaccttgctgaggtgtgtgtgcgcgcgcgcgtgtctccacaggctgctccaggcctcttgggaagctgacaggctataaatattaaagcctttttgattagacagttttaatttcaatgtttttagtctcagaaattaaaatttggggtcttaggaggacagagtttcttttaaaatgaacgttctcactatttctttttaggatagaatttttgcggcatctgaagagctttttccaggttatgtttaaagttgaaaccaagccatgtggtgaagaactgaagggcggggacaaagtgctaatgacctgcgttggtattggcttctctaacctgagcaagaccctcaagtgatcctgtacaacgtcaggctctgctgtgcatggatgaagcagaaagatgcgaaggaccacagggaccaagtccaggcatgtccatccaggacaggcggcctcttaacattacagactttcttttccactgaaaatactgatttgcaaatacaagctgtctctcccacgtgacttccagctgcttctccaatgacattcctcggaggcccaggctgtgggcttccagactcacctggaggaggggccctccgtgagtggccacgctgctagacagtatcccagcagctcttcttcatctttggattgtggctctgtgtagggtttatgtgacaacgtgacagtgtgtgtagaagacctccagtctgttgtgccagaagttggggcactggttccctctctcgtcttaggaataatttgcttgcatgggcacatgctatacctcacatggtaacttgtgtttgtgtgggcctggtggttgggatggggagggcagacatgtcttaaatgttttctgtatcccaggtatggcataaaattttgtttttattcttctaattgcactgtagtgtaaatcagagtatttatttttcatttgatgtttataattcagaaacattagatctgatttaaagatgtaacagaatctgggattttatctacatataagctaatattccaatttcatggatgctaatagaagacatcaaagtcccaggacagagacacagaactttgtagcctggcaggcagcataaacatatttaaactgatgtctc

SEQ ID NO: 26006 - DNA, 1162 bp, Mus musculus
cctgatgcagcgaaaaagggggtggtcaaggctgaaaagagcaagaaaaagaaggaggaggaagatgacgaggaggatgaagaggatgaggaagaggaggaagaagaggaagatgaagatgaagaagaagatgatgatgatgaataagttggttctagcgcagtttttttttcttgtctataaagcatttaacccccctgtacacaactcactccttttaaagaaaaaaattgaaatgtaaggctgtgtaagatttgtttttaaactgtacagtgtctttttttgtatagttaacacactacagaatgtgtctttagatagccctgtcctggtggtattttcaatagccactaaccttgcctggtacagtctgggggttgtaaattggcatggaaatttaaagcaggtacttgttggtgcacagcacaaattagttatatatggggacagtagtttggttttttgttttgtttttttttttcttttggttttctttttgggttttctttttttcatcttcagttgtctctgatgcagcttatacgaagataattgttgttctgttaactgaataccactctgtaattgcaaaaaaaattgcggctgttttgttgacattctgaatgcttctaagtaaatacaattttttttattaaaaaaaaaaaagagtcagttcaagattttggtgaataactcagccacttggggaagaaatctaacagcttcaatgagaaagtcagacaaaaattaattgaaaaaagaaagagaaaggaagaaagaaagaaagagagaaagaaagaaaataaaagcaaattatgtaaataaaaaggccaacaaataaaataaaaactcaatgggcagcaccaacaatagatcaggttagagaaagaatatcacagattgaaaacaaagttaggaaattactatattcagatagcaattaagaataaaattaagagagaaaaaaaagaataaaagtaagcagtcatagctacaacatctaagacagacctctagaacaaaacctaagagccaaccctatgaatatgtagtgttggagaagagactaagatataaacaaatggtatataatgtttggattaaattaaggtagaaaatttcccaaataaaaggaaagagtgtgcattcaagttctggaggc

SEQ ID NO: 26007 - DNA, 1103 bp, Mus musculus
atcctattacttattactccaaggtgggctgtgtgctttgagtttagagttacttacgttccacctgctgctgctcttgcttgatgctgtgtttgtttgttgtttatggaaacaaagtattattctaggtagcccaggatagtctcaaactcagcttctcttgctccagctccctgggttttggggttacagatgtgctccaggatgctacactctgtttcttgtgttttctgctgacattataatcatgttatcatgcacaaagccttttgtttcacaacctgcattcagcactgctctctgtgttttatagcacagccctggtaacttttagtgtgctgagggtggctgaacttagtgctctgtgcttgaactctggaggctgatagactgtctcgttgtcttacaggttctacttccctcattggtactgtagtggcagcagcagaacctacagatacggagtgtcccgtggggctgaagctcctctgcttgatgactttgtcatgtcttacctttttgctcaggtataattataatatagttaacattaatcctctttatgtgtgtattaaaccagaaatttcttcctatttagtatgcatcttaagtagagtaactttcacgtgggaaaatgcagctctccctgaggcaccaggtatgaagagataagggggtagtctgtgtgataatcggtttccatctcatgatttacagatgtattttataacgattccatgaattgacccttccaaagtcactttttttttcttttaaaatctaagtcattttaaggattttttttttaaggtagcataaatttaacagcagaattcatgtggccattgggtggtaaaattctatagagtttttaataaataaattttggatactttcgtgtttacatggtaggcagtaaaatgtaacaagattcctctacaacaaacagagtgagctgtgatagttggtaggcccctcaagggaggctggccacgtttgatgcttagagtgggagctgtgttcagctatttgtccactagtactataatgatacacttctgtagtgttatttgaacacctcgtaatgcattcttttctattat

SEQ ID NO: 26008 - DNA, 1197 bp, Mus musculus
tgtgtttagcttccaagaaaacaagtctggtctttctgatggattaagaccaccttctatgtttctttatagaccacacaaactctagtacaatgccttcaatatgaagtccgtgtacatttgattaattaacatttattttggtttaggcatttttaaaatgattttaagataaagctttacggctgggcagtggtggtgcattcctttaatcccagcagttcggaggcagaggcaagtggatctctgtgagttctagcctgtgtagctagcctggtctacagagcaagtttgaggacagtcaggactacacagagaaaccctgtctggaaaaacaaacaaaacaaaaaaaagaaaaaagaaagaaaagagaaagaaagataggctatgaacccaatttaaatcagtttctatttgtatatgaaccttggttaattctttgtggtataattctttgtggtataatgataaaagcagaacttggtttattacttttaaatgcgtattttaggagctaacttatagcatataacataaatgtgatagtaaaacctgagccatggccttatcgtttctgtttttcagtggcggcatgattttgttcacggatggataaaagtacctgtgactcatgaaactcaggaagagtgtcttgggatggcggtgttagacatgatgagaatagctaaggagaaagaccagactccactggctgtctataactctgtcaggtaatttcctctcacaaagcattacatactttgtatcgtttgcttgtatttcctgtgtttgctcacacatttgattttataataaaaatggaggggttatggagatggcccagtgggtgaagtacttactgcactgtggttcatatccctgaaccacataaataccgggatgacactgtacacctgtaactgtaggtgggtaggtcaaggcagacagctctcagggtgtggctgaccaccgttcgacacagtcaacacagtgagacgggtccaggctccgtaagagactgcctcataaaataaggtcgagggggctagagaggtgcttgctacaccggcttgctggcctgagtttgatccgtgaagcccacaggaaggtagaaggagagcactgacctaagagatttatctctgacctccaggcaagtgctgtggcagtgtgcccccaaacatgtcatgggcatac

SEQ ID NO: 26009 - DNA, 1145 bp, Mus musculus
tcttccatatcttcttcagtcacaccacactgacaccccatttgtctttaatttgttgcctcaatatttgtactttctagcctagattaaattatactaaagttgtagacaggtagtgttctgtaaggatatgatgattggctctgctaaagcattttccttctgtcatttttgttgttttgttttagaagacagagtctcattgtctgactcctgaccagcctagaccagagtgtgtacaccaggcggacttgcagagttttaaggcctcctgccttactgatgctcagccttgcttacagaacttctccctctccttctccctctccccacccccccaagccatgtgtgtgtgtgtgcgtgcacccacctgcctctgcctcctgagtgctagaattaaaggtgtgcaccacaatagctagcttgcagaagcaatttttgaaagccattatatttatactcattgctttcccagtatgctgtcttgcaaggtaattgacttgagttgcttgcttccgtccagtttgcagtctgtgctggaagatctccttgttgcaacttctgatggacttcttcatcttattcattgggaaggaatgacaaatggaagaaaagccatcaatctgtctacagtaccattttcagtagacctccagtcatccagaggtagttatactttgtatatgagatagaaccagttgtttaatattgggtgtatggtagtactacccaaatatgtgatacaatagcttattataaccctactctatttatgtgtttttcatcagttggttcattcctcggctttgcagatgtgcacattaaagatatggaatactgtgccacacttgatggatttgctgttgtgtttaatgatggtaaagttggatttattacaccagtatccagtagatttacggcagaggtgtgtattgtacattttaaattattttattttgcatatattaattttgctttgttttcaaatcctatgctctcttagttcacataatttttattcctactatatagacagttgcagggttattgactttatcctatggaaaatgaccatttgcttcaatcttcttcaaccccaacacactcataaatcttttcaataaggttattattgtaatgagatt

SEQ ID NO: 26010 - DNA, 1208 bp, Mus musculus
tctttcactggtgtgtacacaccacctcttcctggtctggcttcttttgtctcctgtttattcttattccctacattcaattctacaaattggtcttacgaggcaactttgtgccttgcatggtggtgtattcctgtaatccagcaattgagaagcagaggcaggaggatgtttgagtttgaggccatcctggtctgtatatcgaactccaggactacacagagagacgctgttttaaaactgaaaggggtgtgggcaaagttaactctgtgctgcatgtttactaggctgtggtgtgatgtgggaaggccccggagcttttccttcctattcagacacaattagatatggaactcttgcttccttttcaactttatcaatgctacctaaaagtggggttctccaggggggttattctttcgctttcttctgtttcttacagatggagcaaagacagtgaatgtgctgagaacatgtatattgacatgatgctgtggagacatgcgcggcgcctcctagaagaggtgcgcttaaaggaccttggctgctttgcagcccagctaggctttgaactgatcagttggctttgcaaagaacgtacccgagctgcccgtgtagacaactttgtagtagccctgaagagacttcacaaggatttcctgtggccacttcccattatcccagcctcttccataagttcccctttcaaaaatgggaaatgccgagcaggtaatgtagacttgagacgtgtttacaaaattatttattttagatatttggacatgttatcattggttgacattcaaggagctcttttcattgcaaatgtaagcagataaaagccaatttgtggtacaccagttagaatagctcccagttgaccaaagatataaatgaagtcgaaactaatctttcttaagtctttttggcttgaagtttagctcacaaatctaatcataataaattgtaaacaggttgaaaatgaatgtagaaactcctacatttaccttattgtggtaacaaatttagcatgagttagtcaggagccgccaataaagtgtgctgtcgtcatttaccatcaccttgacatctgtgtcctttcctaaacttggagaggacaaagccaaactgagttaaaaacaatccgatatttaattaagattctagttgttcaaacaaaaccattttattatggtgtttaggaactt

SEQ ID NO: 26011 - DNA, 3216 bp, Mus musculus
ttcaggatggggcttatgactgttctgtgtcctgacagcagtgagcacggcacagcgggcagtattagtcacagcagcttgcaactgagtcattgtggcctgccgaatgacttaacaggtaaaagaacttgggtcagaactctttcgtaaagtattataatttaatgaactcttcctctaaatctctttgactccttaaaaaaaagtgtggtatcaaagcatctttcataagaaaaatttaagctgcaatagaaagtagtgaacagtatatagatgcacacatggaatattttgattttatttacaacagattggtagttgtagggattattcttaacaggagggattattttgccccaagcgagcttactttttcactacttacagcttatatattttctggtttagtgtgtgtctagactggttttgtttttgtggggtgggttgtttgtttttaactttcttttaaatatgtgttaaggtgctgtagctcatcaggtaactgagctacttgtttgcttccttgtatagagtcagcgggactctgattggtcctttgaatcctactcttgcacagtgtgggtcagtggacagagaccctttggctttggtactctgttgactagcagtcctgaatgacggaagctatttacctgtgagttaatgtgcctgttttagcaagcttaatttcctactagatcaatgtgggcagagggtgagggggttcttatcaattatgctgacaccactaaattttgtatcaaagaactgtatctttttgtgaatattcatgtaaatatactcaaaggcactgtccatatttttaatgcgtgtattataatgtgtaaggttttacgctggattctgcatgactatactcactcttggaataaagacaagactttttcttctttccaaaatgagcagttgtcatagaggaagacaggtttgttggcccagctgtaaagtagtggtcatcccactgatcatgaggcggaacaggttttgtgcaaattaatgtagtttcttatttattgcttttgtaaattgaataaaaacgggcttttatgtaaatagactgtgggatcctgtattatcagctactaaaaattagtttgtaaattctttattataaagtttaaaaatattttatgtatttctagatgtgacttaaattttagtttttcatacattatgaaagcagaactacatattcagttgcttcagactaaacacatacctatcacatgtaattctaattattaataacagtattactttagatagcttatttgtactgtgcaatttgaacaaggaatgcaatgttattttttataaaatcttgtttatttttataacaacaatgtatttgatgtggaccaaattcgtaccaccatgtaaaacagcctctcttctaatgcagatatagcttagaagtggagttcagccctctatccctgccttttaaactagagagatagacgaggtcctcttaggcagtatcttttagaggaaacctcagcattattttgaaattatttcaaatttcaccaactagttaaaattattgaatttagtaattactgttatttactttctacattagaagtgcaataattttacataataaaattactggatgggtgaaatatgttattggtacctggtccttctggtgctatttttatttaagttgtatcaaaccaccaccttgttctgaattttaaaatagagaataaggtttcctatatacgtagatgcagtgttgcaaaataaatgaataaataaataaagcaagctgaaatttcttctgtcccattccattagggaaaaaaaagccagcaattcttttgtatgtagtcagtttctaatgtaagtatttagttattaaaacagtgtagcatagtaagcagcagtggtctttccgatgtctcacctgagtgccactgagctcatctgactctgtggtaggtgcagtattaaggatgagcagggggccgctcagctaagcaggtgtcccacgagtaagttagagcccacaacccccaccccaccccaccccaccccacccctgtcctttttttttttttttttttttttttttttgaggcatagccttgcctaagctgaacagctatttgtaacccttcctcagctgtcccagtaggtggagtttacagcatgtgccatgtgcggccatacccagtcatctgactacacctcacaatctaaagccgggtctgaggtagctgatgttactcctgtggtttgagctgggaacgactcacggataaaaatatatagtgtgtaactagtagaactaggaaacaccaaggcaagacatttggcaagtttaataaaaactattctttggttgttgtatatttttttaaaacttgtattttgctgcattgtttggtttgaaacatatcacctgtgtaagccatatcttgaatgaacttaaatgttcgccataactatttgaaagttaatatatatggttaaatttcttgctgataccaaaagagatcatttggagataaaaacaacctttgcttgtaattaaagttgctgctgcttctgtatgtgtactccctcctccccgccccccttggtaaagggtaataaaacgactacacaaaagtaaacttttgtttacttatctcaggttaacagcaaaaaaaaaagggtatgtattaaatgccacaaaaataagtcctccttcttatattctcctgaatgaaatacctcaaagttgaaacattgatttagagtatttagacagagtgggaacatccaagtgcctgatgacagaatattgggaccactcgtcacatgctcacgacatagtgaagaaatgatagaaaatcatgcccaccatgtgatcaccaagcaaacagatgtgtacaagagactaggcgtcctctctagtaggtagaattatacattatttgcacagttccccatgtcccttatatgctttgtggatcatctagagtagggcatttattaccttggcatcatgctttgaacatttttcctatatctacttgactttttttaaagctgaatgatgctgttttgtgaatgtgtttactgtcagtttaaaggttacagtctgggtgtttgactttaggtaactctataaacattccacacagtaattctccctcaccctgccttgctctcgagggcttcagtttcccagtttcccag

SEQ ID NO: 26012 - DNA, 2402 bp, Mus musculus
gcatgcctcttgagcagctttcctgtgaggatcaagaaagatgtaggctcttagaccactgctaatgaaataggcaagtccacttgccagtggaggtgggtaagatgcctctctgtgcgctacaactgtagtactgggaagtaaatgccacaaaggtggaagccgctgcagcaccttagatgttcgagcgctgtttcttcaggcagccgttcagattttttttgtctgtttggaagcctaagccctgatgcagaggcctgactcctgagtagcattcagtgtctgcttttccctcaaacacattcctgtcatttacctggggaagagaacatttttttcagctacattttcttcttacatttcatgggttgctttatttgtgcaagcacagaacttaaaacttcttccccagagcactgaattgccagcatagctgctgaggtggaagaggaggagggctgggaggactggggattttataatatttattctgttatatataagattaatcctttagcacaagttctttattgctgcattgggttttctgttttctagcaggtgactaagttgttgtaacttgccgtcagtgagaaccggctgtcctgatgttgaggttgtagcttacacaggagacaactatacctgtatttgttaatttttagatcccgcataagggcagcagtcagacttaatggtgcttttcattttgaagacagggatgtagcttgtgaggtatgtcacggcagtggctcttgtggcgtctctaggttccatcagtgacagaggatgagatgaacagtaaattattctaattttacagtagtaaatatacaaagacaaaatttgagttagctaacaagcatgacacaaaatgtagttgaaagaaaagccatagtaaggcaaaaccaaaccaaaccaaaccaaacaatatccttgtcaggtgagaacaggaaggcgcctctcagagtggccctcagaactgtctgaatgtcaacaagagcactgttacgtgtgcaccgcagaagaggagcctctggaaattgctcgtgtggtacgtgtcagtttcttaatcgtgttccttgtattgcctgcctaatctataacgccttaaaaacgctgcggctggagctgatagtaacatgctgactgtcacaagtggtgacacttaaagtggagtcagtgttttgctggactcacagaaatcttatctcactagtgcttcaagtgtctggctcctgctgtgtgtgtattctctgtcaggtcgtacttaaagggttgagggtttatgtctagcttgtagagaaccacagctgagtaacagtactgatagctcaatgaatttcaaaatacgggcttatgttctgtgcccgggttaatctgaaactgattactagaaattatgggggaggagagcaacatgtcatgctgaggaagttcactaggacaaggatgctctctgacttccttccctttggcaggcaccttttcagtgtaatcaatcatggttttctttctgtctttgggttgtttctctatgcaaacgattttcattttctctaacactattatgcaaccactaacaagatgttcagtttcaggcatgcttaacggccagaaatggtcaggcaattacatgcagtattcatggcttttaaaaagcacactctgtagttatcactagcctcctacctttaaaggttatctgatcacttgtgtaattcacttctcaaaagatagtttcaaggtctaagtaatgcatcccccagaagagtataaacagaagcagcacactagggacaagtatgaagaactgaaagattgttctacacagcgtttccagcttagcagctataactaaatgtctgagatttcccccaaccctgattttgctgtgaaagagattagaccacaagccagcctaggtgactcaggaagctgttggaagaacatgtctgtccatctcattttcacttatttgctgacttgttgagggttaatcgttgccttacaatgttactgaaataaactttttaacacactggttggaaaaaatggatcttttacaactgctttttattctatctccatattttaaggctattttttatccctagtgtctgtctgtctccgtctctctctctctctctctctctctctctctctctctctctctctcgtgtgtgtgtgtgtgtgtgtactatctttaaaatgctctatatagcttgagaattactgctattttaataagtggtataagcaaagaactcgatagaaatggtcacttcatctggaatcttttttccctggaatgaaactgtgcatctgaatttcagagaaataaaaagaacctgtttagcaaatgggaagatccggagtatatttaggtttaaatcttctcc

SEQ ID NO: 26013 - DNA, 1164 bp, Mus musculus
tttgtagccctggttggcctggaactctctacgtagaccaggcaggcctctaatttgtgtaaatcctgagtgctgggattacaaatgcttttttttttttttccaaaaaaattttttttaaaagacaggatctttgttatgtattccactctaggcacaaaatagggatcctcctgtggccatccttcctagtgccaggattacacctttgtccagtcctggttgtgaagtcttacttattgatttggtaggcagaatcctccttttcccagtattcatcagcccagcgcaggataaatgcctcgtgtattctgttaaagcggccttgcacttctctcttgcttagggctgctcatttctaggtttatgggtgtttttccctttgacagtctgctggcaccaggctgggtgtcagcctgtgccaccaaagatctcagactcaggcaccagggaacagcgaggcggaccagccaatcagaagaaatttggccctctgcagtttccgtccgctcactaggaggcgctgcggaggccgcggtggcccggactgtcgcaggctggggcggttggtggtggcagttgccgccatggagtggagctcggagtcagcggctgtgcggcggcaccgcggcaccgcggagcgtcgggagggagaggcggccgcgtcgcaccggcagagagaggcctcagcgcaggaggatgcgaagggcgtcgggaggatgtgggggaagacggagaacggcggcgggagccgggttgcgaagaccgcgctgtccgaggcgcgcacggcgctggcgctcgcactctacctgctcgcgctgcgggcgctcgtgcagctctcgctgcagcggctggtgctgagccggacctcggggctccagggcgagttcgacgcgcgccaagccaggtacggccgatcggcccggccgcgagtcctctgcggccccggggtgggggagcgcctggtgggtgagtcccgcgcgggtgagcccggcgccactgtgccccaggcggaggaggccggcgctgctgtatgcagagtcccggggtccttgggcgcacctcggtgggaagtgggatgatcctgcgcgtcctccgggggtctgaattgcgggtactccgggcttcctcggctccctctttcgctttcttggggtggccaga

SEQ ID NO: 26014 - DNA, 1144 bp, Mus musculus
taggcagctgatttccttgggccttataattccttattctcagcccatataattgctatatattataataccccgcttgttaattattttcccaaagtatttacgtatcaaaaatcttctttctcaagatgtttttagatcattgtacattttctcatacattaataaacaatatgagaactattttaaataaaactgtctattaaacaattagtgtttcagtccttagtttgaatgcttcaagcttgtatttttaaaggtagaagaggtactgtccctcagtggattttatatgaaagagttagaatcttgtatggaaaagataaaactcaaacatggcaaagaaaggtttgagtaaatattttgtatgtggacagcaaaagaagttctactgaggtactagttggaagggtgcgttgcctatccagaaggtttgaccttgtgaattgacttattcttctccaaggcacttgagagaaaagacaacgatagcagttacatctagaggctactatggattggaggaggagaagggaactgcatgtccttcaacaaggcgtcggtcaacacctcgaagtttggcaggtttgacaagtggagtttttgaatctataatggttcaagttttgagacaggaagaacagctgagagcaaaagaagaaaaaaggtaaatgttaacatgttaactgttcagatttacaaaaattactttaaaaaagaatagctccattacatgccaatagcacagttttggtcccattttaacaggattccgtatttagtagtagtgcactgtcaacaaaatatgaattgttaatggatcacagtgaaatttgttttaaagtatattttaaattataaaacaattattttgactctatacaaaaataatttttagaaaagattttctaattttctagaaatcttctcaggggaacttaaaatcacagcaatttttttgtttgtttgtttgttttgattttttggagacaaggtttctctgtgtagccctggctgtcctggaactcactttgttcaccaggctggcctcgaactcagaaatcctcctgcctcagcctcccaagtgctgggattaaaggcgtgcgccaccaccggctagcaatttttatatagacttgtagtt

SEQ ID NO: 26015 - DNA, 1104 bp, Mus musculus
gtgatgcacagacatacatgtagcccaacatacacatccatacacataaagtaatataacaataatagtagtaataaagaaaattgtaaaggagaaggtaacaacaaacaacttggtagaaactcattttcaggatatctgcaagcaacgatagacacctttaatctttcttttctgacccttgtagtttgggctagcttaccaacactacttatctcaaatgaatcataatcctactttgttcatagtccttggtaatagaaccaacagtgagaacacacaaaatgagaatggccttggctaggactagtactggtggcatggtgttagtgtaggagggtctggagccagggcatcgtgatgatgagtagtccctggatttaatgaacgctgtggctgagagcatgaagacatgttactagcgttatagacttacagacttgacttagctattgccaacaagtaatgtttaagttcttgaaagagtcttatcttaataaaaaaaaaacaatgtatatggatgttttgcctatatgtatacgcaaaccacttgtgtgcctggtgcccacgttggccagaagagtgtatccttggaaatggaggtttagagacaagtagttgtgagctgtagtgttggtgctggggatcaaacccagattcctagaagagcatcaagtgctcttaatcactgagtcaccctccagccttgaggttcatctttagatacactggaaaaatagttaggaaaactgctacctgaggttttattctgtccaggaagtattatcatttggcaaaaagtatgatacaaaatagcacaaataagaattggagctttaaatacaaagtaagccagtgcttattcaattttacaattttagaagtcattgaagatggtttagaaataacactacccaaaggatagggcctgtacttttattttggtgttagaacatagaacaaaactttcgtatttatttagctgagttaggttttttggttttttttttttttttaatgttgaaaactttcttgattagaatcaatgctggaaatgagatagatcagttgttctcaacctgagttgtgaccctttgggcttga

SEQ ID NO: 26016 - DNA, 1106 bp, Mus musculus
caaataatttgcagcacagtggtagttcatgaggaaaccaactctactacataatttttcaaaggttatattcatgaaattgtatgtctccagagcctaagtgttatccagtaggaggtcagatcctctggagttggagttagaagtagttgtgagccacccaaaagggtgctggaaactgagctttggtcctctggaagaagaaagagtgctcttaaccactggttgattatcttcagcctgttttacatcattagggtctcatgtagctcagagtggccttgaacttgcttttgtagctgagatagacttacattcccagtctatctcccaggtgctggggttagaaacatgcactgcatctaggttcaagttctttatctttacaataatgtttaatgtatgtctatttaccaaaataactagcaccaggtattctttttgtgggcagatggtaatgggtaaagtggtcatactgaaaatggggcttgggtacttggatccatagaaatgtcatagtcagtagagggtctatcactgtagcctgtgtgttttggaaacttggaggtccacctgctcaagcctcatgagtcctggtatcacaggtatgtgcatccaccttagggcaaaacatgctgtgggtaaggagagtggaagaattagtattggaggttaattataaacatgttaagaggagttgaaatggtgtttgcaattgattactcagtgttaaccatatctgaagctattctcagcctgtggtacatgtctctgagtagtcctagttatagctactgcagatagaatctagagaggcagttgtgaacgaaccgttggtgttttttgatggaagtaatttttctaaaaacaaaatgggtgtttttgagagtattgatgtgttgtgatttttttttaattaaatcttttcaagtataatgatttctagatttcgatagaaaggtttttcttaagtaatggttgtcatgttgatcttgagtatagggagctggaatcaatcttgctgcaatgactaattgtcccgtttctcgtttgtgactaatgtgttaaccgtatttcaagtgttcgatggattacaaggttctgag

SEQ ID NO: 26017 - DNA, 1155 bp, Mus musculus
tcccaaagcctaagaaatataaagaacgtatattatattatgcaataaactgagtattttgtttgagttgcaagtcttttgtctattagattttagttttaattaattgaaatttctgtgcatgcatgtgccttgatacaagccacattccattccattcctacaacttctcttccctatctgtgccacatttccctcccaacttcatgtgttctttctctctcttaaagctctgagcccagtgctgcctatatatgcatcggtataggaccatcttctggagaatgagtagccacatccctttcctctcccagcacccatcagttaacaatagtccttattcaggggtgggacttcctggcttcttctgtctctctcactgggctgtttgccagactgatctcatgcaggtgttacgtatgcattcacagctgctctgagtttagttatgtaacaggcctgtcacgttcagtcagtatatactgttttgctatggatatcttacttacagctctttatatcatctttacatcctctcttccgtgatgacccctgtgccttgggatgaggttttggtagataacatccatgtagaactgggtagtaggacagtcttactctttaccactcatccagctgcgagtgtctgtattaatcaccatgtgccaaaagatatttctctaatgagggatgggagatgcacacatttatgtgcataaaaaggagaaattggggtagtttaatattatgtataagatttgcttgttttaaacttaagcttttctgatttaatttcttcctgtgaacatctatttgatgtgttcttttttattataacattgaaaaatacctaacaatggaatgctctgccttttaaaagtgttgaataaactcaggttatttcggtaagtatttttaaaatgctgtattttgggcttagatatttttaacccagttgtgtttctaccgttataaaaccagtaattcatcattgctaatgtgtttgaaaatgagatgtattttcatataatttgtaaaatccccatataagcagttctgagtaacctgtttgtaagttctaaattttaggtggcataggatgtcataatattttctgttagaatatgaaatgttttctttttgcatgcagcttga

SEQ ID NO: 26018 - DNA, 1420 bp, Mus musculus
gcaagagtagtatgtgctctaaccactgagccatctctctagcctttagcatttccttctgatcccaaaggcataaagtcaagactccaaagttgaaattgtgaaaaatggtgggttttggcatgtgttgggccaccggtgccttgggctgtgggaacatccaaaacccactgtctcgatttacccccaaaggactcggaacatccccaaatgtcctccttttccctttcagccctttgtgaaaccagagaacaaattctggccaaccattgcccggatcgatgacatctacggagatcagcacttggtctgcacctgcccgcccatggaggtctatgagtctccattttctgaacagaagagggcttcttcttagtcctccctcctacgttcaaagggctgacccgatgtctcttgctggagcatttgacaagcaaggatatttcttctcctttacgtggctcacacatgagttttatacgctgtatatttttataatctttcaaggtaatgtaagcacaattagcatggtgagtggcggccacctgctgtacggcaaggcagtggctgttcgtgttgccttgattgggagccatttagtttgccggatagaaaatgtggggtgcgctagcaattttaacattttaattcaagaagtttgcagcagtcagagcctatgctgggaattcaatagacattctttttgttccaaataagtcctcgtggactgtgccctctgtgggaaaccccagggcaaatgtttacattttatacactgaagaattctcctcactaatgtgcctgatctgtcacagcataagtgtcctcctttcactgtgcggacttttttttttatctgcttttattagtgtcctaataaaactgagtttgagtaatgcgaatttcccatttgattttacacccatgatacacactcaggacgctgaagggtagcgggatctctcggcccaacagccacgttttcacggacagtcacccttgcttttgactggctaaggacaatctgtacagcctacttattagagaaggccactctggcgctttttatcttgggccataggtaacttaacctcaacttacggaagattaagtagcagtttctttgaagcccagagataacaagccaaggggaggggcagaatccttgaatgaacatggaagaagtggatcttgtcctaagtaaacctgctactgacaaggaccagtgcctccgactcaagggaacaggcaaagccttacccatgtcaaggtgaggaaccgggccgagtcctgatccatgtgcagatgttggtagtgtgtatagaaactagcaatcatagctccctccgtctggatgaatgtaacctgagaatgtccctacacagtcagtccccctattgagacaacctaactccttctc

SEQ ID NO: 26019 - DNA, 1126 bp, Mus musculus
agcctcaatgttctttctctttctacaggaattagttgctgaaggcatgggagaggagcggagaggtcttctagggtcttcattcaagagaaccagcccgttcctcactcatcaggtgttcaacaggtttgtgtggcttcagcaaatcctgcattttgtgttctggtggtggatcagggagccctggggaggatgcagtttctgatgctgaccacgctaggacctgggttattgccactcaggcgagctcactgatagtcatgccagcaagaccccatccctgatgggagccaagcatactttgtctcctgggagctctgctgtgctggggagaatttacagatgaagttcatctcaggaaccccgtgtcctcttctcagtggccccttgttgctaggggtgctctgagatccattagagtctctcccctccatatccatgagtgaatgggtctttggagtcaggactccttattttgtatgaggaccggcctgactctaatttaatggctccacccttgtgtcttatgttcacagctatcactcagaaactaatcttgtccggtatatgaagaaactggagaacaaagacatctccctcgttcacagcatgatcccactggtagctgtttgtggcctttctccttacttctagccctatccggattccccctgtgggtcatatccgatacactgcaagaggggagcaacagggcctcgaggggggtgggaaggttcatagatggggcatagccaagcactaatggatgttccttatatatgtgcttcttcaagggatcctgcaccatgaagctcaatagctcctccgaacttgcagtaagttggtcacgtctatattattaagggggtatttatgggccagttttccagttggtacagaagcaaatgacaaaaacctacctagactgtgactccgtgccttaatgatcctttactttgtcattctccaatcgtggcagagaccctgatatttctcacaacttgatcagttaaatttatggataaagctgagtgtagctgtgttcatgctctttctcatacacgcaaatatatatacacatatataattacagaccctgccaggtatggtggcatatgccattaat

SEQ ID NO: 26020 - DNA, 1166 bp, Mus musculus
ctctgatgcagacctctatccagggaggaattccagctccggggccaataccagctgcagttcctggacctggacctggttccttaactccaggaggagcaatgcagccacaagttggcatgccagtggttggtccagtgcccctggagcgaggacagatgcagatatcagatcctagacctccgatgcctcgtggacccatgccttctggtggcatacctcctcgaggactactgggagatgctccaaatgacccacgtggagggactttgctctcagtgactggagaagtagagcccaggggctatatgggaccaccccatcagggtcctccaatgcatcatggtcatgacaaccgtggccctgcctcacatgatatgagaggaggaccattggcagcagatcccagaatgctaattggagagcccagaggtcccatgatagatcagagaggtctacctatggatggtagaggaggtagagaatctcgagggatggagactcggcccatggaaactgaggtcttggagccacgaggaatggagagaaggatggagacctgcgcgatggaaaccagaggcatggatgcaagaggactagagatgaggggccctggccctagttccagaggtccgatgactggtggaatccagggtcctggccctattaatatgggggcaggtggccctcagggacctagacaggttccaaatattgcaggagtgggaaatcctggaggtaccatgcagggggcaggtatacaaggaggagggatgcagggagcaggtatgcaaggaggagggatgcaaggagcaggcatgcaaggaggagggatgcagggagctggcatgcaagcagggatgcagggagctagcatgcaaggagggatgcagggagctggcatgcaaggagccagtaagcaaggtggaggccagcctagcagttttagccctgggcaaagccaggtaactccacaagatcaagaaaaagcagctttgatcatgcaggttctccagctgactgcggatcagattgccatgctgcctcccgaacaaaggcagagcattttgattttaaaggaacaaatccagaaatccactggggcttcttgaatggttttcaactaagaagcacttagttactccttcagagtttattctgtggca

SEQ ID NO: 26021 - DNA, 1659 bp, Mus musculus
ctgggaactacataaaaattgaaagtgacttgttacagtattgatatactaagatggtttaaaggtttttggttgtatattaactgaatgtcagcatcttaagatacactttttggtaaaccaaaatactgtagagtaataagattaatgtttagttattttggaattattttgaaatattggagctaacagtctgtggtgtagatgtagggttttttttgtttttgtttttttttttttaagcattgttatctgtaaaaaggtaattttcatttacctgacttttttgagacaactaatattcttgcctggtcccacctggtgattttgcagaatagttgtagtgtcagctgaattatataaagccgcctctgaggagactcaagtgatttcctaatacatttctctaaaaaaattcttaagcaccaagtctggttgtaagtagttttttcatgtcatctgaaaatagcagttagacatggggtcggactttcttgagtaatggagggtttttcagtaaagctcccacccaggttcttgataaaccactatccatacgcagatggaatccatttggtcagcaggaatcagaagttaaaaaatcttagtcttcgaattttgacgtgtcttacagtttgataactttcacaaagtactttcctgccatcagcttaactagaactgaggcccaagtgatctgacagctctgctcaacttagtattttatttcttagaactctcaagagccatttggtcataacatacattcctatcagatgtgttttaaaataaggagtgtggaatttaatacatttcctttagagctaccatactattttttgacattaagtgtgtggcacctagacaccatgtcatatctagttaatgagcagaaacaagcacaagttcccacttgaccaagtgatagtcctctgtaggaaactaactacccagctacagagggaagagtagccttagggagagagctgacccaagggtctactttgtccttggaaagtttgagcattttcagtgtacagagttttcattcctaggctattttccatcgacttagttttttgtgctagtgttaaactctctgtggtttcctctgcttctcctttgctgaagttggtttgtgttttgtacttttgtgctagttctggctaattccaattgcttgctttcgaaattgcggttgctagcccaaaacttcttatagtctttgttataagaaaatctctgcattgtttaatgaaaattaaataaaaaggttgtataattaaggtattttgtatgtttcattttatttaatacaccaggaactttttaagagatacatgaatacgtacgtagaaaaaggtgaaactaaggaaactggtgaaaatacctttaattattctttatgtagttcaacagctggaatactacaaagacactgccagtccattgtgatacctcccacgtcagacatgctgtgtcctttggaatactgtgttccaggttcttaagcactgagagcatttgtactgggaaggattgtgttcactttactcacagcccccaagttgtacttgtaatagaaaacaggggacctgggaagcaccttactcatttgagtatacactatagtaaaagatgaaaaggaagggtaaaaca

SEQ ID NO: 26022 - DNA, 1154 bp, Mus musculus
attctggggaagtcctggctgccccagaactgtgcgctgaagatatgaagattgaatttggtgttgatgtaaccacatgtaaccaccaaaaagattgttcttgctgatgtcattggtcatgattcctagaggctatggccatcaggagatcggagccagcagaaagacaaacagtcttaacattgatctcaaagaagtaactccggaaggactccagatggtaaagaaaaactttgagtgggttgcagactgagtggagttacttctcaagtcagacagtcagtgcagggtggtagtgctgatgggctccacctctgaccttggtcactgtgaaaaaaattaagaaggcttgtggaaattttgggattccatgtaacatcctctcataaaggaccagatgaaacgttgagggttgaaacacaatgtgaaggggatggtgtacctgctgcatttgtagcagtggcaggcagaagcaatggtctaggcccagtgatgtctggtaatactgcatatccggttatcagctgtcccccgatcacaccagactggggcgctcaggatgcgtggtcatctcttcgactgcccagtggtcttggctgttcaactatactttccccagaaggatcagctcagtttgctgctcagatatttgggttaaacaatcatttggggtgggccaaaaacttcgagtgagtatattgaacacctggatatccttaaagcaggctgataagaaaatcagacaatgcaatttgtgaaagagcaatttaatttttaggagaaaagttacttagtcctagtttggatttaaagaaaaacatcaggcaaaatcatttcacataagagaaaacaattcagtttactaatgaacaactggtactcagtgtttatgagttggcacattgtcagtggatattactaatattttctagctctacaaagtgatatgtccctgtaaccttagcactccagagcctgaggcagcaggatctctaagttagggccaccctgaactgtgtattgagactctacttgcaggggagggaatctttatagttagtaaagttggcatgacattactaaatttattctcaccctatgtatggtcattgttgggtaaatatgtaattatggaactggagcaatgtgtctgc

SEQ ID NO: 26023 - DNA, 1185 bp, Mus musculus
ctgaaacagcgggaaatacctgagcctggagtcttgtcatgcgtggagattggggctttagttttatctttgttggtggattggctctcttggtggcactgttttttgatgtgaaggatttggggttctgtttatggggtctagctatgtcatcaagcccatttcctgtttctgtcgaaggctgaagcaggaagcgtgtcctcagctttacagtgcggccttcatgttttaaaactattatacgtagaagacgacagaagtttgttttttctcctcttccagacaaaagtaaatgtgcttatcagagagagtttaaaatagtgggaggaaaaaaagcagaccattattttataattctgttatcctgagacaacaggaacttaacaaataatgcctggactttcatcccattgtatttatcatgcatttatattagcaaaattgatgttttatagctgatgtccccatcataaaactctaaatatcactataaatatagaaatgggatacaatcttgactaggtacttagtcagctgtttaatgttttgttttggttttggtttggggttttttttttttttttttttttttggtttttcgagacagggtttctctgtatcgccctggctgttctggaactcactctgtagaccagactggccttgaactcagaaatccccttgcctcttcctcccaagtgctggaattaaaggtgtgagccaccgctgcccagccctgtttaatgaatttttaatgtatttctaatttttgtgataaatgatgtcttggaatctctgattactgaatatttatggaaataccctttcatgaaatgtctgggttggggtaggctctgctagcattgggattctctgaagtaaagggaaccattgttcatagtacacggctgcatgactgctttcttgccattatatcctttaattttgccaaccaaaagtcgctcccccctggtacattgagggctgctacatttcagggtcattcaagcatctatgggagcagagagttcaaaagagagaccattagataaactgtaggactgtagggcagccaagagaaagaacactctacagatagtgtgaaatctaagcattaaacactattaaataaacaaggtcaagtggagactggaagatgtcaccaaatgcaaaacttctcagagc

SEQ ID NO: 26024 - DNA, 1165 bp, Mus musculus
cccatatgattcacccactcctctcccatcctataggttctgctttcacttttgtgaatgttacacttgtcatataaaagcctttttaattagacaccattttatttacctacttatttttttgtgcatttgatgtcatacttgatttccttgaagttattgtttgaaatctcatgttcaaaacttgaatcctttttttgaagcaagttaaaatttatgaagaaaatgttttaatatagttttaagtgggcagaaagagagagaagagagaggaggtggggaggagggataggctcaagaaaaaggcatagtatatatggaagggggttagagcaaagatgtaggtggcagtgtgtgtgtgtgtacacgcttgcttgcttgcttgcttgcttgcttgctaagcctcgtacatgccaggcaagtgttctatgactgagtcacatacacagcctatgtctattctgaataatttttgtgtatgatggatctacttggattcttttaatatcagagccactgattgaagaaactagtttttcttcattgtacattcttggcgccctttctgaatatgaattgactgtgtgtgtgtgtgtgtgtggctttattctctggcctttggattctgtgccaacaatctgccctataccagcacaatcctgttttgattacggtaactctgcaatgtgtttgaaatcaagtgtgatgcttccaacttactttattttcctttatgaaagctgctttagggctggtgagatggctcagcggttaagagcaccaactgctcttccaaaggtcctgagttcaaatcccagcaaccacatggtggctcacaaccatccgtaatgagatctgatgccctcttttggggtgtctgaagacagctacagtgtacacataataaataaataaataaataaataaataaataaaataactcttcaatacacaaatatctcaacacggtccaaaaaaaaaaaaaagaaaagaaaagaaaaagaaagaaagctgctttatctacttggggtcttgtaattccacatgtattgttagatttctttttctatttttgtaaaagatttggttgagattttgataggaagtgcatcacgtctgtgggtttattggcagtgagaacatttaacagcgtcaatttttgtat

SEQ ID NO: 26025 - DNA, 1500 bp, Mus musculus
aatacagttgactggggaggaaggtaatttatcattttatttggctgatgaataatccatgatcataatttttctaaaattaaatctgaatatatagagattcagaacaccttaatgcctagtcttatcacgtgggtaagtctgtttcatcaaagtaaaactctaaaattacctcgattctttatcctaattatctaacatatcaatggcttcttctgctaacagtttcataattcttccataaagaaatgttaggctctttgccccatctactgcgaggatgaagaccattctcagcaatcagactgtggacattccagagaatgtcgaaatcactctgaaggggcgcacagtcattgtgaagggccccagggggactctgcggagggacttcaatcacatcaacgtggagctgagtcttcttgggaagaagaagaaaaggctccgggttgacaaatggtggggtaacagaaaggaactggccaccgtcaggaccatctgcagtcatgttcagaacatgatcaagggtgtcacgctgggcttccaatacaagatgcggtctgtgtacgctcacttccccatcaacgtcgtcatccaggagaatggctctttggttgaaatccgaaatttcttgggtgaaaaatacatccgcagggttcggatgaggacaggtgtggcttgttctgtctctcaagcccagaaggatgagttaatccttgaaggaaatgacattgaacttgtttcaaattcagctgccctgattcagcaagccacaacagttaaaaacaaggatatcaggaagtttttggacggcatctatgtgtctgagaagggaactgtgcagcaggctgacgagtgaggaggcctcagttcctggccccagaaacgagatcctgaccacatgaacaatttgggctcttttgggagaataaaagacttatatattgaaaaaaaaaaaaaaaaaaaagaaatgttagtaaaaatgtgtagcataaaggcaagtaagaaagcctgattgttcttgcctgtaagctcagtactcaggagacggaggcaggggattcactgagttcagagtcagcctgagctacatagtgagaccctatctcagagcaaccacagcaacaacaacaacaaaaaaaaacgagtcaaacataaagacaaaggaaaatactatgttttgtgggatgaatcctcagtgagcatgtgctgtgatatgagcacagccacatcaaggctctcagtgcttcacacccacgggggtggcaaagccttctttgggtcaggcttcagtggcagagcctcctggtccacggatgttaaggaggattgacatttagctaaagtggcatatgcagaaactatcacccacagcctctgatgactgcagcctgaaactgctcctcctactgagataagctggcccacatcctccccattcagctgtacatataacctcacctctttgttcaaccttgtactgtaaacccacctccagga

SEQ ID NO: 26026 - DNA, 2083 bp, Mus musculus
ccgtgctagtgagcctcccctaacttacacactggatgtaatagttttaaataaataaagatgagattacattttaaaatgagagaatcagttactgttaagtatagtaggtattatattttatggcacagatctctaaatttcccctccaatttcttgttgaaggtctcagccagtctcctctccagtcatcctccagtttggacacgcggagacgctcctgccgctcctctccctcatgggctacttcaaggacaaggagcctctgaccgcttacaatttcgaggagcaagttaatcgcaagttccgaagtggtcacatcgtaccttatgcctcaaacctaatcttcgtgctttaccactgtgacaacgcgcagagccccgaagaacaattccagatacagctgctgctgaatgagaaggtgctgcccctggctcactcgcagagacccgtcgggttgtatgaggagctcaagacccactaccgggacattcttcagagctgccaaaccagtaaggagtgcagcccgcccaaagcgaacatcacgtccgatgagctctgaggaccttcggctgtgccatactgaggggtggttgtgtttgcaggaggtagccactctagaggccgcggcagaaggagctctgtgagtccaaggccagcctgttctacatagtgagttccaggccagccaagactacatagagcaataaagcctggtctttctgtcttttcacagaaaataatagttccttttaggatctagacatacgggtaagacatgactctccctggagcagctctctgcagaacaaaaactaattcaatgaagcagctgtccctcccagtgtttgcagagctgagattttcctaatgacctaagaagatactgacgtagaacggtattagaaaatgacacttcaaaaatgttggataccaaagcacggtagctgccgggtgagcggcagtgattggcagagatggggacttgagtgaccatgttgggttcccttcttctccttcttgcaggacacaaatgatatcgcttagtcataagtgtggtagactggatcctgaccagaaggaggtctgatataatatccatccagacaagaaatcaacatgctatcaagaaccaggttgaagcaaaactgaaagtgtgtgatatttttgttgacgttatttataaaaatatttcaacgctgtcaataattgtctttaacctccaagtaggtcttgcagaatcgtcttcatttcatcagacctattgggggtgaacagtaattaataggaggcccagcctggcagacgcttgctgacgctccttggctcttgcctgcttgtctttttcattccatcatggcttcccttttcatagctggatcttccgtgaagtgttccttttggtggtttggattttttttttttttaaataaagaccttatctgccgaatttaattgtagagatttgaacccgatcaaagaaattttgagttctctcaaataccataaaagtgtttgctacaataaataaaattcttgtgactttactaccaagtcatctctgcactcattgaaattcagtcattggtagtggagggctggaattgtaagtgtttggcttgactaagcaacctagggcacgcttcccttgtttcttcccgagaatgggctattttagtgcatcttattctgatttgaattcccttcagagatgatgccttttaaagagagggtttggttttgggttgaaactgtatgcttaatcaagccatgtcagtaaaatcccaatataatctgcatgagttttacagtttacttgtgaggaaggggtcttatgaaaagaaatctatagtcaggctatgcatatgtctggacagacattgtgtaatgtgcatgcggatattttcagccaaattttcattggttaaaaaatgaattttaggccttaaaggaaagctaaaatgcttaccattttgataccagctaaaatgcttcctagttactttaatgtttaatcagataaatggtctggtcagtaaaactgctctaatttagggattttagggatacagccaagagattt

SEQ ID NO: 26027 - DNA, 2154 bp, Mus musculus
accacctagaatgggttcattgcgttgccattctctttgggctcttgaaggaggaagaaactgttgttactctcttgtgtaattaaaaacaaaatcatttttcaacacatgcatcttttgaatcttggtaaaatattttaggtaggtatactctataaagagatttggcaatttgattgttttgtttgcattttagtcacgatgaagatgaaatccggcctgtgcaacagcaggacctgcatcgggcaattgaaaagatgaagaagtcaaaggatgcagcctttcagaatgttctaactcacgtttgtttagattaggagttgaggatcatttgtgctgtccagtgctcccgtctgcacagcagtgagggaaatccaggcttgggtcatattctcagatctttgctctgttatataaacggtgttattgcttgtcagaaatcatgcggaggaaactgagtgcagcctgagtgtgggtgcttgtctgacctttttagccatatgctgttatagccttatagagtctaagctggtcttaatggagtaaatgatttgtcattagtgaggaatggggtgtggttaggtgctggtttctagacacgtgagtatgaatgtgagtgtgtgtgtatgagtgtatatcaaatgtatatatccactttttttaaatattctgtagataggtttgaattcagaagcttttttccccccaactactgaatccaaaagcaccagatagtctgtagcaaaactgggatttaaggcaggatttgacaggtccagggagattcagccattcctaggtgtcactaggtgtttgggcagtttttttaagttgaacatttttctctgcggttggttgaatcaactacatctgaatatgcacgtgtctcaagtatagtggttgtcaggagaatcagatgacaaacacagtttgctcagtgatcagcagggattattccacctcatcctgctgtgacaccgagtagactttttgaagttttacactgaattacattaagaaggattaaaaacctttcaaaagaatgggtttaagaaacctcagtcctctttaatacgtgtacataattctcagtgtaacaggtctgtaactgtattaatgttgtttgaaagttatatgttctttaattatgttcaaatttcatttggtcacccaaacaaaatgatagtttatataaatagtcactactaaatgtgctaaaaaatactcactttgtaacttaaatttaaaatttttctcatttataaatgtgttcaaataatacacatcaaaattcttgtgttgtatctgtagtcacttgatgctatgtgaaccacatataaaactcttcttttttcaaacctccagtagccagacttctgattcaggcaccttgacatgtgacagaactagagtacagtgccacagcacagtcctaaggtgcctctgagtcaccagagagattaaacgacgacgggttttattatttgttttatttctttgaaaactaaattttcctatgtttactgagttaatttctctagtaatgtgtctcacaagaaccttctagacactttcttcctccatttgtgttttggggttatagattgcgggagactacttaggataacaaaaagcaagctgggcaagattgtaaagatgatgggaaatgaatgctaatacaagacgccaagaaacatatcctgtttttataatttacaataaaagtcctttccttttgattcttttttccccacttagttcttgattgttttcagttgcttggattgcggattttgttgtttataagatttgtgtttgggcagtttttatattgcagttgacatttcacatttttatagcagacattttaatattgatttattctgtttaaatatgagttttagtaatttaattttaatgtaatggcatgttcagaaatgattgatgtgtatatttctttgtgtctttttcatcttctattaaattcaatagaatttatccaattacagcactgaatttttatggttctaaccagatgaagagaaatacactaatcccaacaaccatgactcctgtaggcatattaagccatcaagtcagagaaactatttccatataacttaggcagcttttgagtgtttgtaatttccattc

SEQ ID NO: 26028 - DNA, 1417 bp, Mus musculus
acattcattctgttacataattttgtcctttttgctggccagtctggtagataacctcttgccctgtagaatttttctttcccttctacacatttgaagctatttattctttttcttctattgaaacaatttacatacctgcttattttaaaaagcctaagttccccaggcatggtggctcaccacagtaatcccagtacttaagaagccgagactcagtttgtgtgaattcaaggctgtcctgggctacagaaggagagagactctatcttaaaatgaaaccaaaatcttgggtatgtacacacacatacacccacactctgcttaattaccatctacaggacttctcggtcaagtattcagaccttccccccttttaaagttaagttagcttagttttgggttcaagtgcacatttgtttagaattgaagtccagttaggtacatgttttgcaaatacgttttctagtatagtttttcttttcattttcttaacagtaccttcttatttatttatttacttacttatttatgagacaagttttctctatgtagccctgtccctggttcgttctctctctctctctctctgtagaccaggctgaccttgaacttgaactcatgcacattgtattctaacttgctcaataactgaccaggattgtcctcatcaggataatacctgaaactgcataaataatccccaactctctttgttgttttacgaacttcacagcctttttaatagtcttaaattatacaatgaataaattatccatcattcgttactaaggttaaggacccttttcttttagactctttcctacgaaatcgttccagttctgaccacgaagctacagcgatgatgaaagctcagtttatgagtctctgggatggactggacactgatcacagctgccaggtattgtaacaaacgcttccataaacatgtaaggttttgttatcagtaggagctttatagggcttcttactatacttttgaacaaaaaatcttatttatttttatatttagtgctaagtgataaggaaccaaaaggacatagtttttataaacttcactcattttaattactaccatcaggtttatataagtagaagagctcacactccgtgtatagttgctgctgtgtgactctgaacctcagagtacatatattgaataatgatatgtatctgcctctaatcactgcttcatcaatggtcataataaaaaataatgttctgccgggcggtggtggcgcacgcctttaatcccagcacttgacttgggaggcagaggcaggcggatttcttttaaatatttatttatttattataagtacactgtagctgtcttcagacactccagaagagagcatcagatttcattacggatggttgtgagccaccatgtggt

SEQ ID NO: 26029 - DNA, 1159 bp, Mus musculus
ccgagtgtttggggacactggctgttctcacaactgcctgccaatctagtctgagggtacccgatagcctcttctaaactcgggtggcaggcactacatgctagtggcatgcaagtggtgcacagacatacattcaggcaaaatactaaatacacaaaatcataataaattaaagatcttttaggcttgggctttttttctaggtatagggaatgacttcctaaattttttttgtatgtgtaattaatctcagttgttattatctttaaatgttgggttctttgaaagatccaaaggaaggaaaaagaagtgggcagggcgagtagatttaaaatcccttgatgtcttcagttggtgggcgacagcttcctccatctacgtatgcgtgttcaaaagcagcaattagtgaccagcacacagatttaaaatattggaacgtacggcatttattattaactttggcttttgaaagttgtttgtaagtctctatagaggtatatcaatgactgtatgagaagtccttgttgtataagagctaaaatcagggctgtggagatggctcccttagtaaagttcttgctattctgagttcccattgttctttttttttttttaatagaagaaaaggtttattttactcacagttccatataacagttcattatcaaaagtaatgaggacaggaactgaaacagggcaggaacctggaggcaggagccaatgcagagagcatgaaggggcactcctgactggcttgctcagcatgctttcttttcttttctcttcttttcttttcttttcttttcttttcttttcttttcttttcttttaatattttttattattacgtattttcctcaattacatttagaatgctatctcaaaaatcccccataccctccccccaccaccacttccctacccacccattcccatttttttggccctggcgttcccctgtactggggcatataaagtttgcgtgtccaatgggcctctctttccagtgatggctgactaggccatcttttgatacatatgcagctagagtcaagagctccagggtactggttagttcataatgttgcacctacagggttgcagatccctttagctccttggatactttctctggctcctccattgggggccctgtgct

SEQ ID NO: 26030 - DNA, 2513 bp, Mus musculus
caaatccagaggctagcagttcaacttctgtgactccagatgttagtgacaatgaacctgatcattatagatattctgacaccactgactctgatccagagaatgaaccttttgatgaagatcagcattcacaaattacaaaagtctgattttttttttcttatcaagagggataaaataccatgaaaaaaaaaaaacttgaataaactgaaatggaccttttttttttttttttttttttaaatggcaataggacattgtgtcagattgcagttataggaacaattctcttctcctgaccaatcttgttttaccctatacatccacagggttttgacacttgttgtccagttaaaaaaaggttgtgtagctgtgtcatgtatatacctttttgtgtcaaaaggacatttaaaattcaattaggataaataaaagatggcactttcccattttattccagttttataaaaagtggagacaggctgatgtgtatacgcaggagtttttcctttattttctgtcaccagctgaagtggctgaagagctctgattcccgggttcacgtcctacccctttgcacttgtggcaacagataagtttgcagttggctaaggaagtttctgcagggttttgttagattctaatgcatgcacttgggttgggaatggagggaatgctcagaaaggaatgtttctacctgggctctggaccatacaccatctccagctccttagatgcacctttctttagcatgctccacttactaatctggacatccgagagattggctgctgtcctgctgtttgtttgtgcattttaaagagcatattggtgctagacaaggcagctagagtgagtatatttgtagtggggtacaggaatgaaccatctacagcatcttaagaatccacaaaggaagggatataaaaaaagtggtcatagatagataaaagacacagcagcaatgacttaaccatacaaatgtggaggctttcaacaaaggatgggctggaaacagaaaatttgacaatgatttattcagtatgctttctcagttgtaatgactgctccatctcctatgtaatcaaggccagtgctaagagtcagatgctattagtccctacatcagtcaacaccttacctttatttttattaattttcaatcatatacctactgtggatgcttcatgtgctggctgccagtttgtttttctccttaaatattttataattcttcacaggaaatttcaacttgagattcaacagtaagcaggttttgttttttttttttcctagagattgatgatgcgcgtcctcagtccagtggctgtcagacgttcagcccctttgaccttacacattctattacaatgagttttgcagttttgcacattttttttaaatgtcattaactgttagggaattttacttgaatactgaatacatataatgtgtatattaaaaaagtcattgtttgtgttaaaaaagaaattagagttgcagtaaatttacagcactgcacgaataataaggcattgaagtttttcagtagaaattgtcctacagatgctttatcgacttgctattggaagaatagatcttcttaaatgtgcagtgttgagtcacttcgttatagtggtagagttgggattagggcttcaattttacttcttaaatatcattctatgtttgatatgcccagactgcatacaatttaaagcaagagtacaactactatcgtaatggtaatgtgaagatgctattacaaaggatctcctcccaacccctcgggaatttggtgtctttcaaattatatcttgaccttgacatttgaatatccagccattattagatttcttaatggtgtgaagtcccattttcaataacttattggtgctgaaattgttcactagctgtggtctgacctagttaatttacaagtacagattgcataggacccactagagaagcatttatagtttgatggtaagtagattaggcagaacgccatctaaaatattcttagaaaataatgttgatgtattttccatacctcatcagtttcactcaaccaataaagtttttaaaattgtaacaaagctcttaggatttacacatttatatttaaacattgatacatgaatattgactgactgttgataaagtcagagacaacttttcctgagatctcaccatggaaatctgtacacccccttgtctttcctaaaagctgaaagtggctgactaaaatgcaaagcagctgttgatgttttgaagatagtgataaacactgttctttgttagttttgggcacagcatgctaaactataacttgtattgttccaatatgtaacacagagggccaggtcatgaataatgacattacaatgggctgttgcactgttaatatttttcctttggaatgtgaaggtctgaatgagggttttgattttgaatgtttcagtgtttttgagaagccttgcttacattttatggtgtagtcattggaaatg

SEQ ID NO: 26031 - DNA, 1121 bp, Mus musculus
tcaaatatactatctcctttctaatattcttaaaggctaaggagtcctttcaatataacagtaagataacttgtgatgttttagaagtaagcagaccattaatgtcaatgtggagtcttaatgttacatgaagttgatagtttctctgtgacccatttaaaaatacaaaccgagtagcatgcaattatgtaaagaaatatgaagattatatgtagtcacacattttctttagaattcttagtttggtgaaaacttgaatataaaggtattttgatttatatgacattttgatgatatttgaaaaaaaggaatttcctgacattttgcttttagatcatgtcccccattgtgctgtaatttaagccaacttggttcagtgaatgccatcaccatttccattgagaatttaaaactcaccagtgtttaacatgcaggcttctgagggctcccggagaatcagaccttaagcccagttgatttacttctaacgtgaaacttcgagttcctgtatactttgctagataatttgtggtacatctaaagcttagtcttaagtggcttgtgtgtggattttattcaacattcttgttgctagggtagagagaaatgttgctgagtagaaacaagagtacccagttcaatgtggtacagagagcagtccctaaaatctgtacacagtgtaatggaccactttaggagtcaagaggctgatttttcctatgaaattacattgcaacaggaagccttctagtatagttccttttactgttagaatatgtttttatgcatacgctatagctgctttcccatcttccaacaacaggtatcaggatgtaagcaagctttaaacagtgtgaagatggcaggatagtgtcatcggtaacagtcctctgactctaaatgtagttgctctgtaacactttgtgaatataacatcacaattctcatgtccttggggggggggggcatacccagtattagtatgttttagtgactaagcaatcatttttctgtttactcatgtacattttctctttaaaactaaaacctgtactgtgtatgtctccaaagccttttagcttagtttttaggaaatgaacactgaatggatcactttttag

SEQ ID NO: 26032 - DNA, 1158 bp, Mus musculus
gcaactgctataagatttattaaatgttttacttatgaaaagcaatagtaaatgaagtcagagttgtagaaacatttaatccttgaccaattgtcataaacaaatttctttttcatggtttttaaactgaaatgctaaataaactaaatacatgtgtttgacatgtaacaaactttggagttctaaaaataaaacgtaaataaaattgcatcttctgaggtgatagtagaaaacaaacaaacaaaaaaacttagaattttggaaatgctgaatcaaaaatcatcaaaaggaatgaaagaaattcacaatccaagtaaggtgttagaaatcagttcagtgtaatcaggacggagtcaccacttaaaaacagaccctttgccaaatatcatcagtcgctcttgtaaacaacctgtgataaaggtacaatactttatgtcagatgcaattggagacttttccttcaaatagagtctttactcttagttctgtcatatatggtttcgttgggtttcccttagtgccacagaccctctgggcccctttgtctgtgtggaacgggtctctggtcgtaggtgggcaaagcgtcggatggaatgacagacagatgcacacaggagaggttgtgtagaatctgaatgtaatttgtcaaattgagcatcaaactttatacagaagaaaatagggaagttgggtgacacatcagcaaggtacaaatgaggttaccggatgcttaatgactcttacacaaaacagaggaatgtaagcacaaagactggcaggaactgggcaataaaataactgagacaaagtcagccctacctaaggtcagctatagtcttagaagccaggtgtgaggtctttacactccaggggcaagggctttcacacccaagtcatggttctaattagggaattctgttctagctaaccatctcatgaataatgcaatactctaaaaccacagcccgatctacttcctaaaccattgtaaattcctgtatatgggagcaacttggcttttattctaagtgatagtgtaataccagaggcaattctgaatgtcactgaacaggcaacattcttcctgaattccaagcccatggtcagctcaaggactttctaggacattggaacactggtgaaggcttagctatgtca

SEQ ID NO: 26033 - DNA, 1188 bp, Mus musculus
gtcctgtgcatgctgcctcaatctcaatgagttcatatgagctcagttgatttagagagaactaataaattttttatgaaaggaagctatgacatagtacaaatcatagtcttgagattagtaattatagcagtattttataattgtttcctttataaaaacatttattgaaggcccaagcgttcaagtggtagatggaagaattactactgaattgggaagattagattagattagattagaattagaggcggatgctagtacagaagctaaggttgaggagcctttgttcacttggatgggttcaggttgacatttcatttcttccttattctcatggaaaatcctgacaacaggagccttcttttgcctttggagcaggtgcagaagtctccctcaagcactgtgtgactcagatccacctgaaagataacaagtgggaagtctccacagacactggctctgctgagcagtttgaccttgtcatcctcaccatgccagctcctcagattctggaacttcaaggtgacattgtgaactgtgagtagctttgctgttaccctactcagggcgggatgaagggacactgactggcttttctctttgagtggaagatctgttctcaactgtacagatgttatgttttaaaactgcttgtggcctactttctgaagttagtctgtgtcatgaagctcagagaatggtttgtaactaattaaaattgaatgagtttcttggtttttaaaatggtcagtgttgtttctgatgtgcagtagtgtggcccaaaagagcagtatctttgtggccatcctgaaaaaagtcattcctcatggcttcctactggattgcttcatttcctgtcttcttctctgggttactactaagtgtttactgttattggatgagtaggtgagtgtcatagagcataaattatcctgacagagctaaaatcatgttaaaagagctaaatttataaaagaaaaaaaatgataaggaaatttctttgttcgaataaagaaaaggtgaatattttttcttactaaaatgaacatattttaaggaggaatacggtgagctatagataaacagaatgtcctatctgtataaagaaatccaatattgtttttatattctcttttcctatgcagagaaactattaaagcattataaagattttactgactaaag

SEQ ID NO: 26034 - DNA, 1213 bp, Mus musculus
aacattcacttgattaaatcaaagtctaatgactttgtaaattaagtgactttataatcaaagtccagtggcttctgtgagtagcctttacccatctattgatgttcccatgattactgtctttgtccatttatgggatgttgtattactttattggcttggaatatgacaaatcttccctgtactatttctggaataaagccaacttattaatgttaagcagttttctgtttcttaaaagtatttttttttattcttccttaacacattacaaagtaattgcagttttcactctccactcttccagttccatgctcccatctcccttctcccccagatccacttctcttccattgtccttcagaaacgtacaggcctcccaaggcttcacaattgacagtgagattagacacaaaaatcatcctgaggtaacccaaacccagaaagacaagcatggtgtattcatttataagtagatattagatcttcattaaagaaaatccatgctataatccacagagccagagagactaagcaagaaaaaaggggtcaaacatggtacatagatcttcttcagaatgggaaatagaatgaatttggtggctggacttggggtaggtggaaatgagaagaagaaggatcaagtgaggaggagattggagggattaagcactgggagagacaactggaattagagcaactgaggagatgaggtagaaacttagtgcagtgggaatccactggaatctacaaggatgtccctagcaaagaatactgacactggaagagatggagccagacccttccaacttcggtaaccagtcaagccttttggtagttagataggaagccaggcacaaaaccttcaactttcttttatttaagaattgggagtgggtgtgggtgggtaggggagtagggggagggtctgggggacttttgggatagcatttgaaatgtaaatgaagaaaatacctaattaaaaatcacagttatttttttaaaaatttacaatgtattttattatatgtatttttcctaattaaatttgtttaaatatacataagatgtatttttacattattttatttatttacattctaaaaatgctcccttcccagtttctctttgcatagtttttacctcatctctcctctccttttcctcttagacagtgctccccaccaaccacccacatccacctcattctact

SEQ ID NO: 26035 - DNA, 1186 bp, Mus musculus
atttttttaaaagaaactgcatattaatctttggatatttagtcattagtattcctgtatatttgcctcttggattttataaggtatggaccatcccttttaaataactacaaactataaaatctaaaagacatgcagatgtactaagggaatttatgcttgatgagggtgaggtaggaggaagaccaagatcctgtagaaataactctacttttgcacagttccatattgtttgacattcactgatgtaagtgaaatgaaatcttacaacatccctgtgtgctagtttcagaatcttttggctccatcatgcatatttgaagttgttgcttacattgtcagtcgatgctaatatggtaaaccatttgcatgattgattttgcatgattgattttgcagccccaaagatggtagtattttgtcagcatggcttgcttgcaacacctggtgcatgggtttccaatccgcctgtcaacagcctggccttcatcctagcagatgctgggtatgatgtgtggatgggaagcagcagaggaagtacctgggcaaagaaacacgtggccctcaacccagattctaaagaattctgggattttaggtagggaacaattccatgtgatttctacttttagtttaatggttaaataattttgtcaaataggattaaaggcatttcgcttagagtgactttagaagactgacttgggtaacctggtttgggactttgtgttcctgctaaaacatataataattatagtataattatcattatagcgtatattgtactattgaaatactaataactcttttaatcaatgtacttactttaaaaacttatacatatttactttaattactgtgtgtgtgtctgtctgactgtctttttgtgtatctctgcacataaatgctttactatatgtttggaggtcaggaaacaacttaaggggattggctatctccttaatccatgtgggtcctggaaatgaaacttagggcaacaggcctggaaacacttgcctttggtctctgagtcttcttacagacctcacccatgtctgtataaaattacttcattaaagtaaatttgatatatttaaagcaatgattttgtaattgtagacatttgcatacagacatcctcccgtatccttcactttaagcatgtattctcatttgtgtgtgtata

SEQ ID NO: 26036 - DNA, 2032 bp, Mus musculus
aaggtgtacattgctctctggttaataagaagcacgctagctgtcttatgcttcattgtgactgactagcaagcgtccacaaccagtgatgccttttaagtgtctctgtgatccttttgtttaccttttacagttgttttcggtgcatatgtgctgtgcatatatgtgcctaagtgtgtgtgggctgtgttctggcccttgtgtggaggtaatggctcacatcaaggtgtcttcctcagttacttcccatcttactttttgaaacagggtctcttgctgaacagggagcctgctatttcagttacactggttggcccatgagcctccaggatctgcctgtctctaccttccccctcaccaatgcggtggaatggggtgtctgtcccagccggcatttttaccctgattctagggacaggaactcaggttctcatgcttgtgtagcaagcccttcactcaccgaatcattgcctcaaaccttctgcagtagaccaagctactcagttgcttttatattcctgcccaacacaagtgagcacacacaggacatttcaagctgttgtttgctagcaaaaataagtctgccagtgacctgaacacacgatgaaaagctccttgctctgagcttcatgtggcagtgcaaacctacaatcctagttctccagaggttgagacaggaaggctgctgtaggacttagggttcatctagaaagcgagactttgtctctagaaaaccaaagacaaaggaggaaaaaaaaaacccaaagtactcagttctcatccctttgccttagaggactgtctagcccagagttcctgtgtttacctatccaaacaacattttcatgttttaatgcattagcttcctagtgaaatccagtgtaatcccagcttctccaggaataaatatcctctcttcagtttcatcagacctcaataacaaaatttttcaggccaagccccccccccccccccaaataagcgtagactcttgaaaagcagtttgcactgattaaaaaaattaaaaaaaaaaaacttgaagattaatacaatgagctctgttggttccgaatgtgtagtctggtcacttttctgtggagaaacattctgtggagggacaaaccactgatttgccagaagcgaatatggctgccgtgacggtgcctgcatgaagctaaagctggttgtggtggcaagtggtccgattccctttcacacaaatgatgttttcagacagagctcggctcaggaatttcgctttgagaatcagtgttgtatgcacaatgttttactgagcctgctttgctcctgcgtacaggaagcccacatctgttcacttggcttgctggcgatggctgtcaccactagacagttgataagttttctgatattctgatattaggtaccacggatgcaggaatattacttgatattggctcatacagacaggcagaatgatacaactttgtaacaatttaaaggtttgtatttaaacttttcaataaatctcagcctcataggcctgaacatcggtgtggtgtttgctttacagtggctaatctatacattttcttttagcaggataaaagattttctttctctactctccccaagtcccaaaacttcgatcacacagtccatgaacaattggagagaaaggaaggggaggctgggctgtcttagtcagggtttctattcctgcacaaacatcatgaccaagaagcaagttggggtgaaaagggtttattcgacttacacttccatactgctcttcatcaccaaggaagtcaggactggaactcaagcaggtcaagaagcaggagctgatgcagaggctatagagggatgttgtttactggcttgcttcccctggcttgctcagcctgctctcttatagaagacaagactgtcagcccagagatggtcccacccacaaggggcctttcccccttgatcactaattgaggaaatgccttacatttggatctcatggaggcatttcctcaattgaagctcctttctctgtgataac

SEQ ID NO: 26037 - DNA, 1271 bp, Mus musculus
ttagtactgaaacaaaagaaaaattttcatagatgcctttttgttcccaaatcagtctgtcttgtctcttctctctcctctcctcccttttctccccgccccccccccccccacctttttctttgagacagtctcactcgtggcccaaactggccttcaactcagagttctgcctcagctcctgtgtgctgaggtgtgtaccaccctttgggtaaggtttctataaagtaccatgtagcgcatgatctatgccacacatgtctctaaaccctggaatagcactggtgaggtacttgagtctcaaaagcacgactgaggctggattctgcggaatcctgcactggctcacttcattctgagtgcctgtgaacagctgtactgtaggaacctccatctctctgcaccttcctttagatctgtgtactcgacggaaagggaatttagtgcgggatgcctgcttttcgtatgtcacatcctgtggcctcatccttttctcttctgttccccagcattcccgtggtttggtatggatatcggtggaaccctggttaagctggtttactttgaaccgaaggatatcacggcagaggaagaacaggaagaagtggagaacctgaagagcatccggaagtatttaacttctaacactgcctacggcaaaactgggatccgggacgtccatctggaactgaaaaacctgaccatgtgtgggcgcaaagggaacctgcacttcatccgcttcccgacctgtgccatgcacttgttcatccagatgggcagcgagaagaacttctccagcctccacaccaccctctgtgccacgggaggtggggctttcaagtttgaggaggacttccgaatggtaggttgggcttgcccatcttcgaacagccagctctctcatgtgatcatagtgtgctcatctcatgctaagacctggaccattaaccttgggacctgggcatgtctgtgccgtgggttcctcttccatatgataataaatatatgaccctttcatagtgttgtttcaagaaaggttaagtgaggaactatgcccctactcttactgagtactcaacgtccgttattatcatcactctgtagcacaggctggccctgaactcagtatgtagcgaaagataaccaaaactaacggttctctctccaagacctggtgtgacagtcatatgttgccatgtgagtgtttatatggtgctgggattggacagttactcctatgtcatatgtagagacaagatgatatatatcac

SEQ ID NO: 26038 - DNA, 1195 bp, Mus musculus
aggcatgggaggcatgggaaagaaaagaaaatgtgtttcttcatgctcttagaccttgtgcctgtgtgtcccaggaaaatcataactttggatttatttatacccatttcacgatttactgttgttgcttttgaatggcttgaattgttttgaggtccttgttcattgtggtttaggaaacagcaagggtttttgcctttcaatagttgtaaaggaggcatccattgggcccatcaaccatcctgaggtgagttttggtttagttgaagcagggtcatatgcaggcgagccccagacttgtgatatagcagattgacctcaagagtcatgcacgattcttttacctctgctttccaagtattggggccagacctgtgtcacccgttacaatggattaattgctctccaattagatggccgcgccatctttatttagtccgtgttttttgtcgtggcaggtaagctgaagtgtgttagctgaagtgtgttgtagccaagtgcaaaggagatgttcctgtttgtttctataaatagaattcaggaggcaaaataggcacaacccaggccaagaaccattcagagtttgtctcagaggtgacgtgttgtaacttctttgtcttgagagccatttgggcagtgctggggtttcagaaacttttctcatttaggaaaaacataaccattactcagaatccgagagcagagtgttagggactggcaggttctctacactcagcttttgtgactatatctcacttgaaatctttttttttcttcccttaccagctcagcttcttctctttgcaccctgcatgttaggaaagcaaatcccagcgatcctttcgtttcagttactgtgtttttgcctatttttctgaaagataacctctttaaaagtgcaacgtgttatttccttaaaattagtgatatgttatacaatgtgtaactagatacatgagtttaagttatttaatcacagtaaaacttgtgcaactattacaagccaaggaataaaagtctggctgcttattgctgtcttctgagagcccctttgtttgcaagtgcctgttgttatttgtatgtgattaatttttaaccgtttgttcatggtctgagatcagcaacctcattcttggaattaaatactattgtgacaaagctgctttgggttagctcccgaatcacgagactagaa

SEQ ID NO: 26039 - DNA, 1225 bp, Mus musculus
taatctagaaatcaagtcaggagactggagaaatagctcagtaacagaagatggaggcgaggcatccatccttcaaaactccctgggtttaatctcccagcaccatccaaaagtcaaatcagttgtgtgttggttttactaagcaaggaaaggagaaagttgtcaacttaatgtccatctaagtgtcatttccccttatgtactccctagaggccttccctaagactaacttcttcagatttcctctattattttgcccgccccctactacctggctgtcatgatctggtgtcagtgctcttgaaatgctagagttaaactaggtgttgttcctgatacctgcagaactccgtgatgatacctgcagaactccatgatgagactaatcttcctatgtgatctttacactagttatctagcctgtcacaggagtgagcattttgttatgttttcatggcgcgcgcgtgtgtgtgtgtgtgtgtgtgtgtgtgtgtgcgcacgcgcgcgctcacacacacacacacacacacacacacatgctggctatggaaactagagcctcccattgcccaaagcaaactctcccacggagctgctcctatgccctgcctgtcccccacccctacctttgctgaccgccttttgttacttcctttctcattaagttggaagtctgattagaaatgatgttttctcatgtactttgaaatggaggaacacacacacctgtgattgatgttgaagcagaaaaagtgattcgggtggcgtcaccacttcatggatagctgtctctatttctgtagctgattttggtcccaagagtttcaatggttcccagggaagcatcagtagagagggtcctttgatctattccgttgtgtgaattttattttattttaccttttgcctgatagctctctattttattttggttaacaggtagttaatacttgtcagccattttatttccaacattaaattaaaaataaccccgatgatttattttacatatattcataaatggatcaaaaagttcacttggaaaagctggctcaaaaacccaaagcaggtttcagtgagtttaggttttctggggtgctactcctcataccagggagcaagtctggcagctcggctgtgctgatgctgatgctgctgatgctgatgctgatgctgctgatgctgatgctgatgctgatgctgaggaaccgaagaagtagcacag

SEQ ID NO: 26040 - DNA, 1189 bp, Mus musculus
ctgcggaggaggatggactccgggaggaagaacaggccgcgtaagtcctgccggcagggaagcgccggtgcccgcggtcgaggggggcgacagagtgccgctctggactgcgtcctccctagaggcgtcgggcgtccaaggtggcggcccgcggtggcgcctgtctagtccgatccgcctactgggtcggtcagacactagctggagctgctccctcggtcaccgtagcggctgggagaacgcactgcccgctgttattggtggccgtggggcaaacaacccgactgatcttgggtctgggactaggaggagggcgggctggcacagcccggggctcactgctcccttctccgagcacatcttttggggcgtgcatctcaggctaccagtttgccctttgaatcgcagagtaaccgccagtatctagggcccattggcaagcttaaggaggcgtggagtttgacaatcccccaaatcacagcctattaaacagtgtttccacacagccagtgagacggctggtgtagagggaaacacccactgacaccatgtgggccggaacggtgtggaccaatgaggattgcaggtggattccccccctccccttggagtgggtcgagttgagtgtttgtaattgtacaactccaaaaagtgcgttgtttcacaacctgagacttgtatatataatggtagactgtaaagggtaccttccccacctgacattctgggatgtcagtttgtaggtagagattacgagttgttttgttttgttttgttttgttgttgttgttttttttccttatctgagcctaactccattcaactggttacctctttgtgggtgtctttaatgaagcttgtaaatggcagaaagcaaagtaagtagagtccacggtagtgagcgatcggattcaaacgggtacctgttgcatatcaattaactgttctgggttgggaaatgattaaattgggcttcaatttctgtaaaaggttgatgtttggaaaacagcataactccttcgcctgtctttgcttataatttttatctttctgttcatagttttcatagcctttctgcaatgcattcgtttctaaaacgttgggaaccgctttaacacgtctgggtgaatccagtgcttacattttgcaatgttaatgttgtgtggagtttgggaattgcccagcagat

SEQ ID NO: 26041 - DNA, 1177 bp, Mus musculus
attattttgcttttaacaaaaagtgtttttaaactctactctttcttttttaggttaccatacataatgacagttatgacgttctttgtggtaaggattcttttctcacttatgttcatttacttgtcttgaaatatatttgaaaggttttattttcagaatcactcttagtgttgatcttttgatcatgtagtgcctacagtacctacaaaatgtttcaaagctatatgaactgtgagtagttgtaaggtttcatttatacttagtatcatgaatgtattttctctgactttaatatataattagagaattgttcttatttttcttggtcatttgcattaatttgtatttgatttcttcttacttcaaaacaagtaagattaaaagaaactaagctttgattgcaacaaatattagttcctttgctccctaaaatgtttcagtgtagatgataaagagattaaggattttaagagtcatgatctatatattttctgtttcttatttagtcaaggtcttaattttatgccttttgttgttgttataggacacttaacaaactctttgactatcccagaatttgaagaatccgtgaacagttgtgaccagtccagtctgaatgtggataatataaagtattctgtgtgggtttctttctttgaaatttacaatgaaagtatttacgatttgtttgttcctgtgtcctctaagtttcaaaagagaaaaatgttacgactttcccaagatataaagggctattcttttataaaaggtatgttagcgaccattttaatattgttccaaaattactattaggttttgtgatgagtataggaaataaacagggaattttttaaattaattttttaaaatccatttttagcagaaaaaaagaagtttgtgctttggaagtatattttgtgtttcttgtaactgagtagaagcgggtctggcccggttgatttgcttgagtgttagctatattgctggtgaaagtgcaggatcttctctacactcttttgctttgtattggaactgttaaatgttaagtcctccatgtgtgcttgcggaacttaaatacagggtgtcttatagtctatctttacatgtcttgtggaataaggagtagttttagttggtgttctaggatgtgtgaccagaagaaagattttatgtg

SEQ ID NO: 26042 - DNA, 1199 bp, Mus musculus
atgaaaaggaggaaaaagcagaattaaataaacaggttgtgagtttgcagcagcaacttcgtttctttgaagaaaagaactcatccctgagggcagatgtagagcaaatccaggccagttacaacagtgcagttgccgagctgcaaacacagaaagccgtgaaccaggagcagagggacaggatcctgaaattatcacaggagatggagactgctgcaagaagtatcgagagcaatgtttcacagataaaacaaatgcaaacaaaaatagatgaattgcggtcacttgattcaccttctcatatttcaaaaatagatttacttaatctccaggatctatcaagtggtgctaaaggggataattgtctgaacacatcacagcagcttccaggtggtgacttctcaagtacgtgggttaaagaatatcacactcaggagatcagcagggaaaattccttccacgcgagtattgaagccatctgggaagaatgtaaagagattgtgaaggcttcctccaaaaagtctcatcagattcagggactagaagaacaaattgaaaaattacaggtggaagtaaaaggatacagggaggagaacagtgacctccgagcacaggagagccagggtaagaatagagatcaccagctgaaggagaaagaaagtctcatccagcagctcagagaagaactgcaagaaaaaagtgtcagtctccgtgttcaagtacagcttgtagcggaaagagagcaagctctttcagagctttcccaggatgttacctgctacaaggcaaaaataaaggaccttgaggtgatagtagagacccagaaagatgagtgtaagcgcttagttgagttagagcaaagcattttagagaaggaatctgccatcttaaaactggaagcaaatctaaaggaatgtgaagcaaagcatcaggatcacatcagaaccaacgatctaagtgcaaaggaagtcaagttcagagaagaagtcacacggttggcgaataatttgcatgatacgaaacagttacttcagtcaaaggaagaagaaaatgaaattagcagacaagagacagaaaagtgagctaagtcttatttaaattaaacattttatattgtgtgtttgtgcatacccacatgtttgtgggagtcaaagaacaacttgtaggagtttgtccattttcctgtaacatgtggggcc

SEQ ID NO: 26043 - DNA, 1088 bp, Mus musculus
gaaaaataatctttggatacatgagaaatccctgtagtttttgtttactggggatttggtaacagcagctagagagatgactcagagattaagagcatttttgtccttaaagtggacccaggtttgggtcccaacactcacatgttagcttataaccatcagtaactccaggtccagggatctgataccttcttctgacttccttgtataccaggctcatgtgtgatgcatgcataaatacatgcgatgcacatacatacgtacaaacaaagtagtcttaaagaattttgtgagactccgtacagttcagctgttggaataattttagtcccatcttagtctatattttgggctccgctgattttttttcttgtttttggcctgttatatcgctacatatcataacatttgtctgcactttaaatcagaattgctacctatcataacatttgtctgcactttaaatcagaattggataaatggaaagaaaaattcaaagatctggaaaccagaagtaatcagaggttaaacacaggaaccatggatgacctagacgtgcttaccaggaagttcagcaagcttcaggacgagctgcaggtatcatcctctccctccctccctccctccctccctccttccctccctccctccctccctccctccctccctccctccctccctccctccctcccttattctcctccctcctccctcctagcagcttgctgtatctgttggtaagattgtatttctggtaagagaattcagcattttgtattttataactagttttatgggtaaaatattacatgggcattagtaatatagagaaaaaactttgcattttgaaaaatatcctggggaaaatttccaagacataacttatgatcagctaatgaaaccatgttggttgtgtcctcaactttatgttttatgtgtgtaattgatgtgtgagtgtaggtcagaagacatttttcaggagttgttgacaggaactcttgtttatgctgtgaagcagcatcttccaggccagcgggttcaatggttcagggtaattctatctctgcctcctgttttgttgtaggagt

SEQ ID NO: 26044 - DNA, 1109 bp, Mus musculus
ccctctcctggaagctgcgtggggagcccctcgggctccgggagtgagcacctctgccgggcggccctggcagcgcgcgccccgcttccgtttggatcggctggggctattatataagatgccacggagagcagaggggcgatcgggagcgcggcggcgaggacggtggggacccacctgtgcgccaccgcacgcctcgggggtcgcgtcggagccaaccttgctctccgcgcccctgcctgccccgggacgctcgctccctgccacctagcccggctctccgcgtctctcgctgcaggcgtctgtactttgaaacatttgtttaatattaaggaagctgcgtgtgcggccgtcatagtacgccgggaacgtgtggccgggagctccggagcggtgaatgaatcatcgccccggtggaccgcgctccgatgattcacgcgggctccacacgcgcgcgcgtactcgctgtgggccgcccttctgcgagggctgacgcccggaggggcggggggagttcatgcgagagggcggcgggttttttttttttttttttttttttttttttttttaatttaaacctgccacagtaactttcggggtgtagggctaacccaccttccccagtcttgcttctcgttttctggaagggtaatgagattccacctggctgggttaatgaagcagaggaggcgctgattcgctgcagggcccggtccagtcccattcagaatttgaatggtgtcaagtgagggaggtctgcagcatggttggaattcgagtaattgtgtctacttcagcagttgccaagtaattagcagaatccttaaaagtgagtcgatcttaaacaactggtccctcaagtagatgatataaagattagctttatttttttaagttttaaaaggccatctcgtttttcattcatgaatacagaatgtttcctactgtcattattcctgaacaccaacttgacgttcccatcccaccccacacttgaaggactacagagcaaattttcttgtcatctggggctcacctccagtgtcaggcccccacaaatactcttgatcaccatacttcttagttcttggtcctcctaaactacttca

SEQ ID NO: 26045 - DNA, 1286 bp, Mus musculus
caagccatacagggtgtcacacaggtaattggagctccttgttctgctgaggcgatgagataaggaaggtcctcagcttagcatcgatcccatctgtgctgttaaaccagcagagttcagaacaaaacagatgggggactaaggacagctagtccagcggtagaacacttgtctgccgtctctagaagaaatgccgacacttgaatcttaccttttagatgtagcatttttcatcctatcagtaatggctttttcaaaactacaggacaaaatttaaccagaatatttagtagcatattatttgatctgtaggattttcctgccgtgccagaatttgtagttactacagattctctccaatagaaaatacttcaagagcaaatttactgtgtttattatccttgattggaagcacaaatattcttaaagtgaaaaccgttctctatggtacttgattaatgctgcaatttgaattatttagcattgtgctgctgcatctccatatcccaaaagaaagcagatatgtgaactgctgctcagaaagggagcaaacaccaacgaaaagactaaagagtaagtacacttttaactagtgggtattgccttttatttatttcttttttcttttttttttttggtacagaaaacatacttactgtgtggctggctttttgtctttaagattcttgactcctctgcacgtggcttctgagaacgctcacaatgatgttgttgaagtagtggtgaaacatgaagcaaaggtataccccatttctggtcatctttggtaatccagtgagttaatttctgtgtagtggatatttagctccttaaactattcactgtaccaaaaaaaaatctttttttctcttagtttacaattcaaaatagtcctaggctggggagtaaagcacttgccatgcagttgtaaggacccgaattcagatccccagaacccacgaagcaggaggtgataacactcctgtgacagacagctggcctgctgtgtgcagcactgaacctgtctcaagtcaggaagaggggggagccacaccccaggctgttgactttcaagcatgcacacacaccttggtgcacagagacagactaaaaaattcctgtggaccaaatctagtttttgttactgttagaaaatgtatgcatttattcatatgtacattatttctgttatgtctcttcttctccattccacttctgatccactgatgaaagttatccttgactttttcttattattatacactcaggcacctcttatctcagca

SEQ ID NO: 26046 - DNA, 1131 bp, Mus musculus
tatggcttagaatgcagattctgacttatagataggggtattggactttgaatttttcccctctctgctgctgagatctagctggctgctactactatgtttaccaccaaatggaagttacacttagtacttgaaggaagggtatcagtgtgtaaatagtaaagtttactacctttcaaaaaagtagaaaatatagatgagaccagaagaaatctcagtaaatgaaacactagtataagaatagtttctgagccgggcgtggtggcgcacgcctttaatcccagcactcaggaggcagaggcaggcggatttctgagttcgaggccagcctggtctacagagtgagttccaggacagccagggctacacagagaaaccctgcctcgaaaaaaccaaaaaaaaaaaaaaaaaaaaaaaaaagaatagtttctgaaatacttatttaataagaaaataaggcagacatttgaaatttctgttaaattgtgttaaaacatgagaaatgaatgtgtgtgctgtgttcaatcctacagaaactctgtactgttcagagtgtcaactgcagagacattgaaggacgccagtcaaccccactccactttgcagctgggtacaacagagtgtctgtggtagaatatctgctgcaacatggagctgatgttcatgctaaagacaaagggtgagaaagagatcctgccttgcttccatcacacctttataggaccatttcggggaaatacaagaagacttctatgataaattataagctacttctgttttttaacatataatttacttcctaaaattggttcagtgatagcttataaattccgttaatagttgacgctcagcgtggtggtgcatacctaaaccccaagcactcgggcactgaggagtttgagacattcagctcagtatgagggagaccctttcttttaaaaaacaaaaaacatgcagatggctcggatttacgttaaaattaacttgtataatgtcttgttattttataattgccaaggaaaattcatttttgtgattttcatactgattaataaagttttcagtgttcattgaggatatgctaaattttttgtttattttgaaattacttttgtttaaaatgcacagtgc

SEQ ID NO: 26047 - DNA, 1215 bp, Mus musculus
gttcagttcccactaaccacatggggctcaccataagtaattggatctgatgctctgttctgacgtgtctgaggacagctatactaatcaattaattaattaattaattttaaaggatcttaaaaaattagtgtgcagaggggagagttgcaaatggcttagtgtttacgagtgcttgttgcacaactctgagaccagagttcagctgtcagacccatagaacaatgaaagctggatgagagcctccagctcagctctgagggtctgatgataaccctctgcttttgtgcacacaggcacacgcacacacactagtagtctgaatagcataggtttgatcctgatagagaaaggacattgactgagaaaactcgtgcggtccagatgaagcctatgttaataagttctgacagttgtagtatctgttagagtcctgaggaaagttgggtggtgtgtgtgcctgcactgtctgcactttgcattcctataaatctaaatccttaagaagttaagattgggggggggggggctgatttattggcggcttttttacttgtaaatttcatttcataggtcttaatccatatttaactctaaacaactctggtagtggaacaattctcatagatctgtctcctgatgataaagaatttcagtctgtggaagaagaggtatgttcatcacacttaaataaatggataggtagatctggccaccatattgttgactcagttgctgtgtcctagaattttgcagatatatttgaacgtgaattttgtttttgtttttttaaatttcttttcaccaccttgataatttgtaaatatttataatgcagctctcagttaacgttatttatttaggtacttaaattgccatttcagttcatattgaattagaattctgttggaaagaaggttgctgtcatttgaaaatatgctagtgttcactccctctgaaggcaactgtagcatgaggaatctcagacaggattcaacatttagataatatttatatgggaaattttattctgactttctttccaaagaattctttaatccactgaaatctttgaagagtactttcctatccagggtccctattacctcaccccccaacctctcgtgtttggtttggttttgttttgttgttgttgttgttttggttttttgagacatggtttttctgtatagccctggctgtcctggaactcac

SEQ ID NO: 26048 - DNA, 2746 bp, Mus musculus
tttttttttttttttctgtaaaatatagcaatgatgtgtaatttttcctgcaataattgacaaagacctaataaaaagccagtgtaaatcagcattctaagtcaaagtatgtggcagaattccctctgttactgataacagacaaaaacatgtatttacatctcaccctagacctacctgcttctgagggttggaagagaactgggaagataggagtcagtcggggaacagtggttgggttgtgtaggactcaaggccatcttgacatacaataaaacacacttgctaacatttgaactaatctttcttttccaggcttatcctgaatatctaattacttaccagattgtaaggcctgaaggtatggttgatggctgaaaccagttcccccagacgaaatgtcctgaagcagctgacggcctcttaagtttcactccttggcaggaaaacaattcatgctgactacaggcctgtggcacaaatgataaaatgtgaacgaagcccagcgttgtgacttgatgaagctttaacagtgtacagtgtttctgagtgtttcctgttctcagcactttaacagatgccattccaggttcaactgggtttgtctgtcctaaattataaacagttaacttgaatcttttatacgtcgtgcattggttctaacaaaaatggtaatccctcaacagaactcattttactaatcagtactgtgttctttaaaacacagcatttacactgaatacaatttcatttgtaaaatgtaaataagagcttttgtactagcccgatatttatttacatcgctttgtactataaactgttctagagctgcagcggttcacagagtattttcatatgtgttgctcatccgtgtttcatctgtcgtcgcctgactgatcgctacgtttgattccagaggctgctcggttgctaatagagagttagtggggaaacattgacttaacaaatttaatttactgatggaagcatttctctattaatagaaatctttctaatttaagaattttatgaatactcttggaatttaattggtgatgcctttgtgtctagaaggcacacatcccagagagctctggtgtgacgtgatggggacttgtggctagagaagatcttcaatggccttaagctctgggtcttgctctagagaggtctctgatgtcctcgacctcagagcagaactctcttcaagttttgaagatgctaagccccagcttctgaactcttagtgctctgatcgtgaactgtaagtggacacggggaaggcaatggtggataatttcccaatcaggtctaattaccttaaatctaaaacggaggaataacaagtggaaatggataggttttttaaatttaagtttttcttgatcttatggatatattatagccagtgtatttatcatgagtaaatacaacctaaaaccataggtgtgagtgtctgtgtctgtggcagcctctggaatgggcaagcctagtgcttcctacttctgtcaaggcattctgcccagttggaaaaacactgtcacaggctcaagttcagtatggcagctgtggaagaaattactttccatgaaaggctatttttactattctctaatgtaagccttacacttagcatcttgcattgcacagagacctgccgtactgcatggcggtacactcagaaatcaaggagagatttttatccacctaagtttttgtaaatgaggatgtcctcttcactctctgtacactttctctttgttttacattttatttggtctcttaattacctacctggtcctttatagaatcttgtacatagagttgcttgaaagttaagtttcccatcctgtgagttaagagaaatgtatgtctggagttgttcctaagatgtgaattgtggtcaagggttaagaggtcaaatcctgacctagaaatgcttttatacagctctctgctaactacaaatatcctaaaatcatttcttgaacataaaaggagtatgccaaattttatataaatttttcaggttctgtaagcttctgggttttatagttaaaagataatgaagttaattagtggggtttatatttacgtacttttcaaagtttggcctatgttactctgtgtggatctggaattgtttttcatgtagaatcatggtctggttatgacccgtgttacctcctaacccattgcttatgtgtgttcccattgtggtcaatacgctggcatggcaatgtttattgggagctgggagtttgggggtgtggtttagtgctttgcatgaaatacctttataataatggaattgctttttcttttgccttgtgatttttttttgaggtgaaatttaatttgtgtatgtgtgtgtgtgtagtgttctgcccatctgagtgtctacttgtatcacattccatgcctcacttaattcttaataaactgtttacttgttttctgggtagcatggtaattcattgaaattacagtaaatcgtaattgcaagagaacagtgtagttttgagtctaatcgtgacagggtgcagcataaatgtaagatgtagaatgtggtggccatacttgctcagatgcttcatgatgaaggtaagatgtgtttggcgtccacaccatccagtatgactttggtagtccttaaaattcattcacgaaaatcagtctgcttaacttacaaagagaaatatatttttgttttctatgtcataaaaacattcttgataagtttcca

SEQ ID NO: 26049 - DNA, 1161 bp, Mus musculus
aataggaactatgaatataagaattttgacgtagggcttctgaatataattatcaaagatgacatgattacatttaaagatggtatatagaattcttacgtggtttggtaacttctttctactaagataatatgtcctaatattgtgtgtgtacgtgttgtgtgtatttttccctccatttttggactgaacagctcactctctccctagtacagagttgatttttacctattgttaaaaatgattgtattttaatagatgattcagcagcatcaagagtggttggaagacttagtcattagactcctttgtgtttttgcgttggacagatttggagacttcgtttctgatgaagtaagtaccatctgagtgaagctttgtccagactgtaaattctacatcagtaaatttcctgcatatgtaactcctttctattctgaaggttgtagcgccagttcgtgagacttgtgctcaaacgttaggtgtggttttaaagcacatgaacgaaacaggagttcataagacagtggatgtgctgctgaaattattgacacaagaacagtgggaagttagacatggtggtcttctgggaataaaatatgctttggcagttcgtcaggtaactaactcagtttttgaaagggatttttcccttttggatgtcttgtttgttgtgatgttgggatgggtatgcttgatcgcttgtttgttcctttgttttatgatttccctatttatctccagctagcctggaacttgctatacctcagaattgcagagatttttctgcctctgccttttctttttcctcgtggattctaagattgtgtatgtcatcatgccaggctcaagcttgccttcttgagaaagtgtcacaaaattggcgatgttcatagattttacagagaagtccaaagatggttatttacattgttgcaactcattcagtgtatttcatagttctttaattgtttgaactcatttaaatattgaatacatggtcttaggatgtgagataagttatacaggagatacatattcagatgatatagacaggaaacatacagcacggatcaaagcaggcagtctatacagtcatgtactttttatattattcaccaatgtttttctttgtttatattttataagaagcctgagaaa

SEQ ID NO: 26050 - DNA, 1134 bp, Mus musculus
gttgttgttgttaatttccttcctcttcctcttcctcttcctcttcctcttcctcttcctctctctctctctctctctctctctctctctctctctctctctctctctctctctctctctcttctttttcttttcccttttcccttctcccttctcccttttacttttccctttttccttttcttttcttctgttgagacagggtgtccctgagtagcttttgctgccctggaattcactctgtagaccaggctgttctagaactcagacctgcctgtctgcctcctgagtgcagggtttagaggtgtgtgctatctccccaccctgaccaccctctctcccgcctctccagcccccgccactccaccctgcctttcttctttttcattgtagattctgggtatcaaactggtttgggtgctttcaagataaacattttgctgactgagctgtctcctcagcagtttgatttttgttttatattcattcattcatgtatctagttttaagtatgtgggcgtggcacacacaggaaggtcagggggaaacttgtaggagttgactctttccttttgccaggtggattctagggattcaactctaatcatcaagcacatttacctgataaattatctcactgtgaccccctttaaatctaaactgttgtttggacaaaatagctatgtagtgaaaactttattataaatcttatgttcccagtaacatcaagaaactgtcagagtaatctccatttgatgtcatttaaaaattgtattcttcatagattacctgggagttacttaaaactatacttacagttttgtgaaaactccatgatcccttgcctgaatttttaaaaaattttgcttgcttgcagttttgaaatgtaaagctttttgtaaattttgtgaattttgtaatcatttggcagcaagccattctgaaaagctatttatagtcttttattccatgtatgtacctattcataaaaacaacctttaagtgtttctttagagtctataagggttatgtaatgtacaatgcatgtaaccagcctctttagtatactaaagttaggaatgttctgagcacattttgctccaagataactagatgtgacaataaagcctacaa

SEQ ID NO: 26051 - DNA, 1608 bp, Mus musculus
cctctgggacgccgagcagtatgattcggagtacaacctggagaccttcatgcgctctctcgagtgactgctgcgtgccgtgccgtgcccggtgcaactgctgctagctcagttaccttctgctgatattcagcagactaagtctatgcgaactttaactgaatgtataaatagatctgaaactactcagcttagtgctggctcttgcttcattggggaacaagttattctcaagtatttgcactgtattaaatacgatgttaatgtgaaaaggtttaaattttacatgctgaatagctgcagacaggaagcagccaggtttccatgtgctaccaggaggtgcttctgcagggacagcctcctctacagtcactttctccaccgtgagatccaccagtgctgtgctgtttgtatgcgtttgtgttctttaaaatagtacttgtttttataattgattacaaatagggcttcttttgtataaaagccttaatgagccatacttttcagaatttcagagtgactttaatattaaccctaggacctgaaaatgttaagcaatgaattgaaccaggccctgtggcaacctttgtatatttaatgcagatgcatatggtgttttcaaatcctttaacatcattttgttcacttttaaagtatactaaataataaatgcaggtactggtatttaaggctacaataacatcctattagaggatgggtttctgtttaatttatctaatggctaggatatagccagattcaaagaacatatatgtactcagtaagtttcaatcatatatatatattttgtaactatgaacacagttttccagacatagattttacactgcttaaaccctgaaccctgtggtaaagactgtttactgtagcagggcctgaagcgggaggagcgctctttatacacagcacacaaggatacttgtatctatatgacagtgcccaccctacactggaaaatgtgtctggctttggcactaaaatcatgtagttctaccagacagcaataataactgagcagagagctaatgagctagtgttcaaacagctcaatggtgagggtgggcagctgtatatagatatgcatgtatgtgtatgtatatataattttataactttcccacataaattaatacatgccatgtatacacatatgtggaatatatttgtatatattcatgtacaggcaataagcatccctaaggtttgtgtctggtcctacacccagacatcaacttaaaaccatcagacctcaattgtacaataacaagggttttgtttaaaataattaaaaactccacagcacttagatacgacgtttgtcacacttgagtagccttgacaaccatcctgtaatcctgaacctagcattccacaagagaataaacatcaaattgtaaagtctgtgcaattgtgtgttgtttacagtaaagactgacaagcagctcagatgcacaggttgtgggaagccacaccttttgtatgtaaagtttatattcaaatatagaggaccaaaaggaaaactccagatttcatgtagaagatgcagtgtacttgtctgctttcataaactatttatttgctatttcc

SEQ ID NO: 26052 - DNA, 1216 bp, Mus musculus
cctacctagatattttgagtattgtgacatctcagcttgccaggtttgaatgaaagggtagtcacagattagtgataacaaaaaaaagtgtctttttgttaaaactggcttatgtgtatggacaatcctctctcgctggtttgtatgctgtgtctgctaacatttctcttttcttttctaatatccaaacttgtcaaactcagctgccatagtttccatcccaccagagtattttataattgataccgttgactttataccccagagtgggtcaggaagtggatccaggaatgttatgttgactttgtaagattacaatagttcattgggactcagagagtttgggtgctcacgagaatgcctgctcctggacattagtgctgttgggggtataaagtagtaggtgtttgtattttcgccgtggcaatgatggacatgattttagatgttcacagctcagatctctgtatttgattttcaactaacgactaattttaaatgtactgtatcttttcctacctgttctcttggattgtttttttgctggtaacccttcctcggcttctgccctggggcttggactaacactgcttgtatggattcgctactgtgactgaacgtggagcgctcgcagctaccgcttaactgcttaaactttgtagtttggactttttttttctgtaataacaacttattaaatctagttgtacgaagcactgacacgtgtcatcttttgctcaggacgatctccgtctgtttacatccatcaggaaatcctaacttgcaccatacaaaacaaaaaccccaggtcttcaaacagctcacatattccaccagagttcactctctcagagcccacactttcaaacgcacaaggaaatttgaaacagaaaggtacttgtgggttcaagtgatacacatggggggtggggggcggtgctgttgatggctttctaggcctccggcaaggtaaatttaagccctgcccctgagctattcacacacacacacacacacacacacacacacacacacacacacacacacacacacacacaccccacctgatgccttatgttttcattgccagtccattgccatttgaggcctaattccttaaccagaactgttgtgaaagagtatcatcatcttatgttttcacaaggataccaacgtctcctaaggtttttcagaaaatggggctttggaaaaaaat

SEQ ID NO: 26053 - DNA, 1153 bp, Mus musculus
aacaagccttttcctttattacagtgttcagtgtaagactagggatgtcacagtacaggtctctaaggatgtcacagtgggtttatacaacaccagatgcagccaagcagccaaatccgtggccagataacgaagtcacccctcctgaaatagcattgggtgtgaagcctagctcggccagcagtgtccagtgctttccctaaaatgtgcttcgtgtgtgtgtgtgtgtgtgtgtgtgtgtgtgtgtgtgtgcgtgcgagtgagagagagagagagagacagagagagacagagagagagagagagagagagagagagagagagaatgagaatccaccacctactgctgtcagtgtatgtatgagctggtgccttccgccttccgccccagatctttcactctcatgcacagtggtgacatgtgtgagaagactccaccttgtatgcggcaggacttgaatgcctcacctgatgtgtccccaggcagggctggcagcaggcctggggaagcacagggtcaccactgtctgtgttagctgcatctttctcactccccatctgttctctgtaatggggccccttgcttgcctttccttggggtgacattgggccactctgtgcatgatctgtctgccttcctgctgctgcttcttcagtcccccccccacaccgtctgcccccccccccccccgtgtgcactgtggaaggcagctgttgccaaggcactgcagttactgcagagacatctgagtgcagagccggtgttgtgtaaacagaacatccagggacttgctctacatagatggtgcatttctgctagttgttggtggcctcttctagttctgttgaagtggagagaggtcaatcaataacagataagcgtgtgtccagaggtggctcttgggttcgctctatgtattcagttttgtaaataatatatagattagatcaagttgtgatgtaaaattttaactcaaattgggtcctattggttggaattttacattaactacaaataaatgattagggacaggagaaattggggaaattattgtttagtggtatagattatgcgtaggtctctgcctatatcttgtgttttatcgcttgttagtgaggcatgggctaatgcagtgtactgcatttatgcaat

SEQ ID NO: 26054 - DNA, 1100 bp, Mus musculus
cttttaggctttttaaaaaaacctttgtttctgtgttttgaaactaaatgtgtcttacaaaatggactatgtacttaaatatgtacccctgctttacctgagaaagtaactgtaggaaatgctgtctgcttcccaggttgtaggccataaagaagggctggatgttatggagcgagctgaccctttatttcttttgattggacttcctactattcctgtcatgctgatactaggcaaaatgattcgctgggaggactatgtgcttagactatggcgcaaatactcaaataaactacaaatcttgaacagtatatttccaggtaaggtcctgagttgtggctatataaagtgcatgttggattgatgtttagaagaaccaacgcaggatttaaaaaaatatatctaaagctttttttttaagctattcctaagatttaagatttagttctaacataatgcttttcccctctagggattggttgtcctgttcctcgaattccagctgaagctaaccctttagcagaccacgtctctgctaccagaattttgtgtggagcccttgtctttcctactattgcgacaatagttggtaaactgatgttcagtagtgttaactcaaatttacaaaggacaatcttggtaagatggatttaatgttacttgtttcaagtagtatacagatgagagctaactatttgtgtttaaagggagagatgttatgtaggggctctgtctgctccctccatcaacccccactgtcagcatagcttgagagaaattaaaaaaagaaagcaggtcctgtgccagctgcctcctggaccctccctgtgggtaccttctcttctggactgcgctctgggttcagtccccagtaccagcatcataaataaacaactgagatgaaactggctcatactgtttcctgtcatcctgtttgccctccttggttgcagcccacatagtgcctggcattctcctctctctcagtgtgtaagaactccatgggaagaaagctacacaagtgatgtaggaacagggcctcttcctttgctacttgaagcctgctctttcccaacttctgccctcacagaagagaatgt

SEQ ID NO: 26055 - DNA, 1337 bp, Mus musculus
tcctaactacaggtgagcaccacaacacctgcttttctaacttaatgctgtggattgaacctagggccttacacatgctaggtatacactacatcaccagccctccttttagattttagttgtcatattaagggggcgatctccttactagtcattgtttaactagttttatattcattgttcaaaagcaattatttaggtcatgtttaatagtgaccattacaatgttcagcaatctgattagaatgaaaaattttttttaaagatttatttatttattatatgtaagtacactgtagctgtcttcagacactccagaagagggagtcagatctcattatgggtggttgtgagccaccatgtggttgctgggatttgaactccggaccttcggaagaacagtcgggtgctcttacccgctgagccatctcaccagcccctagaatgaaaatttttaaagtttaaaaaataatgctgttcacagtatatgatgcatgataatgctccccctttctgcgaaatggatacttctctttagaagtgtaacaaatatagattgagctgtgttagattgtaaataaatattttagtaaagactggtatctttctctaggttggttatctcagttttgagttttacggtgtctgtgggaatgactcttttgaacatccagagttgtaattatctagggtataaggggcaatttgactgagttaaccttaacactgctgttattctgtagagaaaatgtgaaccctgattatatataaaaataactaagatctacagctgtaattatgaaattggcttccatcattgccagtgtgaaaatatatatattctgacatttcctggatactcctgttaagttgagcagcttttacacagccacaagccctcagctccctgtgtactactttaatttccggggtggtggtggggggtggggagctgcttggatcgatctattggcatcaaggcccgtgaaggcagaggtttatagagctatggggagggagccacacttgtctgcagtccagagtgaacactagccctgctgcatttgaacaccacatgacaggcctccctggaaccacaaatcaaaagacatgggcagactgaaagctgaataggttacgttgagctcccatcaagttttagtagctgtagtgtataaccttggccaggtggctattcagccacagttacgttcatctctaaaatgcaagtcacacctagacactttctaggatttggttgagaaaagacaggtactttcggcctcagtagctcctaaaggtggtcgtcccatctaggacagggcagtaaccaaggg

SEQ ID NO: 26056 - DNA, 2192 bp, Mus musculus
ggcattattatgtagaaatgttaaaaacccaaagtaataaacttataaaatcttatagatgtagaatatttttaaaatctcttaaatctcttaatttttttcctttttattcctaagagaaattcccttatattaactgcttaatctgaagaaagatatcccaatacagtctttcttccttattctgtaaaatagtcacttgtcttgaaaaaaaaaaaaaagagctttttttcttaaaggcttcaaaacatttagagaggattacatttacctttttaaaaaccgatcttcacatctgctttctatttgatggtttcctgtaaaccaacagaaaacattacatttgacagatgatgcacaaagcaatgccatgttcctttattagtgaacttgctgattttataaaatttgggtatgttttttaatcttcttagtcaaatgctggaagccccagaattcccagtgctagaaacgcagactgaccttacacccagttcagaatttctcaggattcctgtgggctctcgctcatcagattctgttgacatttctgtttctcgtagttggtttgctgtgttctgtcagcagacgtgctgtgctaagatcagctgttgtaactccccacaactcctagggtgaaattgtgatccgtgtgtgaactaaaacatttgcccctctagggacttaaaaggaagcaaatacagagccacctccttggagatacaaaacggttgcgttctgaaatagccagtctccgtaagactctaaactccccgctgcttccggtctcatcttgccttaagtgttatttttttgaatatatgaatataaacatacagatgatgactggagtggacttttaaaaaactatttttttcacaagatactattttaggtgaaaatgttcctgtagatttaacagctgttttaaagtatttgctattaaaacttgcttcaagaacaagcgtggctatgtttccacacacaggcaatagcaacagaaagcaaagcgctcctgttcgtccaccagctgaggccgagagtggcgtttccaggtgacatcttcctgccccatgttacttgattggccaggattttctgctgtagaatctctcggcttttcacaggttaagtttcacattttccaaatacggtgaacttgggcggctgtggaggccgctctccctgtggtgctgcgcccgtcttctatccacatgttctaagagtctcccggtgagaagcctgtctctgtccatcccttcagaagacacgagtcaacactgccttctcctctgcgcaactggcccagtagccaaggtcgactttgaactccttgatcctcctgcctccacctctcaagtgccgggattaggcttgcgccaccccgcccagtgtgactatgcagcttttcatcgaactgcaaaatctatacaaagatgaatctaaacttagtcctgagtgttcgaatccatcgttgtaaacacaaacaacagtctgctaccttttctgtaaatgctcacctgccgttgagtaacttagctcttaaaaaaaaaatgggtacagttaaaagtttgtcatttgtatgagaaaagacacctgaagagattggaaacaatcccatgtcgtcttccatgaacctgcatgtggtgttcagtgtgttcccaagctcctgtgtgtcacttggcatcccaaccggttcatctcagtgggtccaggttgtggtccatgaacaagaacatactgtccagagaccgcatgtacgtactcaggcttccgcaagtgagatgtgtgaaaaagtcacgagttgccagagacttaaaaagtctttttagtcagtcagtgtggcggggtcctgaggttatcctgtttacaataaatctgacctggaactcggtctgcgctttgtgttgtgtgactttgtagtttcgatgaaatacttgagcttccctgtcaacattcacacttgacaggatttcattcttctgttagtctgttgaaggaagcagtgggcatgggtgtgcttgtgtgcacacacataggtgcatttgttggtactcagtaacagttcggaaacagctccatcttctagtcttctaaataacgtgtaaaataggagcctccatgttggaggccagactcttgctaagcagtgtctcccacactcagataaagaaattaacactggggctgga

SEQ ID NO: 26057 - DNA, 1173 bp, Mus musculus
ctgggaggttttggttaagatgaggtctcacaatgtgaccttgtcctccaactcatagagatgagctgtgctgtgctgggaggaaaggcatgtaccacaatgccaggctcgctgctcttcttacccagcccaggcttacctacccgggcgtggcactgcccacagtgggctccagtggactctactcttcccctatacattacttgttaagaaaatgccccatagacatgtccacaatcaatctgatggaggcagttcccgaaccgaaatttcttcttcctaagtatatctagacttgcgtcaaattgatgaatactaaccagcacaataagttatgtaatagcaagttcaaggccagcctcagctacatggtgagactttgtctcaaaaaaaccactaagacaaaaaaataaagtaagcaaatatgtcactgactttattaaaactgcagataatttttgagcctgttttctttttgaaacttcttaggaggatggtttgtttatcagcagaggaatgaagttcacaataactgcggcatcgagatctactaccagacagacatgcagagcacctcggagaacatgttcctggagctgttttgccagattatctcggagccttgcttcaataccctgcgcaccaaggagcagcttggtgagaggaacatggggatcgcaggctaccggagacgaatgaacagcttttaggctcgaagacatttcccacttgtagagccgcatggcgcggtgtctcaagcctgatatatttagatgtgaaaaccgtgtttgtagggaaaccgtgcgcaaaccttgtctatgtggaggggcttctaagagatgatcagttagcatcttgcagaaacaggagctgctgttcttcttcctcttctccctttcctctcatggtgaggagactggactcagcctcctcttaggatgcgaggcaggcaagtcccctgccactgcagtgtatccttagccctgctgttaaagcggttctcaacgagatgatagtgaatctctatctcatgccataaaaaggacgccttacattctccatagggaaggaaggatgctaagggccggcctgtaggtagtgccgcgggaagcacatcctatggtcctatggggcagcttagttttacaagctctgagcatctcaagtgcttcc

SEQ ID NO: 26058 - DNA, 1243 bp, Mus musculus
catgatcctgatgcagttatcttatgccatctttgataaatcttgttttctactcagaaagctgaacccactagttatacacctgactgtcagcttcaaatctaccatggctgcagttctggatctgggggaaactccagtgagagactccttacagttttcctcccagccttcatctcagacagagggctgcctgctggaagaattttagttggacattcagtagctactacccctgttacttgctaatggagactttttgatgctgtgcagtatctgaggatccctgcagactggggcttactttctaaggcacgcaaggtgtcccttagtggaggcatgcagatgtatgttagaggggaagatgtggcctgggcgatgaaaatgcatggcctttagtttaagaaccagagaagggtagaaactctatagaagagaaaaacgcagatatcgttgcgttccagtgatatagcttatgtaaaagaaattggattgtagctgattttcccagtcgactttgaaaattaatgaacctgtgttctccctccctagtatatgcgatctcttaataacttccgggctgagcagcctcaccagcatgccatgtactacctccgcttgctgatgactgaagtggcctggactaaagatgagctaaaagaagcccttgacggtgagcctcttctacttcattttctaccgtagtcatttcattgtctgaggtgggtggtaagagcctcacagctcagtatggtccatttaccaactgtacacacacccagccctgcctatagataaagcagtggtcagttagaggatttctgggtcagggccatggttgagaagcacaagtcaaaagttcatttcgatggagacagagcaggtgagggttagagaagagatccccaaggcaacacagtgggagtggaccatgttccagttctgcagtgacttgcagctcagtggctttaagtaagactttagacttagataagactccaagggtgcgggtgcgtgcgtgcatgcatgtgtgtgtaacctttaaaattaagatagttgcacatacttttggattgaaaaacagtatctataaaatgcctgacctattaggtttttaattaattaacttaataagttcctaaagaaggaccaatatgtgaaaaaggaatgggagtggtagagaacttactgttgggatactgtaataacaattgccacagcagtgccacctacagatgctaaa

SEQ ID NO: 26059 - DNA, 1124 bp, Mus musculus
ttcatacactctcacataaatgttttcctattgtaattttttttctaattctagctgcagttctatgatgaactttataaatattccagttgagttgtagcttgattaggggtaagctaatacctccacagttctctgcagtctttctcttttaaggccatgcagttagcgtgcacaggcttcccagtctcacatttctgtactccgagaggacatgctgatgctgggtcaccttagcgtcatcaagcctcctcgcggcagctgaaggacagccctgcggttttccgttccacactccctgcctctcctttctgatttgtcagtcctacaccagttgagatcatcagctcctacttccctgcctccagtgcgcacacacacagattcctgacaccctctctcttaggcctttttctcctcatgacagaaagaaacagattcaagaattcagccttgttcttgggaaattatataaactattattgagtttctgcacccaccccaaaggccacacagcacactgggaagtaataaatcagctctttatgtcaacgttttcttgcagcccgtttgcttatgtggaccccttgcactgtaacatggcctatttgtaccttgagctcctcaaagactcactcaacgagtatgcatatgcagcagagctagcaggcctgagctatgacctccaaaataccatctatgggatgtatgtaagtacccatgtcttagagccttccactcatcaacatttttatattgatttgatggaagcattttaaattgtgggtatgagtttgatttcttaaaaaaaaaaatgtttatcgcttaccgtattttctcttcatttaatttttaagttagcttttactctaacattccactgtgtaccattcatagtatgcagagtttccttgattctttttttttaacatctttcatcagaatgtcatatttttcccctcaatcaaaactgtgcccgatttaggtttagctcttacccattctgtatctgaaatcttgagcttcagaatagcagaatggagtcctctctcggtaaaccgcgaggctggcctaccctcttccttagaagtcagatcacgaggctgcatatccatactcttcgg

SEQ ID NO: 26060 - DNA, 1137 bp, Mus musculus
aggtcagttttgaccttttgatgttaagatattgctattttcactaattttagcatctctggagagatcaacacctctggatttacatttgcccaatactgtacttttcttttattgttagtacctctttaatatttttttttcttagaacactggtactctctcccaatcccccattaaagtgagacaaggtctcactatgtccttgggctatcctagaattcaatgtgtagatcaggctggtctctaactcagtgtctgcccactgaatgctgggattagaggtttgtactatcgcaccctaccctaattattcccccttggccttatgcattctagcacgcattgtatccctgagctatgtcctcaaccctactttcttcagatcttatgtaattcatattaaagtttcattataaatgctgttgttttaaagtcacagttttcaagttagcaattctgttttgtttttaggtttgcgcagtttttcctgtgccccttgtttgatgcaagttgtaaagacagagaggtgaacgctgtcgattcagaacatgagaagaatgtgatgaacgatgcctggagactcttccagctggaaaaggctacggggaaccccaaacaccccttcagcaaatttgggacaggtttgtcagcttcctgcatcagctgctgctccttgatctccttgactctcactcctgcacagcattttcataatttcttgttccagcttgaatcctattcaaataggattccacatatttcaggattggaacaggtaggagccgtgtgtggttactaccggggcttcaaacgtactgtgcacacattctcaactaagcaacaccctgactctttgtccttgtttttttgaaactggctttttttgccctgtaatctgagctagcctccaacttcaaatcctcctgctttagcttccccactgctgggattacaagccgttaaccagaaaggttattgtgctttttaaaatactttagttacaagccgggcgtggtggcgcacgtctttaattccagcacttgggaggcagaggcaggcggatttctgagttcgaggccagcctggtatacagagtgagttccaggacagacagggctacacagagaaaccctg

SEQ ID NO: 26061 - DNA, 1149 bp, Mus musculus
ctggcctcgaactcagaaattcacctgcctctacctcccaagtgctgcctcttcctcccaagtgcttgggattaaaggcatgcgccaccactgcctggtggaaagtaacatttctaaattgtgattctatattgaactcaaagtttttaaaacaaggtactgaaggcatttgctacttttaaacaaatttgtcttttgagaatgaagtacccagacttgttaccaaacacatctgtgtgcccttatctggagtcttaagcacacgtctttgctatcctgaggcatgtgttttgtaacaaatactgagctttagactttgatattcatcttccttattaattcttgcattatggctacagatataggaaacagttgttagtaatggcatgtcactggggcatggtggaacatgttggtgatgcttggaatcccagcacttgggaggtagatcaggaactcagtatcatcagcagttacatattctagtataaggcctgtctgggttacaacacatacaacatacaaccccattccctaaacaggtgtctcacttccaaattctctctctctctctctctctctctgtgtgtgtgtgtttgtgtgtatatgtgtgtagaagctgaggctgatgtgatgtgcagtatattccttagtcattgcccaccttactttgtttgttttatttctgcacatgtgagtggatacgtgtgagctgtggtgcacaggtagagtcagaaggcggcatgcagggcttggtgtgctccttgggttccagggtggagcttaggttggtttggtggcaagcacccttatctactgaaccatctcaccagccccagcttattcactgaggcaaggtctcccagtcaaacccagagttcccagtctgattaggcttgctggctagcttgctttggagatctgctgactccaccttagagcctggaattagagccagaagtacttgggctctgaggacccgaactcaggtcctcaagcttatttagccagtgttgaatcacagccatcccctagacccttgtcttgaggtgttaatacagtgttttatccagagtaatagctgctggttgagctctaggtaccagcttgtctccctaccccggtactggggttagagtgagctgaagc

SEQ ID NO: 26062 - DNA, 1168 bp, Mus musculus
ggttctagggaccaaatccagagtctcttgtgtgtgctgaaaagcatcctgttaccgcgttacttcctagctccttagcatatcaagttggatttgtacacacatgcctttccttcatagataaaggttcccagtttcaaagaggtcaaatcaggaatgttccatttataggacagggaggggctggagagatggcttagttgctgttccagatgaccctggttcaattcccagcactggcttggtggctcacactgactgtaactccagttgcaaaggatccccaagggcaccaggcatgcaaatggtacacagacataactgtaggcaaacactgatacataaactaaacacaggtaagtctttccccaaagaggcttcatttgcttattgccatttgccactacttagttatcgtcatgagactgaagagtgtggagatgagcttctgtagcagccaggattttgttgtattatgttgtattttgcaattagactaaaattttgtagaatttagaacaaaacattaactattaaatttgtgttaacttttagagccatgaatggaaaggtaactgttcaggaggaacaaattgttgagttggttgaaaaaatcgctgttcttgaggaggagctcagtaaggtaggctctggggccaccaaggctgggtgacagggactgctaaaaggaggagaatgtgtagggactcttttctttttttaaagagttttttttgattcttatattcaaggtaagttgtattttatttttacctctgttagtaatgaaaagccttctattttgacactttagaagaaatcacagtcagacatttgcttaatgactgggttatatttttgagaaatgtgttataagtgattttattattatgtaaacactatagagtttacttgtacaaacctccaaaatctgctagaatcctagaatttatggtatacttcattgttttttaaagatttatttattttatgtatatgagggcaccagaccccattacagatggctgtgagccaccatgtggttgctgggaattgaactcaggacctctgggagagcagtcggtgctcttaaccactgagccatctcccatgcgccctccccccacccccccaactcagtttttattttgagacaatgatcacataa

SEQ ID NO: 26063 - DNA, 2408 bp, Mus musculus
tatgttttagaaacaatgcaaaaaaagtaatatttcatgccaggtggtggtggcacacgcctttaatcccagcactcaggagacagaggcaggtgtatttctgtgagttcaaggccagcctgttctatagagcaagttccaggacaggcagggctacacacagagaaacccggtctccaaacaaaaaacaaacaaaaaagaaaagtaattctttcttcttccattactggtaaagtaaagaagaccctaccttttgtgttttgtggttttcaaatttaaactttagtccataatgcatagaactttcataataaaatgttgcaatgtctagtaaatgttacataattgtgacttcatttctcccctttaaacccacagcgaaaaaagccacatggaaaagacaaagaaaacagaggccttaacccggtggagaagtataaagtggaagaggcctcggatctctccatctccaagagcagactgccgcttcacacctccataaacctctagctgatctgaggcttagggtgtcatctttaaaatacaacctgaaactccagagtctgaagctatgtacagatgaaaaggggactgctgtgtgagggccccacagtaactgtagttgaactgaaagtcttttttataatccctgtagtccaaggatgtagtaagctgggtatcatttgggatttacattgaatatgtgtgtgtgtttctagctttttatataaagaagctcttctgtaacaagtaagtatttttcttgtatataattaaataccaaatatatggaaatcattgttccaggtttagacttgtattggtgaatgccatctcctttgctgtctggccaaggctgtttccctacctctaaccagccttttctagtttgtcttcgactcctgtctcccttttcctgtcacttaaccttttgtagcctacagaaaggtttctttagtatgagaaacgcagggttttacctggaactcttctatctcactgattacccttacaatcactgtcaaaacacctgaccctggaaggacccttccttttgggtccttcatttgttctcgctgatatgcacacatctcattccttcctgaggtctgacacatcaccagcctccctgtagtgtcggctcctaatgcaggagaccttgaggccccacttaaaaggtctttaagtctcttagaaatgataagattgttttcaaactaccaattatgactataacttctattttgtttatcttttaaaactttattccttgtatataataaaaatgtatatatacattccctctgttgaaatattaaccctcgctctttcgctttgacaacgctgtttctggaagttggccattttaagatgaaccagagcacctacctaaaagtgtatgcagagagtaagtgtggtcacgtcaagttcatgtatacggttcagagtgatgtggttttggcacagtctcactatggagctcaggctggctttggactcactatgcagcaggacagtcatccttccaaggcctgggaatacagacatcatcactgtgcctgtttcagaaatagaactttggccaggcgtggtggcgcacgcctttaatcccagcactcgggaggcagaggcaggcggatttctgagttcgaggccagcctgatctacaaagtgagtgccaggacagctagggctacagagaaaccctgtctcaaaaaaacaaaagaaatagaactttgtaacaaagagctaacccctaatagaaaattagaaaaaaatgctactttaagaaatttattttcttgtactatttctccaactcattgtagaaatagaaacgttattttaataaaaataatgcataaatttctctgcaaacagatgccaacctaatctgtggatattatctaatttgcttttggtaaatctttaattggtaattgtttttgaattttttaaattaaattattttaattttttgttcgtgctgcctgtacatttgtgcgctgcttcccgtgcgtgctgtgcgtatgcagagatgccctgaagctggggctagggccactctgggtcagcatgtgtgcaccagagcccttactctccctcctagcatctctccagccctgaaatttgtttcttttacttgcttgcccataatttcttatttagcagtggtatttattgtggtgaaactcctaaaacagacttcagcaaaggtcctaccaaggaagacaccaggcttccagtagactccaagcacatataccttggacatatgatgtgtatgtggggaaaagaccctacacagcccgaagtacagcttatgtcatcctgcctctgtcattgttctcccaaatggttctgcagcagggttaacgcctgacaagccacagaatagcaaaagtaat

SEQ ID NO: 26064 - DNA, 1218 bp, Mus musculus
actactaataatttcatagtttaagccagttgtggtggcacatgcttttaatcccagttcttgggacgcagaggcagatagatctctccatttgaggtcagcctgatctaccgagtgagttccaggacagccagagcaacacagagtctcataaaacaaacaaacaataaaatcattacaataatactttcatagtttaaagttctaattggtaccgatcacggggtacttatgttctacccttcgctttgacctgtttggactaatgcatcctaaattcttcagttacttcggaataacttcagtgttctttggttaaaaaacaaacaaacagacctccattttctctgctatgttaagaattctatgaggaactattatagttgcaaattaaaaaaaaagttatatgaactcaaggaccttaacacatgggacaatactgtcagtcagaggagagacacattttgttgttgctgctgttgttattcatattctgaaagcacaaggaagtgggatttcccagagaaggctggattcccttgtaccaaagagacagtggaagagggaggaggcttccgtggctttactctgacttgtagtggcactgatccctggtgggacgcgcagtccggtgtagtggattctctggctctccaagccagcaggcactgaagtttctgggactcaggtgtgcgaagtaaataaaacttggctggggagagatggcttagctgttaggagcatctgctgctttagcagaagacctggctttgattcctagcacttacatgatgggtaaaaactgtctgtaattccagttgcggacaccctcttctagccttactgaactctgtttgttgtgtgtgtgtgtgtgtgtgtgtgtgtgtgtatacacacacacatatataggcaaaacactagtacacataaagtaaatttattttatgtatatgtgtacacagtagctgtgcagatggctgtgagccatcatgtggttgctgggaattgaactcaggacctctactcgctccagccccgacaatgtagctgtcttcagacataccagaagagggcatcagatctcattacaggtggttgtgagccaccatatgttgctgggatttgaactcaagaccttccgcagagcagtcagtgctcttaaccactgagccatctttccagccccaaaaacttttattaaaagggggccggatatga

SEQ ID NO: 26065 - DNA, 1204 bp, Mus musculus
atgccaaagacttccccccactccacccaccaaactcacttccactaccctattgactctatacattctgagtttggaggcatggtcatacagccatctatacacatgtcttctattttctcctgtgtgacattttcacaattgacaattcacaatttctacttttattgactattttttttaaaaaagatccatatagttgtttcttcatgactcagatcccacccatatgaagcgctgtctctcatttgagaacatgatgtcagccaaggatgtttatcagtgttcagagacaccggagctctatgggcgcccagaaggaatggccaggaatggctttgactgtccagtggctcacaggactgcccagccgagctaaatggcaccatggccatctgagaagccatatccatggactgacaccgtttctgtttccctttcagaactatttatcaatgaagattgtgaggccgaatgcatagtgaaagcagcgccttcaatcacgcaagcaatgaagaactcctgcctcacacactgatgtgtgatttcaagttcaagacgatctcaggagacttcaccaaggcacataaattcctagaggggctgaatcccagaaagtcagacaacaggcaacattttttatcatgttatctttaagtattaaaacatttattttctaaactttaagcctattttccgagtatttctaaggtggctggttccatttataaatcttcttttgaatgtgctctgcattctatgactcgtttgggcagttagtgaaatgaatttgaaatgtcttgtatcttaacgtcatatatcctatttgtaatcaagaggaaagactacattaagaagatagggtgcatagttagagcagttcttattggtgcccacaaccattgttgtggtattttgtatggacaaatgtcatgagactctttgcaacttgagtgtaaataaaattatctcacttgtacacatggatgtttgtcctctattctgagtaagttgggagggaggcaggttcagtttctctggtcctagtaggcagaatgctacagcattccagttgaccacaagccctttacaaccataagccctttatgagtgtgctgccaacatgatcccgtgggtccagtaataaagctaacacttatgaatagtgttgtaacaaccttttacatcttcatgtgtcttactc

SEQ ID NO: 26066 - DNA, 1177 bp, Mus musculus
atgtgtgtatacatgtatatatatgtatgtgtgtatatattacatactacatatactatatttactatatataatatatatgtgtgtgtgtgttctttgtttcatgcacattagaagagggcatcagatcccattacagatggttgtgagttaccacctggttgctgggaattgaactcaggacctctggaagagcagccagtgctcttaactgctgagccatctctccagtctgtaatatgcattgttatgatcatttcacagagaagaaaacagaaggactaaataaatggcataactagggtttgaacacaggtattcacccaggcttttctcctgagcaagcgtgcattccctcgtcgtcttattactagcgtctactgtttataatgtctccctacccacatagctgtcctcaatcagtcgtcttcccccaacatcgccaacacttggcaattctttgtctgagtcttggtttctggagcagcccagaaggcccctgactgctctgtatgtgcattcctttacttagaatgtacgaactgagctgctacttgcctcaagagaaagacctgaagatctctgtctatgactacgataccttcacccgagatgagaaggtgggagagacaaccattgacctggagaaccgcttcctttcccggttcgggtctcactgcggaatccctgagcagtactgtgtgtaagttgcttccccacaagtggaggtggtctgctgcatggatgctcagacctgggaaggctggagggctctgcctccatcagtgtgctgtggtcttttggtccatccagtgtcatttttgacaggatcatctagggacaaacaaggcaagcacactgcctcaattaccccatagtctgttgaaatggcagtacctggacagtcccctctcctgttcttgaactcctggggttagcggctgttatgacaaggattctctagcctttaggaatagggattgattcatgactatcaattatccacctcccccaaggattctatgatgcctagcatcccctgatgctaaccagtggctctctaagccttcagtgagacagcatgccacttctggtatttgaatttgcctctatgattgtgataatcccagattcctcatttttgttgaggagggaactgcacacacacacaaaatag

SEQ ID NO: 26067 - DNA, 1137 bp, Mus musculus
ggtaattgtcaccttctttctttctgggcgtctgttatctcacaaggagaaagatactctatcaaaacaatgtgaacagaaggattgtccccatggggttttacccaagagctttggctggggctgtgggggtggtggtgcttagggctctctagttcatccttctcgtgttactgatgtgacccaggacaagatttgctccagtcacaggaccagcatgtgcagagttaggtcatccctacctccaccccatcccaccttttcacccacacagatgctttgaaggcacgctggcccactgccacccaaaggagaaccttgcactgaactcgtctgaggtcctcaggtgccccagaggccacctttgtcatcacttgggagtatagaagcaagccaagtctatccccgaaattgacttcagtttgcacccgggatgatataacatcttacctgtcttgtctccacagtgtgatccttacataaaaataaccttgggcaagaaagtaattgaagaccgagaccactacattcccaacactctcaacccagtgtttggcaggtaacatacagttcaaaatattccttctacatgaaatgtgccctgctctggttgagatcctaacgccaggaatatgtacagatacctttgtcagagaaatgggtagaagggctggaaggtccatgagggaagaatgtcccccaagagccttgacaaagcattgttctcttcgtggtcacagccttgacttgtttctggtctagaatatgggtattgttaacacatttttattcatgccacttgtgaacacctgtgtgcatgtggcagtgaacacctgtgtgcatgtggcagtcagagacaacctggttctctccttctaccatgtgggccccagggattcatctcaggtcctcagggttgacctcagtagcctttgcccgtgtgtgagtcatgttatataagtcttatcagagctgtttctagttaccaacatgatcactaagtaaagccagtgttattcagctgagagcacctttcatatttagtaacaacatttgctgagcagtcagagtgagcaagtcctctctctcctgagccattttgtagaagacatgtcagaaatctcacagaactctgac

SEQ ID NO: 26068 - DNA, 1158 bp, Mus musculus
gagccaatgacaagcttactaacgtcctttattacatgtagcatgcgtacatgtaatggacacatatgaccgctaacttgattttagactttttacctggataaaccgaatgggcccacactaactgctgttgctgagggctggaggccgagtctttccacgagggcatcacgctctgtgatgtctgtgggaactcgtgacggatgagcttagcactctccgaagaagagcaggagatgagggcgtggggcagattggtcaagtgccaggcagacagcgcagaccttctttcatggccgactcaacagttgccttccaattccagtgcttaagcagcatgtcaacagcactcagcaaaatggcttctccaaggacagtgcatgtatgtatatgatacgatgcatgaggccgcatgggactggggcagcttggtctaagcacttgaattcctccgggttctactagtagattttggagtgaaaggtgatatttagatgaataatgtcattttaagccaaagggaagactggcccggggccatgtagtgctttgagttgaattttcaagttcatttattagattggagaaaaaaagaaagtcaacgagttgctgtccttccttttccacagaggacgatgagcgatcaggcatgaaggaatccttctgggctaaccctgaaatttaaagtcagcaatttgtcttggatactctttaaacatggcctgttcttgtccctaaatcagttcgttataactgaaagtaagcgtgaagaagcagactaaatatctgaattcaaaactattgagactgtcaaaagatgtttttttttttttaattcctctctccaaaatcgcacttaaactatgatcgcttaaccctaatcttgcttgggaatggagctaacaaaacaaattgatacgtctctttttctctctgcctccgttggcacttctgctgcaacaagggtcagtctagatagaaatactgaggaccttaagaagccgggtggcacacaacacaggaggcacaaacgtgctgtagggagagatcaggatttcagaaaggggaactgtgttctctaattagcccagggggctagcttatcagtgtcccaagagaaaactcaagctcctgcaaactcctggacagtccctggta

SEQ ID NO: 26069 - DNA, 1131 bp, Mus musculus
gagctttgttatcataactcttttgagttttaatgtaaacccaagtcaacgtttagtagaaactttgctcaacctcacatgatcagtctctggtagcgttttctgaacttgaacacatgcattttaacacttgatctggtctcttttggtttgttttgttttttggttatgcttgtttgtttcctgaataagctctcataaagatgagtggcaccatccaacagtattaaatgaagccatatgaaattgctaatatttgatcattttggcttacaaaaccaagaatttcacatggttcaacttaaaactattctttaatagtaaaaaaaaaaaaaaaaagaaggtactggagacgtgcttttaatgtaggatttgtatgtaagtaaaaaatagaggttttctaaataaaattgatctccacggggtatctataaagatacacagattctttagttaagtatcaggaaactttcctcacctgtggttctcattccatctgtctgtgtgtctgtgtatctgtctgtctctcagaatggagataaggcggcatcacccagtgagatgacctgccctccaggttgggagtgggaggatgacgcatggatatatgacataaatcgagcagtggatgagaaaggtacgtacatctgcttgcctgagtgtgagtctgcagaaaggcctcggttaaccagagcaaaggttccgtgggaggaaggaccccggctccacctaggtcatgtggtgtaatccgcacctattcaaatgagtatctgactcaaacagatggacagatgctgggtgaggagatgtccggagtggaaaatggaggttctaggaccagccagcaggactttgggggtacttggaattcctgaatagaaatataggagagatctagagcttggattttctctttcctaactactccataatctacttgagatgatcaaccttagaggtcccagaactcaggtaggagaatggcaaaatgtcttgcatgtcatcccaccggtgaccatgtgatcaacattgcttttaggtacagtaatgcttacctttctctatagacggtcaggtcaaatgaacttgccgtttggaactatcaaaaggaaaagtaacattgatttgttc

SEQ ID NO: 26070 - DNA, 1176 bp, Mus musculus
ttggatatagcccattatacttgttaggccattttaagcaccataaaaattactgtagatatgctaagatatatctgactattttacataatatagttacagtccactaataaatttgtaactaatgtaacatattactagtccgttcctttttatgacaatgatgttaactgtagccatttgaaaatcccttgacttttctgctaatctcagtctcatgacttcagaatgcatggcttgactgaatcagggtttctagagtggctagagactcattggcattagactggcaggcgtagctgttgtgtgtatactcctggcctctagctaagctttcatgaattgagcttgggcagatgaaggtgggaagctcccacataatccttaagtgcaggaaagtctgaggccactagactcgacagtttctgaggtctagaatcttctaactctccagttaatattattgaattaaagctataacttcataggcaggagatgtaacctcttgttttacacagggaccggcttactaaaaatgatgtagttgggaccacgtacctgtacctctctaaaattgctgcctctgggggagaagtggaaggtaagtcacctgaggaccagagctaagcaggactcaatgcttctagaaaagacaatgtcgattgcaacgctccggtagtgcaatggtcagcgagtagaacttacatagaacgcatgaaatgtggcagtcgcttaggaacaggctcgatgccttaaaagcaaatgtatctgggactgatgatgcaggactgcgaccccagctgcagaggagactaagacgggagaatcacaaattggggcctatctgggctacataggtagtttccctctagcctaagcaacttacaagaccccatatcaaaataggaatgagaaacaaggctggtaatgccgtcaatcattagagtgtgttatctacagaataaaaagtactgggttcaatttctaatacacacacacacacacacacacacacacacacacacgcgcgcgcacagtgagcccagtgagcctggccaatgatgttttggtgataaacagcacaataactaacgacagaaacaaataagaagttatacattttcatctctcttgctcccatccaaaacctttttgccaggagctgtttatgataga

SEQ ID NO: 26071 - DNA, 1105 bp, Mus musculus
atatattatcttatcatatttgtactgttgaattacacattatagcatttttattgacctatctgtggtacttttaatattctagggcttcagttccatgtctctatgctcttacatcttcacgagccatgtcagatgtggctattcaatcacagaacttttcccccaggactatactcagtgttcaatactcagccgtcacgagtctgtctatctcattccttctttgccaactgtattccttacctctagtcatttatctgagttgtagctacattagtataacaaagattctttgtctgcttgtgtgtgctttgctagagtgtgtgtgtgtctatgtgtgtgtatgtgtgtgtgtgtgtgtgtatgtgtggtgtgtgtatgtgtgtatgtatgtttatgtgtgtgtgtgtggtgtgtgtatgtgtatgtgtggtgtgtgtgagtatgtgtgtgtgtgtggtgtgtatgtgtgtgtgtatatatgtgatgtgtgtatatatgtggtatgtgtgtatgtgtgtgtgtatgtggtgtgtgtgtgtgtgtatatgtggtctgtatgtgtgtatatatatgggtgtctgtgtgtgtatgtggtatgtatgtgtgtgtgtatatatgtggtctgtatgtgtgtatatatatgggtgtgtgtgtgtggtgtgtatatgtatgtgtgtgtgtgtatatatatgtgatgtgtgtatatatgtgttatgtgtgtatgtttgtgtgtgtgtgtgtgtatgtgtgtgtggtgtatgccataactcatggaaaggcatgttatttctcaccataattataaggttgtcgttgttgggtgtactgctacagtaataacagatttgggagaaaaagagagtctaatgctcaaatccatgtgagttataagaaacaccttggctttcagtgttagtgcatgtaaagttgcaagtcttgccttcagcacactcggcacaatcagaaggctgcaatgggaggattagggagttgagagttagaccacgtgccctggtttgcttggctgcctccccacacagtgcttggtttgctgtcagtgggggcttggtttagacagtaagttctatggtcaacataa

SEQ ID NO: 26072 - DNA, 1151 bp, Mus musculus
agtgcacctgcagatcacttaccttcttattgtttggttttgtttttagttgagtccctcttccataagtaaaaatagttcatttggttccctgcactccccacacagtgttcctcccagatgaatagtcagaagacagtctgtgctgtagctacaataatcgagattttgctgagattttatttcaatagtttgcactacataaacgttatgttgacgtttttgattcgttttcatatttgagataaacagttatcccaatgtgtttttttctaactgcacatacatttttttctttccctcttgtctgagaggaacaatgtctcaggaagtacaaggatctgtgtaaaaatcgtctgggtttaaatcttgattctgccacttgatagcatgtaactctgagcagacaaaccccttgcttctctggctggagtttgtcagtcttccttttataagccttgccttcatatcagtaaagctgggccaagagcactgatgattaattatgataatgatggcaagctgccttgcagaaagcttggaatatactaagtgcttagttaatgatcaaacctccggttcttttgacatctgaatattactaacaattagtaatagtacccatagaaaaataagttcagttgtgatttctcagtggtgtgatgcggtatgggttacttttcctgtggctgtgttaaaatactctgatgagagcagtttaagggaggaagggtttgttctggtttctagtccttggggatcattccatcttggctgggaaggaggcctggcagcaagaacaagatggtcacattgctctggcactcagcaaccaaagggagaacaagtgaagccctgcctataaagcttcaaggcctgaccccagtgacccccttcctccagcaagactccatccctacaggttctgtagacttcccaaacaaccctagtatccacacaagcctttccttacagatacaccaagatcacccaaccctgaaaagtaggcttttcagtttgctggctagcctgtgatgatagccacctggttttctctatgtgagaatgaagaaaggaaagccattatggaattattttttgaattctgtgaaaactatacaaatagtgttactatttagtattgttatagt
